United States Patent Application Publication US 2008/0113342 A1 - sequence listing, part 4

SEQ ID NO: 11382 - DNA, 564 bp, Arabidopsis thaliana columbia
tgttgggtttgaatatgaaaagccatggctgtttgttcgggtttacttgcatattttacaaagaaaaagctttttgagagttactctttgctggaatcagcatcagaggtcccatatacagcagcaaagtagtagcttacagtcttaggtgttaagccagggaatctgtgggagctatccggttgcaaatcgatcttaacgaatggccattgcaagggttgtgcggctgcaactcttcccatccgtccccgatcgcacagaatctgaattttgggtggttgaaacgctccttgatccatttgaaacattggagcttccccacatctattgaactgtacactgaagaaaggcaaaaagagttaaatgatgtagttaacatagaaatgcaaatgcatgacggagctcgcagagtagcaacaactatgtgaatccgaagctaagatatcccattgaaggagatgtctccgagcttaccattttcatgtcttaggaatgtatctagccggaaaagcaggcatttcacgaggctcggtatgagggcccggaagtcactagaatatgtat

SEQ ID NO: 11383 - DNA, 615 bp, Arabidopsis thaliana
agtaacgaccgccagtttgctctaaagtcttggcgccacgcctcattcccacagctcaatacctcccactccgtttccagctcacgcgctcgctgcttcgtctttctcgcgcttcaggcacatacatcccgctcgcccccctcctcctcgaacccctgaatctcaccgaacttcgcaaagcccctaaacaagctactctgcgaccgctcgactttacgacaacaatccgcgcgcctaaatcctacctccgcacccgggtgtaccaggatggcgccgccgagcaaatcgccgaattgctgtctgaattcttcgtcctctggagcaaacacatttcctttccggaactgagcgtccctatcgttgttgctctcaagcgctggttgaaacaggtttcatctcggtctggcggcaaccggaatcagaaattaaatcaaatgatcctcttgcttgtgcagaaggtcgaggcgaatgcgaagtggattgaggaaaggagagcgcatgttacatttgcgccgaggaacaagacggaggtcgaggctttcctcaaggatgtagactgggagagtacgcgttgggtgcatttgtaaaggtgcagaggaagctgagggaggaaaa

SEQ ID NO: 11384 - DNA, 544 bp, Arabidopsis thaliana columbia
tggtgcgtttcttctggctcattgcagcataggacaggttgtcttgtgggatgcttgaggaaagtgcagaactggtgcttgtcatcggttctcgaggaataccagaagtgtgcgggtttgaaatggagacaaagagatttaaggttcattgaggatttcgatgtgctcagattgaagcaatgtctatacagcatcatatatcagtacaatgggtatggtctcaagagaagaaagttgctgtatcaagaagagaatgttgttcaagaacagcaaaaacctcaagccaccaaaggataaagaaagagatttgaaatcggatttttttttgtttctttacattttgtcgtgatgatgatgatgatttttttgagaataggatagttctttaaaaagcttgagaaaacagaggatttgatttggtctctctctatcttttttttacggttagagaaatttacagattgattcttaattgttcataagaaactaacatgtgtgatgtgagcttttgttttcgtatttatgattgagtaaaggcaattga

SEQ ID NO: 11385 - DNA, 619 bp, Arabidopsis thaliana
tgggccaatcatgggctttagaaatctaataggcttgtaatgtggccggtgaaagagataagagtgatatattatagggatgaattgtgaagattgaacctcaataagaccaatcggaagatcacgaaggtaagtgtaatcaaaatcgtgaccttttgatatatagtgatatgataatcaatggattgtttttttctcttctggaaattaaacaaaaattgccaaaatagaggtttgcgagagactaatacaatactgacgcagtctggaaaaattaaaagcagctaaacttttttccggagatttcgtgacttcttcttcatcttgttgtgtctctagtaacgaccaataccccagaccctgacaactccatcagtgtaaccactgaacaatgtgcttccatctgcactccagttcaagcttgtgcagtagataacctgcattttcattacacattcccattagataccattatcaatctcttcctatatgttaacatcaaagtcaaaacctttggagcagagaacatttaaagaataaaattcctagtttcaaagctaatgggtaagggaaaagatttcctacatgcaatttctaaccaaaatttcacttttttttt

SEQ ID NO: 11386 - DNA, 565 bp, Arabidopsis thaliana columbia
tcaaatgccacaactggacagccgtttatatctactcttgagcttaggcagttgagtggttcgatgtatggttcgatgctatctgaagaccggttttacctgagtgttgcagcacggataaatttcggggctgaaagtgaagcttctgtgaggtcagtatacagttcataatctgtgtgttgtttcagcattgtgatttatcaggatgagttaaggaaatgagttggtattgcaggtacccggatgatccgtatgatagaatatgggaatctgatttgcaaaagaagcctaattatcttgtggatgttgctgctgggactgtgcgagtgtcgactacattgccaatcgaaagcagggtcgatgacagaccgcctcagaaggttatgcagacggctgtggttggaacaaacgggtccttaacttacagaatgaacctagatggcttccctggttttggttgggcatcacatactttgctgaaatcgaggatttggctgaggatgagtcacggaagtttagattagttctacgtgagcagcctgagtatagcaaatcggttgttaca

SEQ ID NO: 11387 - DNA, 525 bp, Arabidopsis thaliana
ctcataaacctacaaaagcttattttagatcaaaatatgttgagtggaccactcccaacctctcttggaaagcttttgaatttgaggtatttaagtctattttcaaatagattatcaggaggtataccagcttttataggcaacatgactatgttagaaacacttgatttgtccaacaatggttttgaaggtattgttcctacaagtcttggcaactgtagtcacctactagaattgtggattggggataataagttgaatgggactatacctctggaaattatgaaaattcagcagcttcttcgcctagacatgtcaggaaattctttgatcggctctctcccgcaggatatcggagcgctacaaaatcttggtacactatcacttggggataataaattatcagggaaacttccacaaactttgggaaactgtcttacaatggaaagtctttttttggaaggaaatttgttttatggagatattccagatttaaaagggttggtgggtgttaagaagttgatt

SEQ ID NO: 11388 - DNA, 521 bp, Arabidopsis thaliana
acactacttcagcagttccctaatggtaataaagtagtttacaatacttcagtcatcaagactcaataagaggaaggagacatacaaaactatcatcacaattcacaagtacctttgatcttccacttctatcaaaatgaactgtgtagcgtttaagttctccaacttcagcaaacagttcctgcatattaacaaacatattcatattaactacttcgcaggatcgaatccattatatttggtatctattcaggtaagacgatgctagattccaggaaccctaactatgcagattaacaaagaattagggtaaagaacaatttaggcaccttgatgtcttcgttcatgacaccgtaatccaaattggaaatgtagagcttggttccagtttcgattccggcggaggaacgtcccgatcggtgatcttcagatctatcggagaacatgtcgtgacccaggtggactccggcgcctatacaaccaaatgaatccgttgtttgatatttccacgtattgagaga

SEQ ID NO: 11389 - DNA, 516 bp, Arabidopsis thaliana
caacatattttgatctaaaataagcttttgtaggtttatgagatttccaatgtcataaggaatgcttccggaaatgagggttcctccaaggtctagagttacgagttttgcggataggttcgcaatagatataggcaagtcacccccaagcctatttctgccaatccctaaggtctctagttgggtgcagtttgtcaaagaagtgaggaattcaagatctctagaagaatcacttcctaaagaattggtatgaagaaataacaattttaaatttggaacatttccgaatgtaggaatacttcctgtcagattgttctcattcatacccaatctttcaagagtagagatattggaaagagttgttggaatggaccctgtgaaataattccctcccatattaaacgatagaagatttggtagtagaatacctaagtcaggtctaaggcgacccgagaaatgattataaccgatacctagaagcttaagtgaggacaagttgtagagagcgggaggaaa

SEQ ID NO: 11390 - DNA, 587 bp, Arabidopsis thaliana columbia
atttagattccgcaaaacaattcctaaacactatttgtacactcctacatgaccagtttcactatatctcaatttgaaaattgcatcgaaccggataaaattagaagagagaacaaattaaacataccttctaactttagtatcggcgcaaacactgaatccagaagaatcatcatggaagcagcaatcgagtaccgctccaccatgtttaaactcccctctcatcaaatcgccgttcgcatcatacaatcttacactcttcgatccaaaaatccatcagattagagagatcagaattacaaaggagcagtaaaatcaatgtttgaaagaagattagagatttctaaccttatcccatgaagagactagtaaatgatcgctgttattagaaaatcgaagattagaaatcccatcggacggtggattcgagagctcgcgaccaatggccggcaccaaagtcatcctggaaaatacgaatttttagggtttatgctcagagagaaagagggaagatgactgtttgattttcaaattctgtctgtaaccctggacaaagaattgaatctgttatgtgatcattacagttt

SEQ ID NO: 11391 - DNA, 1154 bp, Arabidopsis thaliana columbia
cgatgagcaggtttttcaagttacctggcaggagaaaaacccttggcaaaacaaagggtttgaatatgattaatctctagaagcttcgtcatgacttgggttcagttaaaaatctcaaattggagacattattggtgtttatatatttgagagagagagccagagaggagacgttgaattgaatgaagggtgtggtcggaagagaagacgtgtagaagagacgagacaagtaaatttaagcattggccccatttacagccacaagtccgctacaacaaattatttccaagaaactctgagataacgtcgtgatgaaacggctcatgctgctgttgtgattcgtgaattagaggtttatcttttgggtttttgaatgttacttaattggacggtcgatttttcaaactgggtgtgaaatgtgaatgggtcattcataatgggcttttgttttaatgtgaagccattcacacactcctttgtccttcttttctattattcataactgtcactctttgttcttcgaaatagtaaagagcaaatcgattctttgttgatctgggccgtaaaatttccatggttgtgggaagtattctcgcagctgatctgggccgtcaatgctacagtttcatgtcagagagaggtcaagaatcaacacgtggccaaccatgattttaaaccaaagcaaacacacgattagaccccacattgtttgttcaccaacccccgtggaccctcctttagccgacgtgtccacgtcaatagtggtttttcttcctttcaaagtacacaaattccattctttctcattttactttttggattacgttgttgttataaactggtaaaatgaattatgaatgcaaataaatttcatttaagttttgttggcttctaatatttttttcacctaaaattctaataaactacacagccatgagccatcgtatgaaaagaagaagaaaaaaaatgtctttttctagaaggatctttcaacgactaaaaaagattttaagcttttgactaattttgtcaataatatacacaaatttacactcaattatagccatcaaatgtgtgctatgcagaaacaccaattatttcatcacacatacgcatacgttacgtttccaactttctctatatatatatatagt

SEQ ID NO: 11392 - DNA, 622 bp, Arabidopsis thaliana columbia
  unsure (1)..(622): unsure at all n locations
atgccttccgtagttgcatatctgccgtgctaaagaagcgcagtcttcaaggagagccagcaaaatctcatgttgcttccttccctcttattgatccgctagattcattttacttgttgaatcctggtggtgatctcaccgatacacaagtcacgtttgagagttggttcagagatcaaaactttgaggtaacatatagcaaaagcatacttatattaaaccttattgtgatcctttatctccaaacttccattattgcgtatacttcagggtaaagctgggtcagaaccaagtgctatagagttgacagaagcattagaaactcatgatctctttctatactttggtcatggaagcggtatgattcctctaacacttgaattctgaaccgtttaatcgttaatctgtctctggttgtttacatgagattgatttaaaaaaaaatcctttactgtttatgatacgacaggagcacagtatatacctaggcgtgaaatagagaagctagataactgttctgcaactttcttaatgggatgcagtagtggttcactatggctanaaggctgctacatcccacaaggtgtacactttcttatccctaggtggatctcaccattgt

SEQ ID NO: 11393 - DNA, 620 bp, Arabidopsis thaliana
ccacatccaaacgatcgagtagcttacgagttatggaccaacagtaatgatgaatgcggatccaaatgtgatgcacagatccggtttcttaagaggtttaaaggagctgctcagattcttgagaaaggaggctacactcgcttcactccccattacatcacctggtaattcactcagtatcttctcttcaaacatgtttagtaacataacatttttttttaatgttcgatatatatttaggtattgtcctgaagcgtttctggcaagtagacaatgtaaaacacaatgcattaatggtggaaggtattgtgctccggaccctgagcaagatttctccagaggatacaatggaaaagacgtaattattcagaatttacgccaagcttgcttctttagagtgactaatgaaagtggaaagccttggctttggtgggattatgtcaccgacttcgccattcgttgtcccatgaaagaggagaagtacaacaagaaatgtgctgatcaagtcattcaatctcttggtaacctaacatcttgacatattttacttttaatgttttgagatcttattctatgttttcgagtaggagttgatgtgaagaaaattgacaaatgcatcg

SEQ ID NO: 11394 - DNA, 523 bp, Arabidopsis thaliana columbia
ggaaatctatttctctctgtggtttatgttcaatcatctgatttttttatgcttttatgtgtaggtaatggagtctctgctcgccactgtcgagcaagatctttcttcatcagtacaaaaggccctacatccaccaatgagggctttggtatccgctgatcttttgagaaaccctgattctgatgttagggtttctgttgtctcttgcttgaccgaaattatgaggattactgctcctgaggccccttacaacgatgagcaaatgaaggttgatattccattaatccacaatttgtgtaccagttaaactggtctcttgtttttgcaatgctttcttcaaatattctctcatgaggcattggctttgcttatttggcttacaggacatcttccaggtgacaatagaagcctttgaaaaacttgctgatgcttctagtcgcagttacaggaaagccgaggttattattgagactgttgcaaaggttagatcatccttggttatgttggacttggagtgcgacga

SEQ ID NO: 11395 - DNA, 472 bp, Arabidopsis thaliana
  unsure (1)..(472): unsure at all n locations
gccagtgtgctctaaaggttgctgcagcgtcatcgtcgcgttccgttccgccggtaccgtgtcttctcccgtcgccgtagaaggtgagtcagacgccgagttcgtgactggactgaagacgcgcgtggtgtggactataagcgcgttgatggctgcttcgtctcgtcattacttgatgagagaagtcgtgaaggagcatgaggagatagaaagtttagttatgcgtgacaaagaaagagaagggacggtggtgatgaacgaggaagggcttaaagagttaagaaatacggaggcgcgtgtggaagacgaggagcgcgtggtaaaaaataagaggagtgttgtcccgagcgtgaggatgagtatgagacacgcgccgtctcttaaacttaagagtggtatctgtttagaatctgctacgcttgtgattgttcgaccgagcggcggagnttttgaagttggagatgatgctgag

SEQ ID NO: 11396 - DNA, 543 bp, Arabidopsis thaliana columbia
aacattgggacgagctttctcgttaaacttttttagggataacatgcctgatcatcgggaaatcgcacttgcacaggagaacactgatctaaattattgccgactcctacttgtccaaactgcaggctaaaagagagacaattagaagtttgttttattcaagatgagttactaaagttacccaatatatgcattgttgttttcttaaaataacatctaagtgaatgcatatcactccttaacagcataaagcaactaaatgcaaatatcagtgaatgtgtagatgaaaataggtgttctatacatttctacgaaatataggccagaaaaaaaaaaaaaaaaagcaagacattctagaccttattccaaccccatccatatagttttccatctgaagtcaatgccattgtatgtctccaacctcccgaaatctggaaaagaaacgaacagtaagtccaaaagatgtcgaacagaagaagaaaaccaacagaagtacatacaatgaagccagtcttcttcagtaggtaatagttgtcagaaagt

SEQ ID NO: 11397 - DNA, 826 bp, Arabidopsis thaliana
tattgtaaaatatatattggaaaaatagctattctgccgacaaaaaaaaaatagctattctagggtatttctctcgatttttttaatattaaagattttctccaatttaacttcggagaaaaagcttttataatttacgaagaaaaaatagtttatgaaacataaatattttgttagataaaaagaaaaagggaaaatagaactaaattagaaagtgaaacgacaataggtttgaaagaaatgggtcaccataggatctcctttctcctaaacctgaaccctctttagttgattacaaagacaaatcaaaaccaaaccttaaactgacttcattcagacccaccaatcccggtctccataaccggttaaaatggtcggtggtgaccggtggcctgaacgtttttaatgagccacggaattgcccgagactcatcacaactctacagactcttctctcttatctatctgaaactactctaacccacaaatgtctctgttcaaactaacacacacacacacatattttaaacacagcttacaatttcttttcttcaactctctctgtattgtttggttatacattttgtagacaaagggctcaatggttgtctttaaggtctccaagtgcttacagatgtctctggggcacaaactgcttcaacagtcaaccgtttcagcacatttggacacgggtcttcccgaaattgctgttggatatcgtcactgcgcatctcgctttccctacacacttctgcatatatcaaaaacaccgtggttagaaaaaaaagaagaagagtctgattccagttttagctgtgtaaagatt

SEQ ID NO: 11398 - DNA, 719 bp, Arabidopsis thaliana columbia
aaacaggtgaaagaactttgattgttcaaagtgattagacatatgccacctactggacatgacaaccacgagataacttctgtatccatctaaacagtaacacataatataagttcaagcagcaatatatgtattcaacgcatcatcaaccatatcaatttttcacctaatcctgtatatggaaaagaaaaattcatgataacagaaggaaaaccacaatgcaagtaaatgttagtctagaattcagtagaagaacgctctgattgccaaatgacacagtgcataagctgctatactgtactgtatacatttttaatatccccacatacagtcataagtatatgtttatatacatccagttcacaaaaccaaataaaattttcttaaaccaaataatatcccaaagcatttttctgcgttacttggaaaaacatttctaactagtagaggtgacaatctccattgtttgaagtacttatcacttgcatattggagctccacatatacccaggtaactgtcaagatgtgtaactgatgcagcttcaactgagccaatttcccctggagtatgactcagttagctgcacctcatcataggggttgaaccggtgctttaacctgtctccatgctttatctctatcagccaaaattttagtagacatacaaatggaaaccgagcagttcaattttcctaatgttatatatatacaaagccgat

SEQ ID NO: 11399 - DNA, 612 bp, Arabidopsis thaliana columbia
  unsure (1)..(612): unsure at all n locations
tcacttcttcccaaatggataccgtcagtgttggggctctctgccggagcgatgaccttgacgttatcaaaggtcatgttcttggcgccgagaacgtttatgtggaagttcttagcatctatcgaggatatgtctctaatctcagcattctccacgaaatcaaaccttatactttgcaacaacaaatacaaatacataactcaaaatcttcaatggtttaattttggtttacaaatctgcttaaaggctattaagaacagaaaaacttacgatgggaagtttcttgcactcgaaagtcttgtgacagttattgactctccaagctgcattgccttcaccgtcgaagattccacctccgtttaacttaaagccattaattcttaggaagacgacccatctttccttcccctggatagcttttccatcagctttgagagtaccttggaggttgatctcgactggagctttgcatgggcccgtcatctcgatctcancaagcttgaactcaccctttgtgatcacaccttgctcgctgtcggagcttggcatgctgatgtgaatgctttcagaagtgcctgcaatgnaactctacgagttaccaaaggttgtgat

SEQ ID NO: 11400 - DNA, 881 bp, Arabidopsis thaliana
ttgttaaagtacaccaaatatttgacatacattgctagtaaaatacaaatagctcgaggaaatgtacgagcccacgacccttccaattatcaaaagcattaaattacaaataaagtgaaccttcaaactaactaagagaaatatccaaaaataattgctagtgtgtttgattctagacagaaaatggaatttgctaaaatgtgctttgagaaactttatggtgtagacacttcagaagccaaggagatgtataattctgtttatgatgtcatgaaggctatgctgaaggagtacactgttattttcaagggaccaaacacacaatcatctcagtctaatccgccttcatctactgctgccagagatatttttgcatgtgagttagctgaagatagtaatgttgagtttgaaaggatggacaggtcatataaagagatggttaatgaaattagggttactgatcctaaagatgagttagatatctatctgaaggcagaggtagaaaatcctaagactcttcctggaatggagtgggatgtcttgtcttggtggagactcaatagtcagaagtatccagttttatcagaaattgcaagagatgtacttgcaatgcaagtgtcatctgtcgcatctgaaagtgcttttagcaccagtggtcgtcttttggagccaagtagaagctgccttactcattatatggtagagactttggtttgccttgagcagtggttgaaaagtgaaatcaagctgagtgaaaacacttttctaacaaatgcacaacttcttgctgatatagaattacttgataagcttgagaaaggtaactttatctatgtagtttactagttttagttttagatgttgtttgaaaactctcttat

SEQ ID NO: 11401 - DNA, 605 bp, Arabidopsis thaliana
ggggaagttgagttacctcaaagctgtgatcttggagtgtctaagaagacaccctcctggtcattacttgtcttaccataaggtcacacacgacaccgttttgggtggatttctcattccgcgccaaggtaaacattattcttttacatatatagcccatagtaaatttaccaaataatccgtaaccataaagttatagccccactaagtccaatcatttttgtatttgattatgtgtcggattaggtactataaactttatggtaggagaaatgggccgggacccaaaaatatgggaagatcctctaacgttcaagccagaaagatttctagagaacggagaagcatgtgattttgatatgacgggaactcgcgagattaaaatgatgccgtttggagcgggacgacggatgtgtcccggctacgcgctttcgttgcttcacctggaatattatgtggccaatttggtttggaaattcgagtggaaatgtgtggaaggtgaagaagttgatctatccgagaagcaacagttcatcacaatggtcatgaaaaaccctttcaaagcaaatatttatccaaggagaaagtgatatttgcttttgtca

SEQ ID NO: 11402 - DNA, 1104 bp, Arabidopsis thaliana
gtcaaatccaaagcaacatccaaacatgatagattctccatgacttgttcctgttacatcaaaaccaaataagctcagttgaaaaatgaaaaaccataataaatattaaaccataaaccaagtaaaaatgaattacgaaatgatcattgattcataagtctagtatattaacattgagccataaaccaagttcagaagtaaaagaaaacaaaatggagtgatgaggttaccttgtagtcgtttccttgattagtcttttagtccaagttcacttcagtttgaagctctgaaaaagagttcaatcaacacccaagttgtgttagaacataagagaattttcaaacaacatctaaaactaaaactagtaaactacatagataaagttacctttctcaagcttatcaagtaattatatatcaacaagaagttgtgcgtttgttagaaaagtgttttcactcagcttgatttcagttttcaaccactgctcaaggcaaaccaaattctctaccatataatgagtaaggtagctcctacttggctccaaaagacgaccactggtgctaaaagcaatttcagatgcgatagatgacacttgcattgcaagtacatctcttgcaatttctgataaaactggatacttctgactattgagtctccaccaagacaagacatcccactccattcaaggaagagttttaggattttctacctctgccttcagatagatatctaactcatctttaggatcagtaaccctaatttcattaaccatctctttataagacccgtccatcctttcaaactcaacaatactatcttcaactaactcacatgcaaaagtatctctggcagcagtaaatgaaggcggattaaactaagatgattgtgtgtttggtcccttgaaaatgatagtgtactccttcaacatagccttcatgacatcacaaacagaattatacatctccttggcttctgaagtgtcttcaccataaagtttctcaaagcacattttaggaaattccattttctgtctaggatcaaacacactagcaattatcaacatcctattgatattcttttgttcatccaatacttgttaaattt

SEQ ID NO: 11403 - DNA, 625 bp, Arabidopsis thaliana columbia
  unsure (1)..(625): unsure at all n locations
cattaacatgatgattagcaaacatttgaactaaaagaagaaaaaagctgcacactaccttagaggtcaagattgaaccaagacacaagcggaaaagctgcataggtcccgaatgccaacggtgttgctgcttcttatatgcctcgtaggactcaggaacttcgcaaaggacctatagatttgtttctatccagtttaattcattttgttacataaataaggctttttttagaaacaatcgataaaaagtagtaccttgacgtcattaagatatatgaacttccatccatgaagatgagcgcggactgctatgtccatatcctccacagtagtcctttcaagccaaccaccagattcctcaagggctttgattctccatactccagctgttccattgaaaccaaagaagttcaagaacacgccgttcacttgctgctccacctcaaagtgaaaacacagattgatgttctgaagacgggtcaacaagttctcgtctttgttcacaaatgtccatctagcttgaactagacctaactctgggttatcctgaagattanatcacatttttaacatgttagcaatctctctctccacttttcaatgatagaaattgaaccaatgttat

SEQ ID NO: 11404 - DNA, 561 bp, Arabidopsis thaliana columbia
  unsure (1)..(561): unsure at all n locations
ccttgatctaataagcgatgtttcctgtaaatctccctacgaatgggttgaaaaaacaaatcctgaatgggagtttaagacaacctcctcacgtcacagggaatcctacagagtgagttgtactttctcttctctaatttacattctcatcgatttcctcactagcttctaactctgttttcatacttccacttcaaaaggttattgcatatgatttcgggatcaagcaaaacattctaagacgggatttcctcactagcttctaactctgtttacatacttccacttcaaaaggttattgcatatgatttcggcatcatacggttgtgaaatcacagttgtcccatcgacatggccagctgcagaggcgcttaaaatgaaaccagacgggattctattcagcaacggtccaggagatccttctgcagtgcgttatgcagttgagacggttaaagagcttctaggaaaagtcctgtctatggaatctgtatgggtcatcagttacttggacaagctcttggaggtanaactttaagatgaaatttggtcatcatggaggaa

SEQ ID NO: 11405 - DNA, 182 bp, Arabidopsis thaliana columbia
ctcaaatccaatccgttcactgccctcggtcgccaaatggctcacccttctctccattgtcgagctctcgagctctgtttcaatgtttctctcaacaggcttccgaccaacccgaatcctctgtttcagacccagccttcactctccaacgctctcgtagcggcactgaagagagcacaggc

SEQ ID NO: 11406 - DNA, 542 bp, Arabidopsis thaliana columbia
  unsure (1)..(542): unsure at all n locations
tnnnnnnnnnnnnnnnnnnnnnnnctaaagtttattgtgtcaactccagttccggtacgaatacggatatgtttacttctcgataaaccatcctgctcctgtcagtataacgactgatggctacgttctgcgtaatgtttagagacgcattgataatgttatttaattactgagaacgcaatggccgcatcatttaaaaagaaaaaactaacagtgtttcgttctgatatggatcagagttgaaaaacatgtctgatataaaattaaacattgttgataattgtttatattggttgtgaacttggatttctggatgacagtattcaacaaatttgctagaacttttaaatctcattggttgttgtatctttgtgttattgtttttggtattacgaacttagtcgcttcttccggagcgcatatgggtcagcgcttgctgttcttcgttctgaccatcctggttgtaaaacgtatatcatccgttccgcttcgcctgcttgttgccgcaccatttgtgttactgactgcggcagacatgagta

SEQ ID NO: 11407 - DNA, 626 bp, Arabidopsis thaliana columbia
tacacattctgtaccatcctactaaaaaaataatatgcattctcaacctcaatatgtaaagagacagatgatagatatggttcaccataataaaatatcaaacctcagtaaacagttatactaattatatattttcggaaagaagaaaaccgttattaacctattataatcagctccaataatttgactttaagaaggtaagaggagcaaatgaatcttacacatggggtcgttgcgtagtttttcattgtttgttccaacatcaatcatgacaggtagtacctaaaccagcatgtgcacataagaattgtatcacatcatacagaaaaatggagatggggaaaataagaaaatattagatggtgcaagtacccgttgaggatttattccagctgcggcaacatataaatcaagcttccctacagcaattccaattccatgaacacctagatctccaagacccaaaatccggcttccatcggtaacaacaatcatatcaacctaaatgtatagcaaaaacgttacatcagaaaactaatggtcacttaaagatataccagttcctaggtatacaataagagaaagagggtagacgcattggattagtcagccaaatagagttgaga

SEQ ID NO: 11408 - DNA, 555 bp, Arabidopsis thaliana
ctatacgtgtatgtaggagcacatactataggatttgctcaatgtttcgtgatcaagcatagactcttcaacttcaagggctcaggccagcctgacccaaacctagccgcttcctcagcacttctctctaagctaaaggacacgtgtcctaacgtggactcctcagactctaagctcgctgctcttgacgcagctagctcagtcaagtttgacaatgcttactacgtgaacttaatgaacaacataggactgttggattctgatcaaaccctaatgacagatcctacggctgccgccttggtgaagtcgtacagcgagaatccgtacttgttctcgagggatttcgcagtttcaatggttaaaatggggaatatcggagttatgaccggaagtgatggagtaattcgaggaaaatgtggatttccaggttaagttatatatagactcttcacaaaatccaaatcagtctattatatatctagagctaatctagctttaatgaggaatcaaataaaccaaagtctatgaataaaatatgttttatatatatggtgt

SEQ ID NO: 11409 - DNA, 604 bp, Arabidopsis thaliana
aaaactatgatattgacgttatcagaggacagaagattgagccagaacctggtcttatgttacacatgaagcatgggcttagagtcacaattactaagagatgttcagcttgaaatttgtatgtataatgcttaaattaatcctttttccgttgaaataaaatctatcggagatagatgctataacaaaggattacaaggtttgtttgattctcgaaagtaagtgttaatctctattgtcaaattagtttctttcaaaatcacgttgcactagttgtaaaaataaaataaaataaaaatctatcacaaaatttaggtgtatcggtaatttagttctattttggaaaatgacacttttcaaaatactagaaaagttaggtatataaataatttaatactattttctaatcttatgtataaattaaatgtaccttgcagtgtgtgcatataaaaaatatagtgtattttaaagcaaaaatcccttttattgttgcattgaagtgtgtgatataaaatccagttccttctgccagcaaagtaaccatcacaatgtgtgtaccaagcgccttactccaatggcttcttctataagctttcttgaagct

SEQ ID NO: 11410 - DNA, 538 bp, Arabidopsis thaliana columbia
gaaatccgatcagaagtccgaggaacaaattgatacaaaagtagctgaatggagagaagaaggaaaagcagagatagttcccggagttctcttcattgatgaagtccacatgctcgacatcgaatgcttctcattccttaaccgagctctagaaaacgacatgtcaccaatccttgtggtggcaacaaaccgaggagtgacgacaatccgtggcacaaaccagaaatcaccacacgggatcccgattgatctccttgaccgtcttctcatcatcactacccaaccttacacagacgatgacataaggaagatattagaaatccgttgccaagaggaagacgttgagatgaacgaagaggccaaacagcttttgacattgatcggacgtgatacatctctaaggtatgcgattcatcttataaccgcagctgcattgtcatgccagaaacggaaagggaaagtcgtggaggttgaggatattgagagagtttacagactgttcttggatgtgaggagatcgatgcagtatcttgttgag

SEQ ID NO: 11411 - DNA, 537 bp, Arabidopsis thaliana
gtatgcaccatatcaatgcactgctgaagggccgcgatagggaagaaagagtcagcagctgcaagtgtaacttcactgacagcagcagcagcctgagctggcacatcttgcaatgttgagtcggttatgacttctgcaatgtcagacatcacaccaatcttctctgaaccaacaccaggtgcacttgacatataacgatagaaagcaaaaccagacgtgggagcaagaggcaaatgtaagcttcctccagaaactttggagaaatcagaattgttaacggatctttggtgaagaaagctatggtaacttctctgagatgtttcttgacagaatgaatccctttcatgatcactctcacgagggataatatgataaactggttggttacgacgagcgaaaagcctggaccttatagataaagtttgcctgaaagccattgcagaatctaaacaagatcctacagtagtaagaacaaagtcaatatccaatagattgctgattttcagatcaaagagcaaacttttttattcattgatc

SEQ ID NO: 11412 - DNA, 473 bp, Arabidopsis thaliana columbia
  unsure (1)..(473): unsure at all n locations
nnnnnnnnnnnnnnnnnnnnctaaagactgagcctgactccggcagacctggctgcggctaaagagcagaacatctcgattctgtcttacctggctaaccactttaacgcaccggttatcgcgtggatggctccgattatcgcgattatcgctatcaccaaatccttcctcggtcactacctgggcgcacgtgaaggcttcaacggtatggtgattaaatctctgcgtggtaaaggtaagtctatcgaaatcaacaagctgaaccgtatcactgcgctgttcatgctggtaacgacctggattgttgccaccctgaacccgagcatcctgggtatgattgaaaccctgggcggtccaatcatcgcgatgatcctgttcctgatgccgatgtacgcaattcagaaagtaccggcaatgcgtaagtacagcggtcacatcagcaacgtattcgttgtcgtgatgggtctgattgc

SEQ ID NO: 11413 - DNA, 622 bp, Arabidopsis thaliana columbia
aaagttattacgatgaatataaacacacatagttagaacatggaatacatcaccagttgaaactaattgcctcaaagtgaaggttcttagccaaaccagatgaacatatctttgcaacttcatgtctcatctttcttggtccgcaaaccatcaccccaacgtcttctgaaccctcagcctcaagtagaatctctgcaaagcgacaaggttaaagtatcagattcatgcatatgtaatttcacttacaccatttatgtaatgtaagtgatgctatcatgtcgaatatagtggtaatagattacttacttttcagattaggtttggagccgaagtggactgaagtggcttgtactatagattgatagggaacactctcgagctctctctcgtggccgtggaacgatgaacctggagaagaagtgggtgtctgacactctacgctttgtacctgattcttgaactccttatccccttctttgttctgtttcttgcgccataagaaaactacactggaagagatgaaaatgcacgcactgcctagaaacatgtcccaaagcctctatatgagacattgtagatggatcgtgtattatggtcacaagggtatatatagtaccgtgtg

SEQ ID NO: 11414 - DNA, 586 bp, Arabidopsis thaliana columbia
atccttgggtgtacataaatccttggatctcactggttattttttcttgtcttgcagtgatgagagtgagctcaataaaaacaaaaattataatcatcgaagaatgttgaccatgggtattcttcctccggctgatgttgaaactctggaaacaatgccagtgtacgtgtatctacgacgtcattatccacctccatattgtcctgaaactcctccatgtccgtcattttaaacaagacagccgcgtttccaggaggagtggaggaggaaggcaagtggggttgatttggttcgtctttgttttggaagactctagatgaggcagaggtagttatggctcagcagatggaggaggaagtggaacgagtggagtcagcgagaccgttgcgtttagtgggccgtggatggttatgctcagataggtaagtaatagctaacatgtttgaatcggtctcgctccgttggacttgttttgtagctttacaaccatgcgtgaacttgtaagcgcacctgtagtaaccctgaggaacaaataattaattaagtcatcaagtgaccatcaaaagtcataactaaccataatttg

SEQ ID NO: 11415 - DNA, 458 bp, Arabidopsis thaliana columbia
actgattaccgctgagcaaatacaagggatccgctgcatcgtcgacagttctggcgaacgtataacgtgcagcactggcaattggtaacatcgagttggttaagcctaaccagaaagaactcagtgcgctggtgaatcgcgaactcacccagccggacgatgtcgcaaagccgcgcaggaaatcgttcatagcggcaaggccaaacgggttgtcgtttccctgggtccacaaggagcgctgggtgttgatagtgaaaactgtattcaggtggtgccacaccggtgaaacagccagagtaccgttgacgctggtgacagcatggtcgacgcgatgacactgaaactggcagaaaatgcctctcttgaagagatggtgcgttttggcgtactggccgggagtacagccacactcaatcagggaacacgtctgtgctcccatgacgatacgcaaaaaattt

SEQ ID NO: 11416 - DNA, 606 bp, Arabidopsis thaliana columbia
cattgaccaaaaagcacattctttggtgagaagagagctttgggctggtttgggttacttgatcatccaaatccgcaggtttatgaggctaacgttttgggacctgacatgggatgttatggaaccgatctgtttctatgtctcatcggtatatttcatggcgggttacacatttttcctcaagacatcgagagagccttcctttcaaggtttttaccaaagcaggtttgaggctaaacaaaggaaactgatgcaatctgaggattttgatgttgggaggtatgatgagctgaaaaagctgtttaatcccaagccttcaggtgctgttcccaagattcttggatctctacagaattgatcattggtgtctcgttgtcctactaacctgagaaagatatattgacccccaaaattgtgtcaaactataatttttgaatatttcataatctttctaggaaaataggaaaaagacaaaaataaatcaaaaaagttctattagtgcggcttatgtaatttggaagagtagataaaagaatcgattgtgatgtagatttataaatttcaagtctgactttctgaatgttaaatgttcaatcgtccatgcat

SEQ ID NO: 11417 - DNA, 619 bp, Arabidopsis thaliana columbia
tgatctcctaaaactcctctttattacacgaagaggagaacaaatggagattaaaaagaattttcaaatcatagaaatcttttcattttttttattgttttgattaactagtaattaatggtaaaagcaatggagcaagaacaagagacttacaaatcaagattgtttcatttcaagaacatgaacgaaaactcagcttcaagacatgttaaaagctggagctcagattgtgcaatgagaatggatggttctgacaatttggatgatgatgataatgacatgatgatgtttaggagtcaacccggaaaatgtggcagcgttgaccgaccttctttgcctataggcggagtaacgcctaatcgcaatgacaagcttccgagagtctcttcatcggattccatggaggcactaataatattgcaagcaggtaaaatctaatgaactggctcatatcttctaggtttcttggattgcaagttaggggcaaagtactaatcttggattataagttagggcaaaaactaaagtatatgttgttgttatacagcaatggagcaaatgaaagagaaattttcgaaattgcttcttggagaagatatgtcaggaggagggaaaggtg

SEQ ID NO: 11418 - DNA, 566 bp, Arabidopsis thaliana columbia
gccagtgtgctctaaagctggtgaatcgttttgtaattgctgactccacgctctgtatcggctgccacacttgtgaggccgcctgttcagagacgcatcgccagcacggcctgcaatcaatgccgcgcctgagagtgatgctgaatgaaaaagaatctgcgccgcagctcgtgtcaccactgcgaagatgcaccctgcgcggtggtctgcccggttaacgccatcacccgcgtcgatggggccgtgcagttgaatgaaagcctgtgcgtaactgcaagctgtgcggcatcgctgcccgtttggcgcaattgaattttccggcagccgtccgctggatattccggcaaacgccaataccccgaaagcgccaccggcaccgcctgctccggcgcgtgtcagcacattgcttgactgggtgccaggtattcgcgcgatcagcgtcaaatgtgacctttgtagctttgatgaacaaggtccggcctgcgtgcggatgtgcccgactaaagccctgcatctggtggatacaccgatatcgccgcgtcacaaacgtaacgtgagtgaccttt

SEQ ID NO: 11419 - DNA, 991 bp, Arabidopsis thaliana
atcccgtacttggaccgatgagttggctaaaacatgatccaatgaaccgttgaaaccggtgaatgaattgttactaagatccagagagactaaaagaggaagactccatatccaatcaggaacgtttcctttgattctgttgctggaaagatctaaataccataacttctttaaggactttaagaatctggggaattcactgatgttgcatccagacaagagcaagatctccatgttctttggaaagtcaatgtctgaatacacactcgttagtgttaaactgttgccgtgaagatcaaggtgtgtcaaagactggagaggagagaaaattgataagtcaattgggtggcttgtgtttaggaaagagaggcttagatacctgagattaactaacctcaaaacaggatctatgatctctgtttcaaaatggttatcccaagatttaagttctcaagtttagacgaagaattagagatttcaaatgagccagtgagatgattctcacttaaatcaagataagacaagaaaggcatggtgaaaaaagaagaaggtatggttccagagaattgattataagaaaggtctaaagctaaaagcttggttagattctgtacaagtgagggtaaatcaccggtgagcttgttgtggggaagatttaattgggtaagtttggttaggttacgtatagaagaaggaacttggccagtgaagccattagaggatagaagcaagacctctagattgttgagctgaccaaaagcagaggacaagggagaagaatcgaagttgttgaaagagaggtttaggtaacggagatgacttagctcaaagaggctactgtttggtctgagagtgccacgtaaacatccaccggggagttctagaaccgtgaccgcaccggtcgtgttatcgcagaccacaccgctaaagaagttggtgtcatttctgcagatgctagagaacgcaaactcgtttttgaaacgtttaatgg

SEQ ID NO: 11420 - DNA, 443 bp, Arabidopsis thaliana columbia
tgtgctctaaagtatcccatagcgatgctaatctcagcgccctgctgaccggcaaaaccttcgagctggtgcccggcgatggcgagccacgcaaagagttcgttgttgtgccaggcgaaaaagcactgctgcatgaacctgatgttctgatgctgatgctgaccgtgccgtaaagttacggtattgatgcgggtcagccgctcattcttcacggcgtgcaggtaggccatgttatcgatcgtaaactcaccagcaaaggcgtcacctttaccgtcgccatcgagcctcagcatcgcgaactggtaaaaggcgatagaacatttgtcgtcaacagccgtgtcgatgtgaaggtggggctggatggcgttgagtttcgcggatgcagcgccgcagaatggatcaatggcgggataagtattctgccgggcgatcaaggtgagatg

SEQ ID NO: 11421 - DNA, 597 bp, Arabidopsis thaliana columbia
tgtgcagtctctaaattgatagtttacttatatagtgattactcttttgggattctatctggcgtccttcatctggatattgaacttgcttcaaactttgtagattattggtgaaatatctgttgctggtgcaacttacaagacgatggagttcagtggtacaactatcgaaagtctgagtgtaagaaatcattctatatttcctacattatgggtcccttctcttatagaaataaaaattaatagctgcatatgatgttatcattgatttataaatggttgcttgaatcttttttggctgctagatggaagaaagaatgacattgtgcaacatggttgtggaagctgggggaaagaatggtgtcatccctcctgatgcgacgacattaaattatgttgaggcatgtatactgtcttgttttcttgtaaatcatatgtttcttcaaggatcattatattgatgtatgtcttactcctgatcttatatcttctgcagaataggacatctgtaccatttgagccagtatatagtgatggaaatgcaaggtacgatcacatggtactctagaattctaaacagtgggcagagtaaatatg

SEQ ID NO: 11422 - DNA, 621 bp, Arabidopsis thaliana columbia
cctatcattcgatgactcaacagtagctcggtgttactcatctaaacgctctactacttccgcaagagacgaggaagaagacttgcgcctccttatcaacacactcttatcagcagctgatctcgatgcaatctcggacaatcttttgtctaaatggcattcctcagagagcccactagacccatctctgagaaacagctacgcagactcaacggaacagaaaagactcggatcaaacgtgaagaatctagtgtttgacctcgtcaacacgctgctcttggagctaacaccgagctatcttggacctcgtagtagtcccatgatcctctctggtaagccattgggggtttatgtgataaacagaatgcaagagtgtttaacgggtaacggaagagtggaagatcggtggtgggatgaagacggagacttgagcagtttggcggtgaataaagtggtgaggattgaagtagctgagattggttccaggagagtttgagattggaaatggattcatgggagaggaattagaattgaagttgctggaggagttagtggaggagggtttgatggatttgtcagaacaatcgaaattatcattccaagtatttgttatcatatgta

SEQ ID NO: 11423 - DNA, 509 bp, Arabidopsis thaliana columbia
  unsure (1)..(509): unsure at all n locations
ttttacaaaatttaatcacatttctgcaacacacaacataaaagtacatattcaactccaaatcagacgaaatgatcaaaatcaattcattgaactatgtatagatgtttgtaccttgaacagaaaggggagatcgcaaccccatttctccaaaaccctatttccaagagatttagggttttcggtgatccaggatctaagggtcacgccattggatccatcagcatcctccaagtaactcggaccagactcgtgagtccccatccatagctcggcgtaaggtcgtgtaggatcgatctcgtaatctgaattcgccgcataaaccctgtaaacgagtgaatccgatccaattttgccccaatcgtaatccttaacagagcatctcaatcggcgacgtcncgtcgatccgcttcacaaccgccattagcctttacgacagtagcgatctccattacaccaaaaaactcacgattacgaatctaaatccgtttctcggaggtaaaacaaaa

SEQ ID NO: 11424 - DNA, 1921 bp, Arabidopsis thaliana
cttcaacttcttctgtagccccttttgatccaacttccttcatgtggctccaactcaagatacatcagctctttgcacatcaggagttgtatctcagatgtatggtcaggattgtgtagaaagatctagtcttgatgagtttcaatggaacaaacgatggtggattggaccaggaggtggtggttcttcggttactgagaggttggttcaagcagttgaacacattaaagattacacaacagcgagaggctcacttattcagttatgggttccggttaatagaggcggtaagcgagttttgaccacaaaggaacaaccttttagccatgatccgttgtgtcaaagacttgcaaactatagagagatctctgtgaattatcacttctctgctgagcaagatgattccaaggctttagctggtttgcctgggagggttttcttggggaagcttcctgaatggactcctgatgttaggtttttcaagagcgaggagtatccgagagtacaccatgctcaggactgcgatgtccgtggaacgctggcgattccggtgtttgaacaaggtagtaagatttgcttgggtgttattgaggttgtaatgaccactgagatggttaaactaagacctgagcttgaaagcatttgcagagcacttcaggtttgtgttcttctctaaagctttcagcttttgctatagaaatggttttctgagagtgatgaatgtgtttcctttttgcaggcagttgatcttaggagcaccgagcttccgattccaccttctctaaaggtaatcaaagaaactacatgagttccttatgttcagcttttgggtataaacaagattgtttcttctttattcagggatgtgacttatcctacaaagctgccttacctgaaatccgaaacctcttgagatgtgcttgtgagactcataaactacctttagctcagacatgggtttcttgtcaacagcaaaacaaaagcgggtgccgtcacaacgatgagaactacatccattgcgtatcaaccattgatgatgcttgctacgttggtgatccaacagttcgtgagttccatgaagcttgctctgagcatcacctcttgaaaggccaaggagttgcaggtcaagccttcttgaccaatggaccttgcttttcatctgatgtatctaactacaagaaatcagagtaccctctctctcaccatgctaatatgtacggtttacatggcgcggttgcaattcgcctgcggtgcatccacacgggctctgctgatttcgtcttagagttctttttgcctaaagactgcgatgatctggaggaacagaggaaaatgttgaatgctctttcaactattatggctcatgtgcctagaagcttaaggactgttacagacaaagaactagaagaagagagtgaagtgatagagagggaagagatagtaacgccaaagatagaaaacgcatctgaactccacggaaattccccatggaatgcctctcttgaagaaatccagcggagtaataatactagtaatcctcagaatcttggactggtatttgatggaggagacaaaccaaatgatggttttggcttaaaaagaggttttgactacaccatggattctaatgtcaatgagagcagcactttctctagtggtggtttcagtatgatggccgagaaaaagcgtacaaaagcagataaaaccatcactttggatgttcttcgacagtatttcgctgggagcttgaaagatgcagccaagaatatcggtggtaagcagcatttttttatcttctcgattcaatttatcggaaagtcctgagactgatctcttctttttgcccttttcttgtcttggaaattttcagtttgtccacgaccttgaagagaatatgcagacagcatggtatacaaagatg

SEQ ID NO: 11425 - DNA, 591 bp, Arabidopsis thaliana
cgaatactaatcctacattttgaggagtgctaatactctgatgtacttctgttgtattctctatctttggcaatgtcactcctttctctatgacctcgctcaccattgaatctccctcttcttctagttccttctgcgtgactgtccttaagcttctaggtacatgcgccattatagtcgaaagagcattcaacattttcctctgttcctctatatcccgacaatttttaggcaaaaagaactccaagacgaaatcaactgagccagtgtggatacagcgtaacgtatcgcgactgtaccatgtaagccaaacatagtcgcgtggtgagagagagggtactcagatttcttgtagctagaaacatcagatgaaaagcaagggccattggtcaaaaaggcttctccaacaactccttgacctttcaagagatggtgctcagagcaagcttcgtggaattcacggactgtaggatcccaacatagcaagcatcatcgattgtggatcacaatggatatagttctcacattgtgacggcaccagttttgctttgtttgagacatgagaccatgtttgagctaatggtagtttat

SEQ ID NO: 11426 - DNA, 491 bp, Arabidopsis thaliana columbia
tggtgtgagttgctgtaatatatattaaaatgaaagttgagaaaattaacgaaatctgattaaaatattactcattcatgttgcgactcatcatgccagaagaagaagctacgttgcgctgaatatccatggcagaagctacacgtacggtaaaaaaaattagaagaagacggatcaaagaacatatatatacattaatacatatctatattatgggtaacttttttataaaaaccctaatttgatagagaaaggaagagtggtcacctcttgaaccttcctttgtggagtgatctccgtactccttgtgcggctgctttccaagcctgaatttctgcacccatagatccaaataagttgttagattattatattatattattaagtgaaaaaaagaatagaaaagataaagaggagagaaaattaaaagcaaggaagaaaaaaaccctaatctatatttgtgtacatacctgaagatggctctttaggtg

SEQ ID NO: 11427 - DNA, 472 bp, Arabidopsis thaliana columbia
cttagtaagatttggaactgcaaatttacgttcggcatccttttctaagttcgacgtcacgagctccagcgaaagttaaataaagctttttgaccaaatattctcagccattcgttgacccacatcaatccctctccatgcaaaatccatgcaagttactaattttagaattcaaaaagcttctatataaacctccagaatccatcacaatagatactggcctaagtcattcaacaatttggctttaatctaataaagcctctccctctccgattaaccttaataaatccggagggatcggagagaaaaaagaaccaaaaaaaaaaaaaaacagaaaaaaaaaaatgattggaaaagttgtggtctcggtggcctccatcctcttaatagtcggagttgccataggagtcgttgccttcataaacaaaaatggcgatgctaatctgtctccccaaatgaaagcggttcaagg

SEQ ID NO: 11428 - DNA, 581 bp, Arabidopsis thaliana columbia
tctgtttatccttttccagaacatattgatccatggcatccctttatcccaagattccgtcgattgtcttgtttccaaggttcaggagttggcggaaaggtattcgaaatcgctaaaatttggaaacttcttgctacattttactgccaaatgtgctccgatgctacaggctcataagtatcagctgatcgaatcagttaagtgcaccaacagtctagttacaaaatctatcctatcgaaactcaatgccctgtagatcctatagctcaagtccaggtaattcaaacaatcctctgtgggttgacatctggagcctttgtcttgtctccgaacttggtggtttaagaacagttaaggtaaatttgaaacttgcctctgggatacaatagctttgaagctggagaaataattgcatcagcagcaagattgtagaatgtggatattgatccctgtaataagaggagttgttcagaccaaatttagtcaatagagcagaagagtttagttaatagagaagctcgacaagtccgcaaccggacacttaacttcaagaaacatgtgctgcggatgccatctatggg

SEQ ID NO: 11429 - DNA, 592 bp, Arabidopsis thaliana columbia
ccatttcagtatcttgcttcttctcgatttcctctgtgatgtgaatagattatccctcaagttcccattatgcatgtactcaaagagtaggcatttaggcctttgtgaacaaaacccagcaattgctaccaagttaggatgccgaatctcattcaaaagcttaacttttgctccaaaagcctcatctgataaactatcaccaatcactttcacagccacagttgtatgtttgatccttcctcggtacacatttgtccagttaccaccagatttcaatctcagtcgatcagaataagtctctgtagccagtctgatatcctctgcaacatactctctatacccacacttcacttcttccttcgaaaccgaacctatcacctctctctccttgcaaaactcaatcctacggttgaacacgtctctctgactcctaagtttctcaatctccgttatcatctctcctctctgtaacacaaccctctctagctcgacctcagcctgtgatttagcctccacatcgtcttaactttgcttgagagcacttcttgaagctctgcaagtgaatgtagctttgtttttctttttcacatag

SEQ ID NO: 11430 - DNA, 105 bp, Arabidopsis thaliana columbia
ccttgacgtggtgctccgagagcgactgggcgtacttggaccactcggtggtcatcgcagccgggcgggagatgtcaccaaccacgattggcggacgagtgcaac

SEQ ID NO: 11431 - DNA, 456 bp, Arabidopsis thaliana columbia
attcgacattcctcaacagaagaatcatgttctgaacgattttgccattattggagacgatactgctcgcttcagccaaacagttttctctgttgggcacaactctcttgatctctgttccatctggaagttcttgcaaacccattttgtgaacctccagaaatggtttaatatctatctttgcatctcccatcttgtcgtgcgatgtgaatgtatcgttatcatacactatctgtaaaaaaacgctactaattgtcaatagatgacgagttggaaattcatgattccgattagagccagtaataaaaaaatagacagatagaagtactcaccaggatcacaggttcatcgggatgtcttaacgcaagggttaattcctcgttccactcagggttgcagttattttccacaacacgagtcttcagcttgtggtgcattttaaagaagtctattaga

SEQ ID NO: 11432 - DNA, 600 bp, Arabidopsis thaliana columbia
acttccttgcctcgtaagaaaaggtttagggttccctgtaagaccctctatctcgaaaagatccgagcttgaatcactcccttcactctttgtgtcgtcctcctctgttctcgatttccatggaggcaatggtagtttcttctgaacaacactactcttcttctcaatagccactggaggatccaaaaacttcaagagacttcctctgtgataactcctcttgcttctgaatcttgatcagttctgtgttcatatccgcagaagatctcattgtgataacagagatattcggatcagcgcttctcttgaccgaggttttctcctcgacatctacagaatccccatcagagcatgcgcatttacaccccaaatttgcgagaaaactcttcttattattggtcaccttttgaatctgaccattactgttcttcttttccttgaaggaactgttgcagctattcaccagtttgttctgaagcaacacgctctgactattccagcttgattcagaccggacactcggagtaccagtagatttcttcgcgctctgcttcgagtcgacgacggttctctcaacttctgggtttgtcagagacagaa

SEQ ID NO: 11433 - DNA, 601 bp, Arabidopsis thaliana columbia
aagacatcaacttccatgtatgaatgtagagaaaaactaataacaccaaatttaacatattaactactatactaatgcagtgatccataacacatgaatgatcatccaaaatctcactgtttatagcatatatatgaatccctatctcccacaatatacacaatttcttagacccatgtcaataatttccacagacagtaagagatcaatactttgcccgactaagatggtataatcagaaaacaagcaggcaaactaaagaaacgaatcaaccaagttttattatagtcaaagaagatatatacctttttcttcaacttctttcaatacgtttctcgtctttacggccattgccaagaccaaagcccatccttccctgtagatttctcattaggcttctccatgggctgcagcaatgtcgttaagcttttcagcctcgagcttctcgtcaatctctttccaatcctggcctttctcagccagaacttcctctctaggtcttgcgttcccaaaaggattagcacctttaggtttctccacaatgaccaagaccggactctccggcttcacgacctccacaacggccacgggaagtgtacgt

SEQ ID NO: 11434 - DNA, 614 bp, Arabidopsis thaliana columbia
ctgataagttcaagattcagttcatctggccggagaagcaatatcggcgctgggattccggtaaaacataaactctcgttctccgtcagaacgcaaagtgacaaaagcgagtgcagttctcgccccttcgtcgaaattgatcccctgatcgtcgacaccgttctttctcaagattccggcgagcatatgaccgaaatcatcgtctcccagcttcccaacgaaggcggcacgacctccaagacgtgaaacagcgatggcgacgttggccggagcaccgccgggagctttgagaaatccgggggattcggagagggagacgccggatacggtagggacgaagtcaatgagcatctcgccgaagctcacgatgagacctttctcgccggtggatgatgccattcgaacaagatcgattttccgttcgaaaaatgaaaatgataagagagtataaaaatgaacgaagtatggactatggagtaggtttttatataataaaggctcaaatggtttttaatcctttgaagtcacataataaacaagtcaatccttgaagatatgtttgaactgaaacgtggaatatcaagtttatggaaatccaggtagactatattttg

SEQ ID NO: 11435 - DNA, 712 bp, Arabidopsis thaliana
tgtctgctcactgctatagctcatgatgcgaacaaccaaatctatccagtggcgtgggcaactgttcagtttgagaatgcagagaattggctctggtttttgaatcagctgaagcatgacttggaactaaaggatggcagtggctatgtggtcatatcagatcgttgcaaggttagtattatcttatgtctgattatttaattatgtatagatgatagtgctttatagatgctaatgtgtttgtatttgacaggggattattagtgctgtcaagaatgcattgccaaatgctgaacacagaccttgtgtgaagcatatagtggagaatctgaaaaaacgacatggttcattagatttgttgaagaagtttgtatggaatctagcatggagttacagtgatacacaatacaaagctaatctcaatgagatgagagcttacatcatgtctttgtatgaggatgtcatgaaggaagaaccaaatacttggtgcagatcttggtttagaataggcagctactgtgaggatgtagacaacaatgcaacagagtctttcaatgccacaattgtcaaagctagggccaaggcattggtgcctatgatggaaacaattaggagacaagctatggcacgtataagtaagagaaaggcgaagatagggaaatggaagaagaagatatctgagtatgtccagagattctgaagaggagtggga

SEQ ID NO: 11436 - DNA, 641 bp, Arabidopsis thaliana
taattagacattctctcaatacttgtatactgaaacgctgtggacttgattgtctgtttctaacatgcatatcttgctttcaggcaagccccatacacctcctgagggtcgtctccctgatgctacaaaaggttttgatctgttgagagatgtatttgctaagcggatgggcttgtctgacaaggacattgtcgctttatctggatcccacactcctatttctccatctcagagctaacaacccttgtgaaaagggtcacgtaagatgtagttaaactttacaattccgtaattttttactggtttagttcagccttttgcattttatttgctctatgttactctattttgttgctgacttagtaataaagatcattcctcacaagtgaagagatccttaagttgcaaagaacaaaagggagactattcgctagcaaggacatacaaatgttaaggtcaagtatcttcctctctctcctttaccgcaattagatacgaaggatatagaggcttgcactatcccaaaaaagtttacttccgtaccattctatatcttaaaaaacttttgtcgggtttattttttatctttgaataagaactagataaggtgaactagagaagataaagctgacttgaaattc

SEQ ID NO: 11437 - DNA, 553 bp, Arabidopsis thaliana columbia
tttaactcacacaggttgctctgaagtttgtatggcttggaatcggtactttcgcagctgcttttctccgtaagttcattggatctgtcgaaggatctaaactttgtgaaaaaagatttcaagaaaacaaagagtgtaaacttttttgatgtctatgaatgttcagaattgtctggctggatgatttctggagagagacaagcagcgagaataaggagtttgtatctaaagacaatcttaagacaagatatagcctttttcgacatcgatacaaatacaggagaagttgttggaagaatgtccggtgacactgtgctaatccaagatgccatgggagaaaaggtaagctactaaaaaaaagtcaacatggcgttctaatgtttgaaactttatttgttaaaacgacgacgtttttgtcaggtgggaaaagctatacaacttctagcaacatttgtaggaggctttgtgatagctttcgtaagaggatggcttctaacgttggtcatgttatcttcaattcctctacttgtaatggctggtgcacttctggcta

SEQ ID NO: 11438 - DNA, 1222 bp, Arabidopsis thaliana columbia
ttttagttttctagataagatcttagctttggtcacgtaaaaaaaattaaaagtgaattggttaacaatataggagtactttgtatccaaaggtcattgcaataaataaacacttaagtactctgtagtcacacatctctaggagcttaatattggataatcgcttgtagacttgtattaaaatatttagtaggtcaaatccctatcttctacagtttctactctcgtccgtacagactacagacactatgctatagttttgtgttgaattctacaaagtacaaattcttctttcggtgccaataacaaataaacacaattctcaaattacatttgtctaaatttttatttgattcggtataaatgtaacgctatgttgggaatcatatgataaatccagattaagacttcttatttaatttatttttgtatatataaaatataatatccaaccataaagtttttttaccgatcgatgataatgtgaatccaaatattttaacaggatgataaataattgatgtggcttttataaccgcagcaattctggcgtgactctctccgcagcatttatttttctctctataaattaaaaacattacttactctttctctcttccacttaactcatatcaaccttcgccggaaataatggctttcccgcgatttctttctctcctcgccgtcgtcactctctctcttttcctcaccaccactgatgcttcctctcgctctctatccactccacctaaaacgaacgtactcgacgtcgtttcatctctccagcaaacacaaactatcctctcactcgacccgactcgttcctcactcaccaccaccaaacccgaatccctatccgacccggttttcttcaattcatcttcaccactatctctagagcttcactctcgagacactttcgtcgcgtcacagcacaaagactacaaaagcttaacactcagtcgactcgagcgcgactcatcccgagtcgccggaatcgtcgcgaagatccgtttcgccgtcgaaggagtcgatagatccgatctcaaaccggtttacaacgaagatacacgataccaaacctgaggatctaacgacacctgtcgtctccggagcctctcaaggaagcggcgagtatttctcaagaatcggtgtcggaactccggcgaaagagatgtacttggttctcgcaccggaagcgacgtaaattggatccagtgtg

SEQ ID NO: 11439 - DNA, 458 bp, Arabidopsis thaliana columbia
tagtaacggaaaaaactcaacttgagaaagttcagttgacttaccggtggcgtagaagggtatgtatccgggaagaagatatcaaaaaagaagagaccatcatggtagggagttccttgggctccgataattacagcccttaaaagatccatcctagattcataagctctgacaaatatcatctctgttccaataacaaagaatgtaagaaaaaattactgataaaagccacagagattgttgtataagacagcgtgtataccaacctggtaaatctttctcaagaattctccactcgtcttggatccttttcgcccaatcctttgaatgctgataagacaaagaaaaaagttaaatcttgaaaaaacataagaagcattccattataaagattaacttatgctcatctggcaacctgctttgaagttgttccttagaagcatagtggtgatctgaaa

SEQ ID NO: 11440 - DNA, 558 bp, Arabidopsis thaliana columbia
tagtaactttttcatgtgtccatcatacgacgccgttatagagtgttcaagtgatcgtcctgcttatagaaatttcagcttcagagaattcagacaacaagttcaagaagatgttaagaagtttggttttaaagttggccttcctaggttccttaatcacgtctactaatttatacacccaaatttttatttttcctttataatttattttaggttttatgatttatttgaattgtttttggtttgattttttccatataatttatttttcatgtttttccttaagaaatatattgttcctcattatcaaatttaattaaaatcgattagaaaaccaattttaagttacagaggaaaaaactgaactttattaattttgaattgtacattgcaaaaaaaaaaaaaaaactcaatccgataaaaagagaaaaaaaaactaatgaaaaatatttggcatttggttttattttatgttataaaaaaatgtcagaagatattagacgaagggtcacgataaataattagaaacaaaaagaattaaaaaaaaaaaaaaaaaaa

SEQ ID NO: 11441 - DNA, 594 bp, Arabidopsis thaliana columbia
ggctccagaatattcagatcttcgaaaggaacattcagattcttcaaaatctgaaccacagtgttcggagaatccacacatcgggaagtctctcgttcctttcataaacagaaccactttctccgaattcaccagtttctccagcgtgtctttaagttgcggcgtaagagccgacgctgagcatcggaatttagttggtttcagcttgagattcgaaccgtagaacgatagctgatggttatggacgacgagtgccgacgttggtttaagagagaatctgatagagtgaggcttgttggtaacggaggaggagacgacggcgaccgaagttatcaaggtcggcgttttgacagatcggagagccatttttgacgacttttagatttggaattgagaaattgaaaaggtaaatgatttatgagccacagacactcagtgcgagtgagaattgaataaaccatgttgccaaacatcaccactaagccggtagtgcatgtcataatcatgggtttaaaaataaaaattagaggacattccggttcggtttggttcgctctttagattctggtattttagatattaagaaattggttg

SEQ ID NO: 11442 - DNA, 561 bp, Arabidopsis thaliana columbia
aatctatgatggataagtctactccgaatatgagctatcaagcttggcgtcatgagcctgaggtaaatctaagttttaaagactctaactttatatgacttagttcctgaaaggtggttatgttggttgtcagataggtcctgttgtttatcgtagtcgaactgtttttgaggatgtaacaccagacattgttagggatttcttctgggacgatgagtttcgacctaaatgggatactatgcttgcttacttcaaaactttagaggaagatcctaagacaggaactaccattgttcattggattaaaaaggtatttttctgctttccttcgtgattcatgaacatgttactaatttcttttgtctgcagttcccattcttctgtagtgaccgggaatacatcattggtaggagaatatgggaatctggaagaaaatattatgctgtgactaaggtatgatcttgcttttacttccttatggatcaaatcttttagtagttaggaatagcagaatgctggtttgatatactgttttggcctatattaatgtttgtagggagt

SEQ ID NO: 11443 - DNA, 465 bp, Arabidopsis thaliana
  unsure (1)..(465): unsure at all n locations
gttcttcaaacaacagtagcaggtcaactttagcaacatgtttgctccaagtagctacctgatatatatccacaagaattccaactataaagaaagtactcaatagatattaaaaatcgaggctcttcaggagtaccattcatgaataacataacagggtgagtttttccaaacgattcttgagagcatcagcggtagatacaggctgagctcggtcttgtccagaagctttcgcattcttcttaacagtttcaagaatcgttggccctgcagccaaccctaagcttgcaggagtaatagaaccagcaactttgccaactttattagctaaacttgatggatctgccccttcaagtgtatccacagttttgccatccttcaataagaaaaggattcagtgcagtgacaaagattcaagctttgtcaataagccaaaaaattgcaaccanacaaagaatcaatatg

SEQ ID NO: 11444 - DNA, 1413 bp, Arabidopsis thaliana
tatgagccaaatatagaatttaaaaattaattaaaggagtttacttgtagttggtaatgagtaaataatgtatgtatccactagaatacagatatatctttgggtcaatgagacagaaaaaattaagcatgccccacgcagctcaagtttctatctcaatcttacgtggatatgattaggaagatagctccattctttattatattggaagagaatggtgaaaattttgtcacatgtcaaatctaaagttttctttaagttttttgaaatataaaataaattatttgaaattctgattacttgattttaatgaattaaattgagaaaatcatataataatagaatactaagccatatatgaattaaaatctgtaaacattaatgtggtattgatttttcttcaaattctagctcaatatataattaagggaaccattgaatgtcaaagatgttattttctagaactatgtctcatttaaactttatagttgagaatataaaaggaagacaaaactttccaagactctgtttagagagtactctattttgtaggtgaagattagtatgcaaaagaacaaaagaaaaattagtagaagtatagaacaaatgtgataagaaagacatcaactaatttcaaaaaaaatccttaaatgattttactagaaaagagagggaagaaaattaacaggattgtttttgttcaatatgaaaaaatgtagaaggtaaaaatgagggggaaaaaagatgcatagagaatattcatcaaaactcaaatgtaaaatgcatgtatcttggtgtggttcaataaccatttatctaagttgatataaacaaaaagcatatttggatagagttgagaactctaacaaataatcatgagctaacaatgtttcttctgttatggagtttatagtatgtgaatgtgattgttgagaaatctaacaaatagtcatgagcttacaatgtttcttctgtaggaagcatgagatgtaatgtgtatttgggttcaaaaggttcatcacttagaattcaagctcacacgagcattcgatcaccaagacaaattacaggaattcacaaatctgtctttcattacacagtgtttttgatacacataaagctcataaggtacacatatttctatttttacattcattagttgaaagggataacaatatcgccaatgttgttgtgccatggatccgccaagtgagttgccaagttctccaatggtcctgtccccgggtaagccgactgttgcacacagaatcctacaaacgccaacagcgcaagcgcccctgttacacccaccaagcaaaaaacaccaacattagatatacatttgtacataagtttgatcaagaaaggtaagttgttgtgtgtgcttaccgttcttgatctctttaactttca

SEQ ID NO: 11445 - DNA, 605 bp, Arabidopsis thaliana
tgttttgattagtttgcgtctctgttagattactgaaagctgtttatctaatcaggtagtagaagaagatggttcgcctatccatttagctccagacttattgattctttgttttaattggttggttgcaattttctgtctttataggattgagagtgtgttcaaagcttgaatctttgtcactgcactgtaatgattgttctgaaagttgttactttcttctgactgtgaattcgttttcttattgaaggatggtaaaactgtggatacacttgagggtgcagatccatcaagtttagctaataaggttggcaaagttgctggttctagtacttctgcggacgcctgctgctcctgcaagcttagggttggctgctgggccaacgattcttgaaactgtgaaggagaatgcgaaacgttctttacaagaccgagctcagcctgtatctaccgccgatgctctcaagagccgtttggaaaagctcactaattctcaccctgtcatgttattcatgaaaggtattcctgaagagcctaggtgtgggtttacaggaaagtagttgacattttgaaagaggttaccgttgattttggaagttttgaca

SEQ ID NO: 11446 - DNA, 494 bp, Arabidopsis thaliana columbia
gaacatacctgaatatcatcaagacgactagacagctaaacgaaaatagcaatgttatgaaggagcctataaagtgcttgacatgagggtggaaataaccaaaaaatgagtccagttcagtacttgtggttcagagttacggtcaagaccacctaacggatgttcaaaatgagtccaatcttgttcaccagtatcctttccaaagagctctcgaagaaaggtgggttttgctctccatctagcatgcatgaatcttgaggttgtttctgaagcagagttacggacgagtttcttgaagcggaacattgagggttttgctctgcgtgtagcatgtaggaatctagagtccctaaacctgttctgaataagtgtattacggtcgctgactttctttagttgagctttaagaacaccaattttattttcaagagaatcaacacgagcagccaaatcttgtgaaagagatggtggtaagcaggaatgagatgggttga

SEQ ID NO: 11447 - DNA, 500 bp, Arabidopsis thaliana
cctgaagaaattcgccttgcttctacgcatactccacatgtgagatcccacatcaagcatatactcaacaacttctttcctcaaaggcggctctgctcgtgttagccttgtcgacacaatctgagttgcttgatgccttaagttatcgagctggctaaccgtgaggggatggaggtagtgcatcttaggtaagagaggcatagaatacatatacatcatgttgagcaatgaagagcaagtaaacctcaccgctaagtgaatctctcccattttcttgactccactaggatgtagcaccaaaagaggatatgaatgtgtgtagactcgatcagcctcgagagtagagagccttatcctcacctttccaattcttgaatcttttcctcctccgttgtttttgtcaccaccagtgtagatggcagttatcgaacacaccaactgtaactacagtacacggatcaaaaacctcccaagtatattgctcgtccatcttggggtaa

SEQ ID NO: 11448 - DNA, 357 bp, Arabidopsis thaliana columbia
ggttcacatcgatcagcttcacttaaagatacacaaaaatcaattcctgttggtacattggctgccactctgaccacaacctcactatatttgatttctgtgttgttttttggagctgttgcgacccgtgacaaacttttgactgataggtaacaatgttactccttgtgtggtcaatgtttttgtttcacagctgatccgttgtgttttcttaggcagaagtgtcctggagaaaatgcagaaacccacttatcacttgcactttcgtgtctttagcatggttaaacttgacagaaactaaaaatggctgcatgttctgaatatactacataaaactactaggggtctacaaaagct

SEQ ID NO: 11449 - DNA, 464 bp, Arabidopsis thaliana columbia
gccagtgtgctctaaagagagggtgaacgttgagccttttccctcctggcttgcgacctgaattgtaccaccgtgttgttcaacaatattatgcacgaccgccagccccaatccggtgccttcgctttagtggtgaagtacggagtgaagatggcatcaagctgatctgccgcaattcccttaccgctgtcggtaacgctgattttcacgcccgcgccgctttcgctggccgtcacgctaatcacgccatgctgaccaatcgcctgaatagcattgagatagagattcaacaggacctgagtcagcctgtccgggtcggcctgaatttccggtaatgtgtcgttggcggtaaagcgtaactggatctcccggctgtttgcatcctgacttaccagctgtaatgagtggttaatcagcgtgttgagatccacgcctgcaaagccagatgcgttggcttaaccagt

SEQ ID NO: 11450 - DNA, 357 bp, Arabidopsis thaliana columbia
cttcaggtttcttagtctatttttttaatgcatttttccaaattctcgcagctgtatgtgacacattcccttgcttctacgcttggaactaaattacgcatttttctgatttatattatagccgatgtcttgagagaaaatacagaagctgtctttgtcgcttgtgaggttactcatggtacgtgggcaaagctactaggagttcgcgctcttcttcatccaaaattgaaattgcaagagttcatgagcatttatgatctgacccaagaatttataacatctacggagaacgtatttgttctaaacttttcttcatatatgagataagaaattgcattgcttattcttgcgtgacat

SEQ ID NO: 11451 - DNA, 582 bp, Arabidopsis thaliana columbia
tactctttggaaaggcaaaaatgatgactaccgccattgtttctcgacgaaggaaacgtggaacaatacaagaacaatgggcatcgaggtcccttggcataagggggtctggttcactctctcaacaccgaagttttctttttgtgtttggcttgcagtttatgataggctctccacaggagataaaatgcttctttggaacagaggattgcaggggacatgtcttctctgcagaaatgcaactgaatcaagagatcatttatttttctcttgcagtttcagctcagaagtttgggaaatgtcagcaaaaagcatctacaagtcaagctactctacggattggcgacacctactcacaaagattcaaggaaactggaaagatcgagtagaaagttttattgcacggtatatctttcaagcttcagtctatgcaatatggcgtgacggcaatgggaggaagcatgagcgcaacccgaatcaagcagctcaacttgttcgatggatagataagcaaacccgtgatcaactttcagcaatcaaacttatgggtgatagaagatatgaccaaggctttcagttttg

SEQ ID NO: 11452 - DNA, 511 bp, Arabidopsis thaliana columbia
tagcttcatcactcagcttttcacttcccccctttttgagaatattgtcgcaaaatgttgcaagtagttctgcacttgaacttccagcaaccgttttgttacaaaaaatctcaaatgcctctttcaaagcctaaaatatgtttccataaacttaggttagtaacacaacataaacatgaataagatagacaaatgacaagtgcgcagaaagaacattagaccttatggaagagggtgtggttctggaaacactcggtgacatataccatgtatttatcatgaagttcaatcacttttctgataagaacctggaaataatgaaaggacagtgaatcgttagcaattttatccgcaaaaaaaatgaatctctaatttccaatatatctgtactacaatcggtttataattttaccatgtcctggacgctagcagtatttgcaacctgtggaataaaaacgatcttagcaatcacaaacgaagacagaagagttatccgaatataacaagtaag

SEQ ID NO: 11453 - DNA, 591 bp, Arabidopsis thaliana columbia
catatcaccatctagttggaaatctttcatcataattaacttaactataaacgttttctgaaaaaattaactataaacgttttctgaatatgacagatttgaaaatgtttgataccatgcaatgcatatgttcaacaatttatatacagttctagttaaatgttacttttcatgcttcctttcttattctttaaatagcctaagtgatattttaaaattttgtacaaatttacctaaattaataaatactattaattaggtgattttccatgtcatgcacataattaaatgtagctctaaccctaacatttatgtatcttaaaaataaaatctttggcatgagattaaatttattttaaagcttcatcttatacttgggatagagttatgaagttaagaggcacactttaatatcttgttccttaaataattatctaataacaagagatcaacaattgggccttgaagacccattctaggtccgtcaacccaccagaatgatagtagaggagactttgaagatagacttagctccgcggagatttcggagcggccttgatattaaggaagtagttggccgtgcgataggtg

SEQ ID NO: 11454 - DNA, 583 bp, Arabidopsis thaliana columbia
taaggttaagtgtacctctggaatctgttacagttactcttcccactcaaatgccagtgtccaaggcgcctaggaaaaggaaagtaccagcccgagcacctaagccaaagccctcctttagttcaagagtagctcgcatccctcttcagggtgccagtctaaggaaacaaaaagtggtgagccgtaagcctgcttctcgtaaaaagctcagagttgacaatttacctgagtctcaggagtcaccagttcaaccactgcttagtaaccctcctcgcccagcgttggttccagcaatggttaagaagaagatggattttcaggatccatccaatcctcttccttagtagtgacttcgtggaactgtcagggcatagggagccccttacagttcgtcggctccgggagataagacttggcttatttcctgatatgctcttccttatggagactaaaaaccaagatgaattcatctctaaaacctttgattggatgggttatgctcacagattcagccattcaccagagggattgagtgggggtttacgctttattggaaggagaatgtggaagtggagattttaga

SEQ ID NO: 11455 - DNA, 573 bp, Arabidopsis thaliana columbia
tgagattggtcgtcttgaagttctcaggattcacaccaagaacatgaagcttgcggaagatgtaatgttctgttacatataattattttcttcttttcttttacctttttctatttgtttagatctgacattattttctcttattcaggttgatttggaaagagtatctaaagacacccatgggtatgttggtgctgatcttgcagcattatgcactgaagctgctctccaatgcattagggagaagatggatgtaattgacctagatgacgaggagatagatgctgaaattctcaattctatggctgtcagtaatgatcatttccagactgcccttggtaacagcagatcttcagctctacgtgagactgtcgttgaggtgcctaatgtgtcttgggaggacattggtggtcttgagaatgtcaagagggagcgccaagagactgttcaatatccagtggagcatcctgagaaattcgagaagtttgggatgtcacgtctaaaggagtcctattctatggcccccctggttgtggaaagacctcttggctaaggcgtattgcgacgagtgtc

SEQ ID NO: 11456 - DNA, 437 bp, Arabidopsis thaliana columbia
cgaaccgcatcatattacctatgtaaacaacatttcttaggaatgactcttttaagctaaattattagcggtcgacaacaaaaataaaagaaatttaaataactttattatttaaacttttactttaccctttaaaaccaagttaacataataataagtatgaaattagcataaaacaatatccctaacagaattagcaaaatccaatcattaaatggactatatatggaaacctgcctctacagttgttcttgagatcaaaaacatcctctgttgtcacctcgatctcttatcaagagctcaacagatcatccgcccatgtccatctctccttgtcacttggtttggcgtttttcagtagaagattcagttggtttctcttctggacctggagccttgtttcggtttttggcattttgccatctaattggacatgc

SEQ ID NO: 11457 - DNA, 567 bp, Arabidopsis thaliana columbia
gctcttcatgttattgcagaagcacaaaaacaaggaggttattccttgtttcttttaactcctcggctatgttctttacagagccatacgtcgtatcctaaagaagttttttgcatacaggaacctgtgtctttgtagatgctgagcatgctcttgattcgtcacttgctaaggcaatcggtgtaaatacagaaaatctgcttctatcacagcctgattgtggcgaacaggcccttagtcttgtggatactttaatccgaagtggttcagttgatgttattgtagttgacagtgtaagtaaggtgatttatatgggatggataatgggttgatgcttttgctattggatctatatttcgctctctcatgttttcatgtgattttgttttacaggtggctgctcttgtacctaaaggagaacttgagggcgagatgggtgatgcacatatggctatgcaagccagattgatgagccaagctttgcgtaaattgagccattctttatcgttatcgcaaacacttctgatctttataaattaggtaagagacgttactagctgggtacga

SEQ ID NO: 11458 - DNA, 514 bp, Arabidopsis thaliana columbia
cgcggaagaatatgttgatgagatggctttcttggaaaacatgttatgggcagtccttctgataggatatgaatctgatgcaaatggcctgcaaacttactgtgggatcctgagggaacgtagaaatattttcgagcctttaattcggtcacggaatcatcaaggaagtgggtcatgaatgcgttctacgtgtacgtccattttgtcaatgaaccatcgactagctgtcagagccaagatgttcctccacacgttagagagtgggtaaagagattgcgacgaggataatcagtcggtacatcatctgcatagagtgacgacactaagtctttgaagattccaaatgatctagtggtgattcatcatgagcaccgctaaactttccagctgaaacaagatcataattgtcagtgagaatcgcaaattggtcacttgcaaaaggaggtagctagatcgatgtccgatgtgagtagaatagatcaacattgctgaagtcacctatggtagctggttt

SEQ ID NO: 11459 - DNA, 950 bp, Arabidopsis thaliana
ccttcgcatatccagtagtctatcaacttttcgttatatatctcatcatcttcgggaaacaaagcacaatataggaaacacgacttgatatgttcatcccccaagctatcgtagctgtacttgagaatcggaagaattttgtttcccatattagaaaactctgcagcggatctagtcaaaacatcgattgcatgctcccattcttgtaccatagttttagatgccattgtctcaccaatgacactgagcgccaatggcagaccacgacatttttgagcgacctctcttgccaactccacaatgacgggatcactacgtaatgtgttgtctccgaccttgtttttgaacaactcccatgcatcctctggttccaaacatttgacttgcatcggcttatgatccccatctccccacaaactttttgatctcgggtggtgaatgctactttgcatttatttacttcactcggatagggataccaatggcctctaaatccactttctcccatatatcatctagcatcaaaacaaatctctttccctttaaaactctgtgtatatcggtggccttatcactttcattcttgttcttccacaggtcgtcacaaaggtgtaatttctctgcaatatcttcttgaagctttgaaagctttgcgccttgagacaccacgatccagatcacaatgtcaaacgtaccacctgtttcagcgaacttattgtggattttcttgaaaagggttgttttgcctacaccacccataccgtgcagacccatgattccgactccatcttccataaggcggttccatgcctttttgagcatttcttcttgaccaatcgtaggctgagtaggcctctcttcaacttcagatcttggaggcggctgagaaacctcgtcaaaatttccctccgattttagtttcgtaacctcttccaataacaaaaacaccc

SEQ ID NO: 11460 - DNA, 968 bp, Arabidopsis thaliana
gcatgctcccattcttgtaccatagttttagatgacatagtctcaccaatgacgttgtgcgccaatggcagaccacgacatttttgagcgacctctcttgccaactccacaataacaggatcactacttaatgtgttgtctccgaccttgtttttgaacagctcccatgcatcctctggttccaaacagttgacttgcatcggcttatgatcccccatctccccacaaacttcccgagaacgtgtcgtgaatgctactttgcatttatttacttcactcggatagggaataccaatggcctctaaatccactttctcccatatatcatctagcatcaaaacaaatctcttgccctttaaaactctgtgtatatcagtggccttatcactttcattcttgttcttccacaggtcgtcacaaaggtgtagtttctctgcaatatcttcttgaagctttgaaatcattacgcctttagacaccacgatccagatcacaatgtcaaacgtaccacctatttcagcgaacttgttgtggattttcttgaaaagggttgttttgcctacaccacccataccgtgcagacccatgattccgactccatcttccataaggcggttccatgccttttcgagcatgtcttcctgaccaatcgtaggctgagtaggcctctcttcaacttcagaccttggaggcggctgagaaacctcgtcaaaatttccctccgagtttagtttcttaacctcttccagtaacaagaatacctttttcccatatttgtagcttgaacatacatattttgaacacaaaccgcatagacacaacttttgaagctcaacaggagtaacacttagcagatctttgcactctatatcaacgctattgacacggtcaagccatacctggacagcttcaagccttcgttgatggcgtgctcgtctctagctaccttgttttgtcctcatgttgaa

SEQ ID NO: 11461 - DNA, 556 bp, Arabidopsis thaliana columbia
ctcgaattatgatttccattgaaggaatcatctccatttctctgtggtagaagcttcgacgccttcttggtttgtgcagaaaacagcaaaacaaacaatcattcatgttgcacacgaattattatataacacacagtactgagaaacttcgaacattcatgatgtgagatctaccaggtttgaagcaacagctgatgaatattgtgggacaactggaacctgtgatgctgcagcgatctgaggcctcgggaggtgccactgatgttttctcaagtttgattcatgtctattattactacgagcttgttgttgatgctcattacttagtggatgcatcctattgaaaagggttgcatcgctcgagacagtaacaacaccaaccagctcaccgttttcatacacagggcttttagtcaccaaagccataaatagttcaccagttttcttctgaaacggaaactgaccagtccaagtctctccacggcacaccctattcctgataccagtaagggaattacggtattcttcggtgacaagcacatcaatagttctgtag

SEQ ID NO: 11462 - DNA, 578 bp, Arabidopsis thaliana
ctaaagaattctatagatcccggtgaggtcagtatgccttcgcgggaagcgaagttctatcatatcacattcagtcgtcaagctctatgagcaggtatacgtttccaggcttgtaacgcgcagttagcgcacagcccctccccctcttcactattaggcgcatgtttcaccatggctattgcatcctggcgccctcgctctgcattcaccaaccacactagcggcatcggtagtaggatcaagacgccaatgaaaatgaatccggaccggacagacccggtcgcatcgatcagggcgccgactatagccggacccacgaatgagcttcctttgtcggtggccgcgtagagcgcgtaaaacgcagcctcgctgcctggcgggataagctcgccgaacaaagagcgacagtacgatgccaatcctccagagacaaccccatgaacaatgcccaaagggaaaatctcccatggcttctgtagcccaacacaccccagtttcgaataaaggggatgtaaccagcatcccgtacaaggggatgatctaaacagtgctatgataacagaatagtatggttggac

SEQ ID NO: 11463 - DNA, 638 bp, Arabidopsis thaliana
cccctgaactgttgtactgaacgggacatgtctgtcttggtaatgatggtaagatagacttttaatttaaactggatattttcttttttttacgaaccaatctaaacgattcgttcttatagtatgaatcaaacgggtttaaataatgggttccataacattatcattaggtatttggctatgatatttaaataatgctgacaaaaataaaaatatcttggttgaagaattaaatttacaaaattattaacaaaacgtataagactaaacaaaaaaaaagaaaataaaaagacaaatttggctataaaaccaaaaatccataaagacctcaagaaataacttaaagagttcaacaatggcgaatcatccactatcttcttctcgatccaaccgaccttttttcgtcagatcacttgctggacacacctcaaatctagtaacctctctctgtctctctctctctctctcaacttaccaagaaactcaaatttagttgtcactgttgttgcagataattcctgatgagttttcactgctcacttagagggtaaactggcttacgaaattgaactgacttctgatgttcggatagaactgggatgtgagctgacggcaggagattcgcggcggtgggatga

SEQ ID NO: 11464 - DNA, 504 bp, Arabidopsis thaliana columbia
tataaataatttcaaacaattttatagaagaagcgatgcaaacctgagcaatggcagaaagagtgagaattggcagagttgccaatgcaacaagggccaaacgccaaccaagcagcaacccaatcagaagagcaacaataacagcaaaactatcttgaataaatattgaaagcctgttgctgaaggcagctcggacaaaagtagcatcatttgctaaacgcatggataatgtatctggactgttctcttcatcatcgaaccatccaacttcgttacgcagcattgctgaaacatcagagaaattaatgaactcaggcaagtaaaagtagttaaaatgggataaagtaaattataatgaatttaaaaaatttccaatacctgagaacatcatcctcctaactctctccgtcattttctctcccattatgccaaaatagaaatgctgcaagaaattggcaacaactgtcacaatccccatgcaggcaatgatcaacaccatttgtc

SEQ ID NO: 11465 - DNA, 495 bp, Arabidopsis thaliana columbia
gcatcgtttttctttcttttctatttcagtttgtttctttgtatctttttgtcactatcttccctctattccctaatggatttataaactttttcctcaagaatctttcttgtgttagaagctaactcataaagcaatcttgtgacaaccaagaaacacatcagtctaaaagccaactagaaaacagaggtacttctacatagtttgtttattaaaaaagaaaacattaaatgatcactcactgcaacttagaaacatcaaacaataaatgaaccatacaaacaagaaaaaacacacttggaaacataagcacttcaagatagtttggtttatatcaaccttattaatcacccccttctacttagaaacgtcatagtgttcctatctttcagtcatgggtggcccagagacaagatcctgcaatgactctacgaaagcatcgacataaccagtcattagtccaggactagctactgtctcctccacttggtgtga

SEQ ID NO: 11466 - DNA, 540 bp, Arabidopsis thaliana columbia
  unsure (1)..(540): unsure at all n locations
nnnnnnnnnnnnnnnnnnnnnnttaaagactgtggcgcgataagtaatggagatacggttatcgtcggtcagacgatattgcaccgtcgcgccgagattacccgggaagccctgatcaccatcatctgaactcagggcaaacagcacctgacgatcgttctggttcacaatctgccagcgacgtttgtcgaacccttccggcccgccgtgcagctggttaacgccctgacttggcgaaacgtcacggtttcaccgtcaaaggtataacggctattggcgatacggttggcataacgaccaatagaggcccccagaaacgcggcctgatcctgatagcattccgggctggcacagctgagcagcgcctcgcggacgctgccatcggaaagcggaatacgggcggaaagtaaagtcgcaccccagtccatcagcgtgactaccatccctgcgttgttacgcaaagttaacagtcggtacggctgaccatcgggtgccagtgcgggagtttcgttcagcactgtcctgctccttgtgatggtt

SEQ ID NO: 11467 - DNA, 917 bp, Arabidopsis thaliana
atcctctagtgaaacttgcaaaatcctgagtttttgaagcttcccaattaatggcttgagagttcctgttaagttgttatctgccacactaagagtttccaagtttgaacagttgaagatatcatctggaatttcaccggtgaaatgattcctcccaatagaaatgaacgtaagattcatccttccgaaaccccgcgggatctcgccagtcatttggttgtgagacaggtccaggagtttaagaccggtgcagttacttatgctggaaggtattggtccggtaagaagatagtcgtgcgctgaaaggttccgaaggtttgtaagaagccctagatccgccgggagctcaccggaaatattattgaaccccaccgttaggactgtcaagttcctcaagtttgtgatggactgtggaaactctcctgtgaagttgttggaatgaagtgtgaggacttcaagtgactcaagaaaaccgatttcttctgatatcggtccaaccaaatggttttctgataaccccaaatgggttaactgagttaaccggaacaatgaagatggaattgaagaagtaagtttgttcttgtatatccggagtgcttgcagctgaaccaaattccctaattcagctggtattttcccggttaactggttatcgtaaagctcaagttggaccaagctcgagcagtttccgatctcagctggtatatctccttccaacaagttttcagttaaaacgagagactgtaagttcaagagatttccaaaatctctcggtatttttccggttaactggttaccactcaggtctaaatccgttaaattagccagagtaccaattgataccggaatcgaaccagttaaatggttaccagctgctacaaacatttggagatgaaccaaatctcctaagcattctg

SEQ ID NO: 11468 - DNA, 503 bp, Arabidopsis thaliana columbia
gaagttttgtggtactaaattgtgttgaaactcaggttgatgtatggtcagttggtgttctgttttaccaaatgctgtttggaaagcgaccttttggacatgaccaaagccaagaacggatactaagagaagacacaatcattaaagccaaaaaggttgagttcccagtaacaagacctgccatctcagatgaagcgaaggtaaattagctgtaccggtcttagacatggtttaagtcaagtagtacctaatagtcatgaaactgtctctccatgttctcacttttgcattttctgcaggatttgattcgacggtgtctaacatataaccaagaagataggccggatgttctaagaatggcacaggatccatatcttgcctactctaagaagtgagattgtgtagtcttcaaaaacaaaccagagatgctataagaccagatcctagaatattttttggtatagcttatgaagtttctgttttgtttgtctaaatattttatc

SEQ ID NO: 11469 - DNA, 415 bp, Arabidopsis thaliana columbia
caggaaaatttgcagaagtggcttactgatgacaaagcccgggaccagctagtcattcgttttggccatgatactgaagtttactggaatgatgctaggcagaagaagcctgaacctgttcataagcgttctgtaagttacatctgtgtcagtttagagcaatgttatatgtttatgttaccatcatctgaattaatgatgttgtcttcctatgcagtattggacagagagttatgtgcagtggtctccaataggtacataccttgtgacacttcacaagcagggggcagctgtttggggtggtgctgatacatttacgcgtctcatgcgttatcagcattcaatggtttgaaattcctttcaattgctacatagtacttccgtttttcctgtgtttgtctgaaaattgacttct

SEQ ID NO: 11470 - DNA, 568 bp, Arabidopsis thaliana
tttccttcgtttcgcaacttttgagcactgaatctgacaattgcacttgcttctctacaaattctttcacttcttcagcgtcaggatcttccaacctaccaagagaaccgaatcaattatcttaaactgaattctaaccaaaccaatatacgattgtaccaaaccgggacacaaaaaagttaatgagcaaacaaacaaaaattggtccagaaattagcctactggtccagtaagatcaataatgggccaaaaaaaaatcgatagagctggtccaaaaaaggctcgttatgctattggtcatgagctaaaaatctttcattacgataaaacagcagaaatttcagaaagctctccggtaataaaaatctccgtcaactcaaccaacatgtcaacaacgttatcatacaaaacaaacaaacaaacaagtgtagctagttacagctgagaacgtaaacgctttttaccagcggtaaggatcggagactttaacgccgtgataatcttcaacgacggactcatcacgcctcgccggttggatactgcaaccgctcttcaaacgcagggagag

SEQ ID NO: 11471 - DNA, 503 bp, Arabidopsis thaliana columbia
gtttctttacttgtttgactttattgtttttgcagaagaaccaaaatgaaaactctgtagaacaaaatttcgacgaaaaatcgttttttttttatctctaaaagctacccaatcaaatggaagagaaggctgaagtgataaaagagagaaccttgaccaacatcagtcagggattaacttagcggttcaagcgcgtgaagttatcgagccagtccatgtttacactctttggtctctcaagtggcagtccaagtgccctgtcccatatcagctgaaacagaaaaggaataaaagattagtctgactttattgtgaaggatatggcgatacgtactaaaatcgaattgtcgatggcatgaatgtatgtatgtacctgcgagcagattccaagacttcttgagacgccaaaaagcaccggtgtagtatctatatttgaaaggaatgtcactctataataaccaagattcagcaaaacaaaggtcatagcctcgatacacaagtag

SEQ ID NO: 11472 - DNA, 501 bp, Arabidopsis thaliana columbia
tgtcgggactcttccctgaaattttacgattaatattgtcaaaaagagacaggaatggtttacccaagtacctagcacctcattagcgtaatcatttcgcatagtccttctcacacgcagagtaatcaagtttcaaaataaaaaccacgcatgaacaagaaaaggtgctctgatgagagtagaaaagggtaggtattgaaaattccaacttaaaagtgctagtctaagatttgaatgctgccatctctatggaaataaattgtaggagagagactcaaaaagctttatctatattgaaaacttaaagaaccactgcaagccatgcaataagcaaagaatagaaaaaaggaagcttaccattgtcatgtaatggagcagtcgggcgttgttcctttggaagtattgatttatcccttgaagaccactgttgaactgggcgtataactagagctctagggttctccttggaatgaaaagagcatccgctttggtgtacttgag

SEQ ID NO: 11473 - DNA, 562 bp, Arabidopsis thaliana columbia
cctgaacagcagccccctgaagcaccaatcataaatagcagtgattctcgcagcacgaatgtccaagaaaccatagcatcatctcatttgggtaatgtagatgttcttttggaccctgagggctcaacttccttttcacccaatgaggtctttactggacttcaaggtatgatagatccagcctcgtatgttctaaatgttgtcaacgatgaactcttgggtgctcaacagagaggagagttgggtttagcagagcctgtaattaagactttgattccccttttggaggagctaccacgtgttgtaaaatctagcaaacatcttctttcagatgcactacaagtggcaactcgatggagctggatgatgggaaatagtactcaaatgtcaccgcttgaggcttggggttttctcaacttattgtggcatatggattggtgcatgaaccagtcaagataatactttacgatttgcctcatatgttgctcactttaaacaagctccgaaactctttgaatctcttggtctcagttatgcgatgccaagtaagttttaattttgc

SEQ ID NO: 11474 - DNA, 717 bp, Arabidopsis thaliana
ggtaatcatcttaataattttgaaactatttttaacttttgatagaggattgtaaaaattttaatatgatgtgacttaatttcatgtaacattacctctttatcccaatctgcttgatacgtgacgtaaagtaagattagtgtttgcatgagggtgcctccaatcatcccggtccatatcccctgtaaccaaattcacatacaagtcttcttattaaatactgtagatagtaataaagcatatatcatacagaaaatatttggaagcgaacctttgcttgaaaattgaaagtgaagccgagaatacatccaattggaataccaactatatagtaacaaccaatattcacatatgccacgtatgtctgccatccacatcccactgccactcctacaaacaaaaacataccgaaatttgtcacatccggttccgttaatatactccggtttatccggttttagctaaattatttgcatgtataccggacaagacaggttggattccgttaagaataatggtgacggcgagaaaaggacataggtcagagacggccttagccacgtcagcatccgacgtgaaaatgtagctgacgttgtcacgtgacgcaatcacgacaagtgcctctacgacggagatcacgaaggatacaaaagtcgctgtccatgtagagaataacgccgattgcggatttcctgctccaagctcattacttgtacg

SEQ ID NO: 11475 - DNA, 424 bp, Arabidopsis thaliana columbia
cagtgtgctctaaagagtcatattacctaactccttagacatatactccagaagataaccttacagacggcataatgcgcagtactcacaacctgaataaatatactcagaggcgaaggtagtgcctgcaagccgccgtctatggttaaacaaggagatatttttacggcacggcggctgaacaattaattacgacaggagtaagaccttatgagcaagacatttgcccgcagcagcctgatgtgcactcagcatgacaataaatgaccgctcacaccgccgaaccgactaccaatttagataaaccaggaaggcgactggatattatcgactggccgggatacatcaaacgcggacaaactgataaacaatacgactgggtaacgcagttcgaaaaagagacaggctgcgcagtgaatgtgaa

SEQ ID NO: 11476 - DNA, 548 bp, Arabidopsis thaliana columbia
gaatgtgatcattgctggacttgcaaataatggttacgctgatgaggctgtatcagttttctctcagatgaggagttctggttttattcctgatgccatctccttgcgttctttgctttgtgctcagacaaaaccaatggctttgtctcaaggaatgcaaattcactcttacattatcaagtggggtttcctggcagatcttacggtttgcaactctctgcttaccatgtacaccttctgctcagacttgtattgttgttttaatttatttgaagatttcagaaacaacgcagattctgtttcttggaatactattctgacggcttgtttgcaacacgaacagccagtagagatgttgagattgtttaagctgatgcttgtgtctgaatgtgagccagatcacataactatgggtaatctgttgcggggttgtgtggaaatctcatctctaaagttgggaagcaagtccattgctatagtttgaaaaccgggttggcgcctgagcaattttataaaaatggactgattgatatgtatgccaagtgtgg

SEQ ID NO: 11477 - DNA, 551 bp, Arabidopsis thaliana columbia
cctctagtaacggccgccagtagggcccagcgacgagcagtggttactaactccgcaggtggcaccacagcatcaataagacccaaagaatgaccttcctcagctttaactggcttagatgtctatatgtttcaacaaaagagatgctattacactttaaccaaggcacgctaatgctaccataagaataaggcactgacataccaaaatcatttcaagggctttggtgagaccaacaagacgcgggagacgctgcgttcctacatcaatccaaaggagtataattagcattataaacgaaagtgacttgactcattcaacaaaaaaaatgaaacgaagatcctcttcccatcctcagctcagtattatgcattgagaatgccttgacttctccacgagttttaaaccatatattgatcagagttttcaaggacttcacagtcagcgaagttgaatagatacctccaaaaccaggaataacaccaagttgcagctcaggcaagcctaactgtgcagcaggagctgatatcctagcatgacaagcctggaaa

SEQ ID NO: 11478 - DNA, 565 bp, Arabidopsis thaliana columbia
aagtaacgtcctcttttaataaataccaaaagtcaaaatcggatcttcgtgtatataattgttcatttccttgaaaacggttacagaattagggttttgtttcttctctctcgccgattgatcttgaaatgtcttccccaattataattagggcaccgaagaagcaaccgccggagccgccatgtctgatttcgttactccccgaagaaatcgtcgtcgatatcgtagcccgtgtccctagatgctattaccctactctctcccaagtttcaaggcgtttccgatcactcgtcgcttctccggagatttacaagagacgatccttcttcggatgcacagaacaatgtctctacatcgcaatctccaaagatcaaacctctgatatccattggtttactctgtgccggaaacctaacggacaacaattctccggcaccaccgcctctgatcatcgcctggtacatatcccactctccctcctatgcctatgcatggaagctatgttggcattggttcgaacatctttgtgatgggtggattttgcaattggaagatacatcgagtg

SEQ ID NO: 11479 - DNA, 512 bp, Arabidopsis thaliana columbia
catgagtagcaaattcgctaaatgtgacttacagtttggtcgtaagcatcaattccttcactatctaataacaaaagattgtattcagttccgtcaagagctgttctttttataggagaactccacaaccaaagccccttggtacacggcttgtgtgttgatgctacttggaacccattactgcgtccaagaagctacaaacgcacaacaccacaaaacaatttaagatacacacagaaacataaaccctagacctcaaaacaatgtacacagaaccaaatcagacaaacataattccccattattgaatccaaaaagcttccaaaacctaacaaatcaactcgaggtaatacagaaaagaaccctaatttgccaaaaccctagacctcaaaacgaagtacaaagcacccaattcaaaacaaaccccatttttccaacgaagacccaacaacgaactcttgaagaagaagcgaaaccctaacctgattcacaataaagctctttccttgacg

SEQ ID NO: 11480 - DNA, 883 bp, Arabidopsis thaliana
ttgatacaggaagttcagtcgacctaatttttcttgatactctcgtacgtatggggatttctaagaaagatatcaaaggagctccgagtcctcttgtctccttcaccatcgagacttcaatgtcacttggtacaattacgcttcccgtcactgctcaaggagtcgtgaaaatgatcgagttcaccgtctttgatcgacctgctgcgtacaatatcatactcggaacaccttggctctacgagatgaaagcagtcccgtcaacttatcatcaatgcgtcaagtttccacttcctaccagagtgaaacaaattttagggagtcagcgtacatcagaatgtgctatatgaccagacacaagctcaaaattaaatagcaaccacatctcgaggccgctccgaatccattcaaaaaagtaggaaatgacctcgtagaaagagtggtgataaatgaagagcacccggatcagcttgttggcatcggggctaatcttggtgaaagtttctgaaataaactcattcactttctcaaggaaaacaaggaaaccttcgcctggaccgttggagaaatgactgggatcagtacggaagtcatttcgcacgatttaaatgttgacccaaccctcaaaccggtcaagcaaaagcgtcgaaaactcggtccggatcgtgcagaagcagtaaatgccgaagtcgttagactcctcaaagcaggtctaatccgcgaagtaaagtacccagagtggcttgcaaatcctgtggtggttaagaaaaagaatggcaagtggcgtgtctgtgtggacttcaccgacctcaacaaggcatgtccaaaagatttttttcacttcccacatcgatcgacttgtggaaccagtacggggacgaaatgt

SEQ ID NO: 11481 - DNA, 655 bp, Arabidopsis thaliana
ccatgcaaatatttctcgacgaattctcattaaccctttcaagataccgacacttcctgatctcacttctccggttccgtcaccggttaagctcaaaccaacgtatccaaacttaaaccttcttcagaagctagcggctacgatgctcgacaagattgagtcctctatcgttattcctatggagcagaatcgcccgcttcctaaaccgaccgacccggcggttcaattatcaggtaacttcgctccggttaatgaatgtccggttcagaacggtttagaagtggttggtcagattccttcttgtctaaaaggagtttacatccgtaacggtgcaaaccctatgtttccgccgttagccggacatcatttatttgacggtgacggaatgattcacgccgttagtatcggttttgataaccaggttagttacagctgccggtacactaaaacaaaccggcttgttcaagaaaccgcgcttggacgatcggttttcctaaaccaatcggcgagcttcacggccattccggtctagctcgactcgctctcttcacggctcgagctgggatcggtctagtggacgggacacgtggcatgggcgtactaacgccggtgtggttttctttaacggcaggttattagccatgtcagaagatga

SEQ ID NO: 11482 - DNA, 600 bp, Arabidopsis thaliana columbia
tatgcactatcatacctttcttcatctgctggaaggattcgttacttgatgggtactcctggaattgtggctctggaccttgatcctaccttgaaaggcctttttcagcgtattgtgcaacatctcgaaagtatacccaaggcgcagggagaaaatgtttctgcaatcacatgtgacctatctgtaagatggactatatccacttattttcaagtcagatgatgcaattgcatttttctttcacagataatcaatatacactatatagttaattcactcatgtttccatatgtttcccatttggcctgtcttcaaatcctagttgtagtctggtcccaacacaattaatatgtttaatcttccaatctattttctaatgctcagtgcctcttgttgtacaggatttccggaaagattggttgtccattttgatgattgtcacttcttctcgatcatcgataaacatcaggcatttggaaaaagccactgtctctactgggaaggagggcttgctatcggaaggaaatgctgcatataactggtccaggtactgttcccggcgttatataccattacttggttaactctagctagagaaac

SEQ ID NO: 11483 - DNA, 585 bp, Arabidopsis thaliana columbia
ttcagaaggcttagcacttctgaaattccagaaataaggctgaaacgatcctggggaagattcactaggatttgacttttcctcatcatcaacagagcttccaatgtcacttacagactggcctgacgtcgttgctggatcatttagagtaacggtatcaggaatcactgcacatatatgttcaagtcttattgtcatgtaaattacttaagccacctatattattacatcatgaattttaactagagatctaactttttccatttcacaaattacaaccaattgaggctctatagtccggtttgggagacagaaaagaaaaatatgatagtaaaacatcaccttctttgctgctttggattctgcattttccaatcatcgaggaaagagaaggtgcatagtatgactcggaaggtgaaagatgtaaccaatgggaatcttttccaaatgactgcgacataggattctttgtccttgctgctattctagcactacggcggcgctcagattcttcttgagccttcaagataaggaaagtccaagaagaccaataaatcaagtagctttagatggtccagctataga

SEQ ID NO: 11484 - DNA, 565 bp, Arabidopsis thaliana columbia
tcctccatgagctttccattgtccttctaccttcaaggctcgttcttctcccacgtgcctgcttaggttctgctcatgaaccatcaaggagctttgcaattaatccactgtgagctctttgatatcatttgattcttcaatagcacatacaacatatgtgattttttcaaccaaagttcttaagatcttctcaactacctttaagtctagtatgtcttctcctaggttgcgcatatcgttgacaacctccattacccttgagaaataaccaatgatcactttccctatcttcatttcaagcacttcgaaacttctactcaacatttataactgtgcgctttgcactctactgttccttgatactttctcttcattcgtcgatgtatctttcttcaaaattgttttgaaaatggtcttgtctatgaaggcaaacatatagttcttcaccttgcgatccttgacagtctgctccgccaactttgtacagtgcgttccggttaagatcacgtttctctctggtcgtgtgattcctgtttcaatgagatgccacactcctttgatctga

SEQ ID NO: 11485 - DNA, 611 bp, Arabidopsis thaliana columbia
tgataaaattataggcatgtagtatacctcttaatatgttattcatatataaataatattagttaaaataaaaatctctaactttctaacgaaaatatcgacccacgatataccacggtcaatctctaaaatgtcatcttaaagattggtagtagtagttggcgctaaccatatatctgtagctagacaaactctttgcttatacgcactaaaaaagagcattaacatagccttttcttgatagtacagctcgacaatatctataatgattgatctttgaaaagaattttttcaatagtaaaatgaggtatagatactacaaaaattcctaaacccaaccttttcaacgaaaacaataggcagctcatccagcacaatcattttcgctaatgcacttcgacaagcaattggacaatatttcataacatctaaaccacctgattctttttgagctaactttttctgagcttcaaattggttaaaattgatgtatgccttacagattttattatggtttccaaagtactcgtcccactagatggttttccccaagtattgcacacaatagttcacccacaccttactaaatcatttttgagcttggtaaagtg

SEQ ID NO: 11486 - DNA, 977 bp, Arabidopsis thaliana
gggatgtttaggaagggacgccagtgtgctctaaaggtatgtgatctggtcgggatcaagaaagaaagccgaattttcgttaagaccatggcttggtttgcctggcacgaggatactcccaatatcctctgcatggttctaaaactatcaccaggtgctgtacccagaggaagcaagagcacaacaactagtgactagcgttatttctctcttggaacaggttatttgaacaggaaatgagagtatattcaagagaaaaataaaggtcatgatcacttatctcagcatccagctgtttgacagtcggcatgcttatattacatgagtagcttagggccgtgatacttgcgcgtctcgaggtcgacggacttaacattggtagttgtccgctttgggaatccttcaaacgacactgcgtaggtggcaacagtgtgggcgacagctgcgagaagagtcaactgtgagctttgtacagcaccgagaattcaaaatataccttgctattgacctcccaagcagttgcgttgacgtttccgaggtcatcgcacaactgatgatagcatggatcataccagttgcctgcaattcccccaaacatctcctgctcctcgtcggtcttcacaccttccgcaccagtagcgataccgccgcctggaatgccgtttcgaatgaaaccatcgtaatcactcctcccatcgaacggaatgtatgtgaagttgagcccatgagaagtgtagaactcggtgtaaagatcacgtagctcttcggatccaacagggttaacctcattcgtagcattgtagacttgataggcgaaattgggcgacgagcatgtcataatccatgaagagacgaatcttcaggttctcctcttcgctgagaacagatacataatagtcggagcccaacagaccctcctcctcagccgcccaccaagcgacgcatcacagttgtttacgtcgtatttgctaagttga

SEQ ID NO: 11487 - DNA, 580 bp, Arabidopsis thaliana columbia
cctgcaggtcagaggatccccatacccggccgacgaactttgatttggggtactgcagagaaaattgaagagtatgcttacagtgttaccgtcaagatcaaactcctttcctagtgattccatgaccagctgctgcagataccgactaaatagcaataagctatccttgtaaggaaggacaaccatatcctgtaaaagaaagcaagaatagagtaataaggtcaataagaactcaatctccttgatagccttagaactctcaaaaaagttgaggaaaaacaccttggaaccaacgccattggaagcccagtaccaacacatagctaagagcgctgcagggttattcttgatctgaaagaagaaagaaatttacaggctagagtgagtcatggtagagactatctaaagtgtatgagtcaggaaacccaaccgtatgatatgacattctactaaaacctggtaagtaaactcatcttcaacacaagctgcaataagtactacttaccgaagttgtcctagtagcctcatccattaaagcagcaccagtaagcatctccctaacattaatcccctatatgat

SEQ ID NO: 11488 - DNA, 561 bp, Arabidopsis thaliana columbia
gcttcaaaacggaatggtcttcttcgtgggtctcctcttactgttggagagagttgaacataaagaggagcatgatccgaagagagaaacggaaggtgcgttacaatagcttcctgccattttaaacaggagtgagcacaacacagaaccctatccagccgttttggcacaaaattcgattctgttttccctcgtttccaagtgaatttattaccccggaatcccatatcaataagagatgaagtattgatccagtctccaaaggctaacgaatccggcgagagttggccattaccaccagtcctttcatccaaccttactattgaattaaagtctccaacaattacaatcggtcctatagcctcgcgtatcacatctcgaagttgatccataaaccacttctccgacttatagaaggcgccgatatctacaatgagattcagaactcatccctgtatccacgtcgaaagataattgactgttgctgaacaatcgtccttcccaatctccgacgcacaacaccaaataccccactctgccgactgcgtcgcacgaaaagat

SEQ ID NO: 11489 - DNA, 2057 bp, Arabidopsis thaliana
gaatgtacagtgatgagagaaaaactgtcgtacatgatgaacgccaatgaagattaaggtgcttctattaaatttgagcgactcatccgatgctgttgcaactcatcgtctgtcatctacgaatcatctaaatctgttattttcaattttggtgtcgttttacttaaatgttacttttcataatacgtcgttttactccgtagttgccactgccgcagcgttaactaaaaaaacatgctaatcataactaaaaataactataggtttagaaacgaacactacaatttggttggatctcaagttacaagatattttggtccactatgcgaaaagcaggatagtcaaataaatctatatctttttatgttaacgatctgattaaccgtatatccaaatagtgaaaatttgaccgctttaatattttgattgatctagtgggtatctctctgattctagtataagggcaacctaatcatatttggatgatggaaatattggaaggatacaaaattggactattattttgttagagtactggaccatgcgagatctttctcgcttaacttgcgactgtacccttttcagagaccggggatcaatctccttttgatgcaaattttgaagctgacaacaatgactaaatcatgtttgttttatttatcgataacaacaatgactaaatcatgtttgtttggtagccgttggtgataataataacgagcaaatttcaaaagcaatctagcaatgaaaattgttaggcgttgcatcaatctttgtcaaaaactgagtgaatgtaaatcgagcaaaaaaatgttaaatatatattgttaataactatgaaaagggacatcgtcaatccaaaacccctttttctctctcaacttgacgactagggtttcttcttctccttgccgccgttggtgtggcctctcgcccaccggcgagaatcttcctctttctccctcctctcccttttttctatggctttagtgatgcttgctcgggctcctgctccacctttgctcctcccttctccgaatccgccgccgtgtgctctaccgcaagatttgaccagtttggtctctccttctgaacctcccgaccctccagacccaccagactatctcgttggagcttccaactcctttctctcgattttgctgttgaggtcttcagatctaggatcagatcttgttcagactttgagccctctagatctgggttttgctttacgatctattactgctgtgtgcagttcgtggtaccaagtatttcctctcgcttgtttggagctttggttctctattccacacctctctcatcctctagtcactctatcaaaaggttttgtctctctgaaaggtagtaatttctttgaattttttaccttcctttggaacatgccttcgtttatacttcagttccctcaccatgaggatgtgatgatttctactagttttaggctggttttacctcaatatgaggctgttatgatcttgcttaagctcaagctgttcttacctcattatgaggattgttgttttcgattggacttcgaattcagcttcttttacctcagtatgaggttggtttgattctgtataagcttaggcttctcttacctcattatgaggatgttatttaaaaactttggttaagagcaattcatgttattgtttctttggtttggtttcttgaaatttcacgcaggataaaggaaaagacatatgacgtcttaacaagaaatgatcttgggtcttggactccagatttgttcatcaagaagtggtggttttcgcaaccccacacctctccgaagttgaggtttttctcacatctcgtaagctcaagaagttggtgctttgtcgcctatgctattgtagccgtatttcatgatgcgttttatccactagaggatgttgcatctccggacagcagatcaccaagtgtgctctcttatttccgaaagctcatctcatgttgcagcactattggtgtctcgaactttagttgcttaactgttatgtatgcttctatttttttctttcgtgctttct

SEQ ID NO: 11490 - DNA, 564 bp, Arabidopsis thaliana columbia
ctttttggaggtgatagaaactcaaagttcttccaagctatggtgaaagctaatagagcaaaaaattccttgagttttttagtggatgagaatggcaatgaaaaaactttgaatagagagaaaggaaacattgcgtctacctattttgagaatttgtttatgtcttcctaacccggcgaatcttcatttggttttggatggattctgtcaaagagtttctgaagagatgaataagacttaactaaagaagtcactgaaatggaaatatactctactgtcttttctattaatgctgagagtactccagggccagatgggttcacagccttatttttcaagaaaaattgggagattgtcaaggatcagatatgcaaagaaattttgggtttctttagacaggggtccttcctcaagagtggaatcacactcacctgtgcttgtttccaaagatttcaaatccacaaagaatgtcagatattagaccaatcagcttatgttcagtcttatataagattgttccaaaatcttgtctttcagactgaagaacaccttccagcaattgtg

SEQ ID NO: 11491 - DNA, 609 bp, Arabidopsis thaliana columbia
ttctataagtcgatcatgataaattttagcttttcttgaaataggtactttattttgaatgggattgagagagtgtttcgatgtgttattgcaccaaagcggaaccatgtaagctacctcgccttttaactgactaagttcatgagtatagtgttttgcttataaagtttatgggtatagtgtattcccatgaagttccttgtatcataatttaactgactaagaatctcttataatagccaacaagtatgattcggaactcattccgtgatcgtaaggaaggatactctagcaaggcagttgtcactaggtatttgaagtttatctcttccttatgtgttgcatatagtaatgccaatcttcccctaaagtggcaatagatcttaaagagttcttcatgcggttcttttttcttaattcttaggtgtgttagggacgaccagtcatctgttactgttaaactgtattatcttcgcaatggaagtgccagagttggattttggtaagtgttacttttgatgttggaatgtggatgacatttcctacaatttgagctacaggttaactttatttctaatggacacaggatagtgggaagggaatatttgc

SEQ ID NO: 11492 - DNA, 598 bp, Arabidopsis thaliana columbia
tgaattgttattctcatatttttggtttagtctgtgttctcaactgttgttctttgatgtgtgagactgtacttacagtgtttactgaatctgtatattgtactcttgtgaatttgaagtctttctgtactgaataatggatgaatttagtattggtttgattactcagaaaactcacactccaatccgaatagtctaatcttcttgttattatctcttgtgaatacttattgctaaggtgaaaaaagctttaggtgtgtgtgttggggttcttgtaaactctgtttttcttcttgtcattagtggatttctcttttgagtctttttatgatcatgttgtggtgctcttcccccagtaatatgttagagcgaaactagagaaccttttgttttgttttatttgtgttgactctctaaattcttcaacagatgatcacaatggagccaactggttcttttgacttgataagaacagcgagaatggcgagctttgggttgatatttctcgggccgtctcagcatctgtggttcagttatctttcgaagatattgccaaagcgcgacgtgttgacaacctttaagaaaataatgatggggc

SEQ ID NO: 11493 - DNA, 560 bp, Arabidopsis thaliana columbia
ctaaacccgaattattcgataaccatctatctatccaaaatctgatatcttttccgtcgcccaaacccgctatgtccatgaataataacatcacgcagcccatcaccaatacttctccatgttgatgaccagttgcttttcacagtgacccatttggcatcatggatatcacccatcttgtacttacttctcaccactcttgcccagagactagattgcccaaagaaagtgtctccgaaagagctctaattttcctgctttcgtgtttaatgttcaactaacaactaaggttccactctacctcctcaaacatatgttagttaatcaatagtttgacttaactgtatgtctctcacattttgtatgatacctaattagcttatctagtttctaattttggattacatccacacccaaaatggaatatcttctagaaccataaactctcgaaggatatattagtgccaaaaatttgttaccattaagtttggatggagaaacttttctctgctatttccttgtcggagattaaaatttggtatcctaggatcatctatata

SEQ ID NO: 11494 - DNA, 569 bp, Arabidopsis thaliana columbia
tagtaacgtccgccagtgtccaccagctttcttaacagtatcgtaagccgctgacaaatatcccggtgctagttccacgatccctccaactccctattcacatttgcattcactcttaattctaacctaacaacactttataaatgacttccaacaatagtcaaaggttgattacctgaatagcttcacaaataaaaccggcaatgtgaccagtcgtaccatattgaataagatcttgcaaatcctttgcatacttctctccatcagaaccaaacacacctctataaggatcagggttcaaagcatgatgaacactattctgaaccacattaaacttccacatactctgaccagtagcccccatagttgcagctgcattaccatgatacccgtttcgaaccgccacaatatcttgacatccagtatacaacttagccatcataagcgccaattcattagcctctgtccctgagttagtgaaaacaccacctttagatcccgggaagtttagagcaagagctcagagaaacagcaatggcatggttaaggtaaagacagtaggatgctga

SEQ ID NO: 11495 - DNA, 533 bp, Arabidopsis thaliana
ctcttattattccgtaattgtcaaagtacctgaattaagcaaaagagaacaggaaggaaacataagctttcaatacagaagagacatgaatagctagataatggtaaacaggcactttaccctccacgtccttcagtgccgaaatcctcagaaaatataaattgcacgttccttatgtactgccttgaccatagcggctcaaatataaggtttgagaatcgaagaacagataagttctcgactagctcctttcctaggtaatggtctatcctgtaagaacacattttcattatcatatcagccaagcaaccaatagtatcatcattgcaacaaaatatcatatcagccaagcatccaatagtattatcattgcaacaaaacaaagctataagtgcatttatctttcacttaaaaatttgatcttcctccaaatactgcttgagggatttcgttaaagcagccgaggtttcagaatctcgaccaaaaggtttctcgacgataaccctagtccatccattgacagatgaagcaga

SEQ ID NO: 11496 - DNA, 566 bp, Arabidopsis thaliana columbia
gacctcatcaaaaaaggcttcacacgctcattggcgcgttcctcagatctcctcacctcaaagaccggatcactcgagacattgaggcctcggttgttctcactttggcgtcttgggctcaacttccattggttcatgttcaggatgagatcaaaaaggtattgtcttagaaaatatattagtagcaaactcacacgtacgtactaggtcacatgctataacacattttttaattggtagaatgtttgttgttgttgttgtagatgacgtttgagatattagtaaaagtgttgatgagcacatctcctggtgaagatatgaacattctcaaacttgagttcgaagaattcatcaaaggtttgatttgtatcccaatcaaattccctggcactagactctacaaatccttaaaggtaaaatatttccttataatacatgagcatatcaatatctgatttcattttgttagtgtgtaatactagggtttaaacttcaatcatgcaggcgaaagagaggttaataaagatggtaaaaaaggttgtggaggagagacaagtggcgatgac

SEQ ID NO: 11497 - DNA, 521 bp, Arabidopsis thaliana columbia
atagttccctttttgggatcatatatgtttgatcagttcggtattagtaaactatcttattaaccggaccaagtcttgttcaattcaatacaattcttcggtttgtattataaaacaaaccggtctcataaccttaaaatgaagcccccaaaaatagtccaatacaacaaaaccaaagccaaagccttcttccaaaaagacagtttacaaaaacaaaaacaataatctcaacctgagcaacaaccagaagatttaacagcagtaacatcatccttatttccgatatcaatggtttgtcctttaggtaaagacatcggatctccagtaccatcaagagctttacggctcattacacgatagatttgagtcaagacatgagtgaaagcttgttcgacatttgtagcatccaaagcagaagtctccatgaaaaacatgttttctctttcagagaatgatctagcttcttctgtgggaactgcacgaaggtgacgaagatcggctttgtttccaacaagcatgat

SEQ ID NO: 11498 - DNA, 497 bp, Arabidopsis thaliana columbia
ttgcatgaaacaacttaattagaagtatgcatttaggatttttattattattatcgaaaatcatattatactcaaacgatatcaaagattattacacgttctaccatcttagagattacaacaatacgattaaaagcatgtagggatgcaacataagaaaaacaaaaatagaccgacgatgaatccatgagatttcggagacaaatattgagaaaacataacacgagaaagcactaaaatacactatttttttcctcttaatttgatgacattggtttgtgaatgataatggatcggagcacaggagaatccaaaaccagagtttgattttgcatttgttgatgctgataaaccaaactatgccaacattgcacgagagactaatgaagctggtgaaggtaggtaggaggaatcatagcgtttgataacactttgtggtacgggtttgtggcggagaaagaggaaaacgtgccagagcacatgagggtgaaacagaa

SEQ ID NO: 11499 - DNA, 507 bp, Arabidopsis thaliana columbia
gaaacgatatcagtgaaaatctcgatagcctggttaatatcccctgcgtggttacatgctgataagacatttgtgattgtgatgttgtctggtttaagacctagaccttctaagcttctgtatagagcgattgcttcttttaagttaccatataatgcatacgccgagatcatggcattggagagaggcaactcgctgtatagcttacttccgaaaaccttctctgctttgtttatatctccacatttagcatacatgtcaaccaaagaagtttcaatagaaaccaaagaggaatgctgtagatttcttatgatgtatccgtggattgttcttccgatatgcaatgatgctagatgtgcgcaacgagagagagcgacagtgatgctaaatgcatttggtctcaggcccgattcttgcatctttctaagaaacagaattgcctcctcactgcaaccattttgaaccataccattcatcatagtcgtccatgagattagatttggaatt

SEQ ID NO: 11500 - DNA, 560 bp, Arabidopsis thaliana columbia
gtctttagtagccataaaactgaatatattgtgtgatatggttatctttggcaggaggtggtggcccaatcatgcgtgatttgtgggctttgaagggtctgatagatgaaggttcatccttaatttcttaaaaatgtattgaatctagtaggttacctcttaatttgtccacctttcccggtgtattgatcatattgtggtttacctttattgtggaagaaagagcgtgaaacacctggatggacccaactcaagcttcctggacaagcaccatcatctcgatgtggtcatacagttacatctggaggacattatgtatgtgtgttcagcttttgtttgctccgtgttatttctgtaatcaagatgctattcatatgtttttgctttcgagtatggatgggttgatgcgacctacatcactcacatcattgaatttgtttatgcagcttctgttatttgggggacatggaactggtggatggctgagtcgttatgatgtttactataatgatactataattttggacagacggagagttttgctcactcttctcatgaga

SEQ ID NO: 11501 - DNA, 626 bp, Arabidopsis thaliana columbia
gattctccctcagatatctcaaagaaacagctcaaagagattctacgatgacaatcttggtggctctgttggtctagggattgtagccgcgctcgagaactcaaacactcgtcgaatcacgagcgtttgtagatcggaaccgaaccaacccggccggtctgatccggttcagttcatgagccatggtggaagcacggacggagaagacgaggagatgttcataatggacgaggaggattacacgttggtgacatgccaccatggaccaagtggatcttgtaatacaagggtttatgacaaagatgggtttgagtgtttctcaagtaagatcaacgatgatcgtcgggaaagacttttcgtggtcgatgtcgttacggaatctccagagaattcgccagagtttcagggtttgggttcctcaattcatgttacttgtgcaggaagaaacttcatggtcaagacatatttatttacaggtataacttgggagcatatatataagtatttttatactatggtcgtatctttcgattgcttattgctttttatatgcagaggagaaaaagcattttgcagcacagagtgtcgatcgagtcatatagcaaatgatgaaaggaagagagatg

SEQ ID NO: 11502 - DNA, 536 bp, Arabidopsis thaliana columbia
tccaagtagtgaaggaccaaaagaacacacccttacggacactaaaacaaagagattgggacaaaagcatcattcaatgaacatattcttatgacaaatgttagttttttcagtgcctagtcgtggaaagtactaactgctcaattagcttctgctgcaaccaagctaagtcgacgcaatcaaagctatatacctgtggatacatcatatatatggatacataagaataagcatatttacacaatagataagcttacactaaaaaactctacaataactccaaatatgtaaccgtacctcgacttgtatagtgtacatgagcctctcgttgactcgtgccgttaaagagctgatgacttcaagtccttgcccgtgaagaacttcaagaactcttgagagtggccaagcctcgagacctgatgctaagctgctcacaaccacctcgaagccgctcacacacggttgcaccatgacactagctggttccgatctacttgatccagatccggatccggatccagttagactagtagggc

SEQ ID NO: 11503 - DNA, 491 bp, Arabidopsis thaliana columbia
taaactaagctagaactgacatagtcaactataacttcctcaaaacagggaaacggatccgaccagaggaccagtaaaaatcgatacttggaatatgaattaaggaaaccaaagccaatccaatagcattcaagcccctatagactcaaaagagttgacaaagaataaaaggagagattttcaccttccccttgtgccaattctgatgatagcagttcgggttttctgttcaacagcaacacaagctttcacgaacccagaagagctttgtttccggcgacatttacctaaagctggagagctaatctgcggaagagagaatccgatagcggagaccgagccaagggagcaggtgttgaccgggaagaaagttgacgcgtgagaacgactttgtgagcttgtgagagagatgacgaagccatatccatggattcaggtggaggagcagagtgaagtgagatttggacatcgttgggagagatgtagaggga

SEQ ID NO: 11504 - DNA, 547 bp, Arabidopsis thaliana columbia
cttcgactgtttactttccctgcattgcttaaatgaagagctaggtctcgcagaacatcatgctgtgtcacaaatatatcatagtggcttgcgtacaaagagccaagcctgcaaattaatgtaacagtcataatttcagaagactttttaaaccttacaaaaagtgaactaagtacaagttttatgatccctcaccgtggatccttcccaagagtaaggagattcttgtgtgacaaatcaacaaggatggcaaaagcatttccttcatctatatcatgtaactcaatccaaatgttgatgagaacatcaagaggaatcttcctgtcttcagggaaggcgccaagatccaagaaacaatctttggtcgtctggtcgagattgtctagactagcttccatttgacgaagcaatctactctcgtgagagtcatcagcaggttcacgttttgataactctgcaatacgcccttccagtacatttcaggtttgccatttaatgaagcacccgtgactttgagagctaaaggaagcgctttacagtcattagc

SEQ ID NO: 11505 - DNA, 424 bp, Arabidopsis thaliana columbia
tatcacaataaaatggggtgagaaaaaatgtgagttatcatgaactcattgatatgtcaaaacacaattcaaagacctttctctcctcagcaaaacttggattagtgaagaaggtttcgtctactacatcgtttggtcccaacttggtctcaggcgcaagaactgcggccatggacgatgttaagatgaccctcttgacagaagacactttagtgcaagttcttaggacgttaatagtaccattgacggctggattgatcagctcaacctgcaaattccagagtacaaaaactattatatttagatgtggattttcatagtaaattactaccgattgtgttgttccgaacaaatttatatcattgaggaacctgaggatcagtcttgacagtgattgcaaccggtgaagcagtgtggaagacag

SEQ ID NO: 11506 - DNA, 571 bp, Arabidopsis thaliana columbia
  unsure (1)..(571): unsure at all n locations
nnnnnnnnnnnnnnnnnnnnnnnnnnaatgtcaaaagcacaaaaattgactttattaaagctaatttaagaagttacatgatacatcaaataatcaaaaacagagtaaggcacacaaaaaatcatactagcttaagtccccagctgatatcctcacaatgtctcacatgaggaactagtgttcccgtgtcaatacccgttttcgctttacaatcatagaatggaggcgagtggaaacaaggctccatcgacatagcccgaccacacgaaggatcgggagttgtacggttttcgggtctatagagtatccaaggctttaaacctccaagaccttgagctacatatccaaatgtagaccaagcacttgtcacaagattatctgtcaaactcaaaagatacatttccgcaagagctttgccattatgcatctttttttcggtctgctgataaccttcttggctcggctgatgaacacgatgatttcccagttgatgtcggatattccaatacatactctttaagttctcgcgtaaccgcgttcaagatgtgacaagccggctttgtgtttgggg

SEQ ID NO: 11507 - DNA, 539 bp, Arabidopsis thaliana columbia
cgaccatcctggtctgtggttagcacttagcacctttctaagccgttatctggtttgcgtgatccgtgtatcccccctaaaccggtatattggtttggttacattgatattgatttttcatttgaatccttttttttaattgattttatgattcgttatagatgaaaatgaatttattattcccaacaatgcatatgccctaaaatttctagatacctaatctggttagaaacttgcaaactttgattaggtcgtcgttatccaaagaagaaaatatcacaagaaatcattcatgtttttgcttatttattgctatcatacattcattgcatgcatgtaggggactctctctcccttcttctcgactctctgactcaatcaacctctataaatgtaaaacgagtcagaaggaacaaagacgcacatcaagaatttaaatcactaaaatggattacccatgaagaaggtaaaaatctttttcaactacctcatggcgcatcgcttcaagctctgcttcttaccattaatggttgctatag

SEQ ID NO: 11508 - DNA, 614 bp, Arabidopsis thaliana columbia
caacatagaaaaaaagattaacgacccttgaagactgaatctctcggagctaattgttcatgtttcttctgagagctaaagacagataaaggggtcacaaatttttggtgaaagttaaaaatgattcttacttaattcattcttttattgtttcttctacgtccttcttctttttatttgtaatgtcacggcttgataactattcaacacgtaatgtcacggcttgatttatctgcaactgaattcaagacattttcttgccgatctaatcactctttttgattaccaaactctttttgtatatgtggagcgtcaagcgttagggcacccaacccaatcagcatccgaataggcagcaagacagagattcttagagcgagtcatgtgaacaccatgggtaatggttccgtttatgtatcggagaatgcgcttcaaagcagtgaaatgagattctcggggatcatataaggttaaacaaacctgttgaacgacaaatgagatattcaggcaagtgaaagttaaatactgtagagctcctgcaagacttcgatagactctgggatcggactccgatcatcggagactgagggaccattatttgtggcaagtttttg

SEQ ID NO: 11509 - DNA, 526 bp, Arabidopsis thaliana columbia
tctgtttttcctgttcgagccgatgtctctttatctatggtttattgccaattagcttctttgttcatttctttgacaaataaaaaaaaaacttctttgttcattgatttttcaatatctgtggttactctattcatgttcaattttgctttgttcattgatttctaaaaccctgattcagtatttatttttattttgtgtgattcaaatacgtggtcagatccttaacttgtgtatttctggttttgtctactactcttgaaggaaaatcctgaagaaaccaattgtaacttgtacactgggaaaatataagtgttcctgaggagtaaaagaggggaaatagagaaggagattagtcgggttaacgggaggcatagcgtctgggaagagtacagtgtctagcctcttcaaggctagtggcattcccgttgttgacgctgatgttgttgctcgagtaaggacaaacatctctctgttctacttgctggaattcttttgaactattgtgtcccgttgctagagagat

SEQ ID NO: 11510 - DNA, 505 bp, Arabidopsis thaliana columbia
ttaaatttcctcagaaaaatatgatatattagattgtggtgatagcctagatgaatctaaatagttgaatatttggtcatgcagtacattgggaatgtacatggagatgaacctgtagggcgtgactcgttattacgccttgcaaactggatttgtgataactataagaaggatccattggtaagtgattattgctttttgtaattgcaccatgccatggccatgaaagttgttcactcatcttcaataaacttgcctaagaaaaaggttatgtgcagatactgatttttttatgctggtatgcaggcccagatgattgtagaaaatgttcaccttcatataatgccatcagtgaatcctgatggcgtttcaatcaggaaacgtaataatgcaaatgatgtggatctaaatcgcgacttccctgatcaggtgattgtctgatgacgcttttgacgatcatagattttattttcaccgatgctgtgattttcatgatggtagctag

SEQ ID NO: 11511 - DNA, 500 bp, Arabidopsis thaliana columbia
ccctgcagttgatgcaaaagggttcaccgcatttgacacaacatctcctaacttgagtgtcttgagtagaagatatatagagctctgttaccgacattaaagccgagcacctcgggttagggcaataaactctgtctgacacaaaaataaattcctctgcaatcctttgttcccacatcgcttttagttttaggtgtcaaaagattagcacagcttctaaatgttagcttatactcgcattgatcatgaggacatctcggtacacatccctcgagtagcctcgattctatatgttgtttaacgcaatccacacagaattggtgaccacataaagcaacagaatacatctgctcagctttgacatcctcatcgaaacagatacggcaaattgcaggcatatgtatgctgatttcaggaactcctgcttccattgcaagtttataaaaagacttattttgattttcagtcaccagaactagtgggatgctagatgttgattg

SEQ ID NO: 11512 - DNA, 372 bp, Arabidopsis thaliana columbia
gcatttatgctgattaattacagaggaaagaaacaaacagaagattagactacatgcataaacagagcatcttcttagagaaacaagacacgatggtaaacaaaaccggagctgaggcattacctgagtaactctgtccacaagacagtcatcagcatatgtccctttgagtacacaaggtagtctttcaaatcgtggatcttttgcaatcctaaccaaatataaaagtaacttattaagaatcgacaaaaatgatacaattctactgaaaaactcttctttgaagtcaaaaagctttacctcagagctacacgatacttctgacctaactgctccagctgcagcatgacaccagtggtaatacaaggagtg

SEQ ID NO: 11513 - DNA, 514 bp, Arabidopsis thaliana columbia
tgatgaactagaaagagagattgaaactatgaagccactggtgaaagacatgctcatgtcttctcaaagcagcgacaaggagaagattcgtctaatccatttgctcgttagcctcgggagctcttatcattttgataaggagattcaagatatccttaaacacagtttcacaaagttggatgacataatagttggggaagatgatttggagacaatctccatcatgtttgaggtctttagactatacggtcacaagatgtcttgtggtaagaatatcactttccttgattcgcatgcatgcatgcagcatattcataaaaggacatatgtatttaattacttaacagtatataatttggctatacggttttattgtagatgcctttgatagattcagaggtgaagatgggaggttcaaggagagtctagccaaagatgttagaggaatgctacagttgttcgaagtcgcgcatctaggaacaccctctgaagatataatggacgaagcatcgag

SEQ ID NO: 11514 - DNA, 582 bp, Arabidopsis thaliana columbia
atctcccttgtgttttatgtaatggaacctcccatggaggagcattctaaattagcatcaacttcatcattctccatagttacaataaagcatgctttacaaaaggattgtgaaagtatcgctttaatgttttgtgggagaactttctaagcttggcttgaacttactctattttatgtacccaatacaaagaaacgagtaagagacaagatgcataaaatatcatcatggcactgcttccagtttttcccacaacctgaaagctcttctgatgactggatcagctgaaaatccttctgcgtaatccgcaatcgcgattaacaggctactcaatttctcaccattgtcctgtacatttcacaaattatcctctgttactaatctttctgttttcagttagtctattgtagtagatgtatatcgtcatacaaatacaaacctctggtttcttaaaagtaagatctttcgtgtcgaacggtactatgtaatctgggagatcagaccgtaacagtgcctgccattaacacaattcatcatccctacccttgtgaacttaacaactgaataaatgaatgaaagtat

SEQ ID NO: 11515 - DNA, 497 bp, Arabidopsis thaliana columbia
caaatgtttcaaaagtcgaggttccggaagacttccagagacagggacctgtatccgtacacagtcaagtgagccacgctttgcttgagatgtgcaattccttgctgcagatttctgaatgtttcaacggaatgaggagaggcagaagaaaggctaacaacgtcaaggtcaaggtcatgataatcttcttctatacttccatctgatttcaacgaagtgacaccaaaattggttgtatctctacccgtccatgaacttttctcttcaaatgagtagtgatcatggattggtacaaaaaggggataccattgctggcagaaaaacaaaacaaaaagatcgtttaaatctctaactctaatggagacacaaacagttcctgtcatgtcaatgttaagatcagtgatcctatgtatctttattactctaatgaacaaagtcgagtccctacctaagacaaaaagctcccaaatatccactagaaaatggccaaagatctc

SEQ ID NO: 11516 - DNA, 549 bp, Arabidopsis thaliana columbia
catacccagaaatggtaaaaacttcacatctgcttaaaagagtaaaaaaggcaaccccaccacgaacacaaagaatgaagattcctattgcacctttattgatgaacaaacaaacacaaacatgacattgcaattgaacagagtttttgtatagagagtttacccatgaatatgtcgaactcgaaattggcatcaatgggagtgtttatacaaatcataaggtgcccacaatgtgtctaaaggacatggaagcttggaatcgagtcttaaccatggcttaccactacctgaccagtgaagcaaactcacaggaccagaatgcaaatcacggcaactacctctaacattatcaccaccaagcccatgttgattccaccgatgtgaaatcggagctacatgaccagcaaataccagaagaaacggaggaagagaaccaagctcataaatcctctctatcttctgaatctccatccatttctcaattcgtttcgtgaacctaaattgcaccacttcttcaaatcaatcacattacacagtattgaagtacaa

SEQ ID NO: 11517 - DNA, 506 bp, Arabidopsis thaliana columbia
ggttacttactactactacacattgtatgattacagagtccagacttaagctgtttttgtgttcatcaaccaactattacagtcgttaggttttattgtatttataagttatataacatatatataaaacagatttatctcaatgaattaaatcttaaaatttttaacctgacgaccatggtgatctactgtgttggaaacagaaaggaaactgatcatttgcaaagtaagacgatatcttacttttatctgcatccatgttccatatagaatccaatgagctttcccatgatggtgaagctagatttgggtaacttaagcaatggctttgttctgagtagatgtctttaaccggttttattatgtttactgctgagtgatcaatctctctccatatatcatccaacgagtacacgtcttcgttttcttgattcatctctctagtggatcgggaactccagtgtcgtaaaagccacttccctgaagattacgcgagtggacgatgt

SEQ ID NO: 11518 - DNA, 428 bp, Arabidopsis thaliana columbia
ggaagaagtttagagagctcagggaaattgagaatggctgaagttcctttgatactcatagccgccacgtcgtgagcacgcatagccatctccgccgtcggaaaagtcccgagccagattctcgatttcttcctcggttcgcgaatctccgatacccattttccccagctcctcatacggactccacgatacacgggctgcttattattttccttcttctccttgtcggaagacgaatccgccattggtagtcagaaagtttagagctttttgtgatgccgtccaagtgttcgacaaaatgtcaaacagactgaagtttttttttattgggattttttgtagatttgggttgttgttgaaagaaatattataaggcaaaacgagtgagacattttcttttggggtgtaaagagttttataaaagatag

SEQ ID NO: 11519 - DNA, 1220 bp, Arabidopsis thaliana
cccttggacgaaattagtctcacctgccacgttactctttgataccgaagacccttcaccttgcacgtagtaatgttgttgaaacctaatccaaataccaaacaagtcttataatcatatcttatttctatccatttatttgtaagggccgggaaaaatggtatattcttaccctatttgtaaaaagggttcggtgttgcaatccaatacattaggatgagaaggctctaccggaaattcagaattgtttggatccccggccaccgatgccgccgagtttgcccataagtcttgaaaggttttgaaagcatggccttccgtttcaaactattgaaaatttatgtttagttaagatccaaatgtcataattaattatatgagaagttataatataattttgcgatgtctagaaataaaaaccttaatcttgagttgtttgtttatgtctcctagttgcctctcctgccatttcaaacatagattgattgatatgcatatatgttttgcagtttggtatgaaacatttttatataacttgcctttttcctaaggtcttccatttcttccatcataacttgtgtctgcatattttagttgaatgttttagttatgaatatatttttaatgaaacaagaccagtctagatcatgtgaccttgcgctgtcgagtcgcggtaagagcggcttcgagctgcctctcgagcgcttgcagttccttcacacccatttctccaagatcttctccaagcaaattccttttataattagcaattatcaacacccataacaatagatttgtaactatacatatataatggaagatgacaataacgatttaatttcaaggggttatagaaaactcttaattactagacctgttagtacgaacaagagattcgtatttggatttaagctttgtcacctcctgacaccaactctgcaccatatagattatatgaaatgcatatatatagtaacatgagaatttgagaaaatagagttagctagaatcattatcatcagaaacaataattgtaaatatattcaaagtacgtacacacacttgcctgtgtagtctcttcaggcttattattgcttagagagcagttgtaacaacgattataccgttcgattgtgctttcaattctacaaattcaattaaaacaaaaatgggagatcattagctcgattcaacaaataaagattcttcttacgacaaga

SEQ ID NO: 11520 - DNA, 500 bp, Arabidopsis thaliana columbia
ttgtaccggctaggggattgagacaaggggatccgttgtcgccgtatttgtttgtactctgtttggagagactgtgtcatttgatagaggcgtcagttggaaagagagaatggaaaccgatagcagtgtcatgtggggggtcgaagttgtcacatgtctgcttcgcagatgacttgattctctttgcagaagcttcggtagcgcaaattaggatcattcgtcgggtgttggaacggttctgtgaggcctcgggacagaaagtcagcctagagaagtcgaaaatatttttttctcacaatgtgagtagagaaatggagcaattgataagtgaagagagtgggattggttgcactaaagagctggggaagtatttgggtatgcaatcttacagaaacgaatgaataaggagacgtttggagaagtgttggaaagagtttcagctcggttggcgggttggaagggcagatctttgagcttggcagggagaacactctgacaaa

SEQ ID NO: 11521 - DNA, 494 bp, Arabidopsis thaliana columbia
tggtatcggcctctctaccgtgccttcaggttcttatttttcatccctaggcactaattttgtgtaggaaagtgttcgtagtatttttatttttccatatatccatattcaatgtttctctttgtgttgaattcctgcagaagtgatagtgcattcaactttggatggtttttcttgttctacatagggactccctagttgtttgctggtgttagtggcactgtggcagatcttctgcatagtttataacagacttgcctaaaattcatctgctttctgtttctggctacagctccacatacttttctgcctctttgctgcagttgctcctcctattgtcttcaaaggaaaatcacttgcgtaagtttcctcacaagctttaagacatcgtctagagtgtaacacagttaatgttcaagtgtctgatgatcttgaaatatacaggggcatattacctgcaatagatgtgttgagcgctcaggcattggtcgggg

SEQ ID NO: 11522 - DNA, 304 bp, Arabidopsis thaliana columbia
actcgagtgtagttacatgacttcctaggctagtatacttctcaagcatttatgtcgcttgacttctatgggtctagagattcgtttggcaaatacgcatatgcgcgtatgcacaattacatttgcaacaacaacaggatctagtgaaggatatagcagtgagagattactggagagactctctatgacagtatccgaggtagtgcagtgcgtaacaccgcagactgtggaccaattcagatatgttgtactctttgatccgagcacaagatggtgtaacctaaatggaacatttcaaagtctg

SEQ ID NO: 11523 - DNA, 1100 bp, Arabidopsis thaliana
tttctaatgaaattattttatcttcatactctttttccactcctttcaacaaaaatagttaaagatgtatttcattatattatcaaatgggaattgcttaagtaatgttcatttcctaaattatacaccattttatggtcatttacccaaattgcaaaaaaatatctttgagcagccagccatatcctccgaaagcttccaagtttaatttgtacaccacaaaaagataaaagaaccaaaaaagtaacatcttcttttccagatatggtctgtagtctgtgctattttgtaaatatgactccatactagatttgtgtccctcaccaaatcggtctcatcctagaaacataccatttgcacacaaattattcatacagatataaccgtacaatatttgagataggccccatcgacgtcgtttagctcaaagcaagaagggagagagagagtcagcgagcttcgttaatggcggatgttaaggactcagtgattaccaagtacggaatcgtagggattggtatgatgggaagagaacatctcatcaatcttcaccatctccgtgaccaaggcctcgccgtcgtttgcatcgccgatcctcaccctccttcacagctcctggccattgaactcgctcaatcttttggatgggagcttaaggtattttgaatttaccagaacaatcaaccttaggagttaggacttacttagagcggacccttttgctgtgttttctatataatgttctggtgcataattgtttgattcctagtctttgtacttgataaaaaaatttcataccttgattgtggaagagcttaggatttgagatttttttttactttgttgtggttaaggttttctcaggacacgaggagttgctcaagagtgagctgtgtgacgttattgttgtctcttctccaaatatgactcatcatcagattcttatggacattatcaattattcaaaaccgcatcatgttcttgttgagaagcctttatgcaccacagttgcagattgcaaacaggtcttttttctcttcttttctgtttggtaccaaattgatcaattcatccaactttgtctggaatcaggttttgga

SEQ ID NO: 11524 - DNA, 600 bp, Arabidopsis thaliana columbia
gttatatagtataatgctgttaaagggttgaaaaaagtacatgagagaatctaaagatagctaagatacaaaaaagacatgagttacttcatgtaagattgtatatagagaaaaaaagaagatataaaatttaatatggaacgacatatctatacacagaagaagaagatgttacctatcaccaacaagtctgtgcattcgaaagatgagatcttcttcttgttccgtcatattgataaactcccatttcacactatttacctctgcattttagttagttatatttcaatcaaatatgaatatcaatgaaaattggaggacgtagctaagttaaatggatgattataatttataaactaaattaaagagaaacctgcggtatcccctagagtgaacttggattgcttacgactgcgaaggtgacgaagacggttggtgttatccattggtatttgaaagtgaaagaggacaaataatatacaactgatgattttggagttggagaatgcaatgaaaaaaaagtagatgtgaggtagagaaactatatagaaaacttgtgacgaagagtaaagagagagatatagaaaaggaggtccaagc

SEQ ID NO: 11525 - DNA, 585 bp, Arabidopsis thaliana columbia
tgtagcggtcgatttttaccatcgttataaggtaaaatattggatgccagacgatattctttcttttgatttgtaactttttcctgtcaaggtcgataaattttattttttttggtaaaaggtcgataatttttttttggagccattatgtaattttcctaattaactgaaccaaaattatacaaaccaggatgacatcaagttgatgaaagagctaaatatggacgctttcagattttcgatttcgtgggctagattaatacccagtaagtaaatttacattattactatatacgttcaataaaaattaatatctatttaaagattttggtgaatctctgctttaacttttggtactatttaaaaggtggaaaagtaaaagatggagtaaacaaagaaggtgtagaattctataaggctcttatcgacgagcttgttgctaatggtaagttaactaatcaaagatattatgcgttataatatcttatattatatgttctaatgaacaaacatatgcaggcattgaaccatcgatgacctctaccattgggaccatcctcaatcactggaagacgagtatggtgg

SEQ ID NO: 11526 - DNA, 566 bp, Arabidopsis thaliana columbia
ggtgggtggaagatttatgcgagcttcacatcgatttgtataaacaagccatcaaagcaatcaagaaccgaggtaaagtcccgagtaacgttattggagaagcattacatgcttatgcaataagaagaatagctggttttagcaaagagtccatgcaactcattgatagatctttgattaatacaatcatagagcttctcccggatgagaaaggaaacatttcctctagcttcttgaccaagctacatcgagcatcgatctttcttggatgtgaagaaaccgtgaaagaaaagttaaagaaaagagtcagcgagcagcttgaagagacaacagtgaatgatatcttaatgtatgatttggatatggtgcagagcctagtgaaggagtttatgaaccgtgatccgaaaactcactcgaaagtatccgtggcaaagctcattgatggatacttagctgagaaatcaagagatcctaatctccctcttcagaacttcctctctctcgctgagacactctctagcttcccaagacactctcacgacgtgttatatcgcgcaattgacatg

SEQ ID NO: 11527 - DNA, 417 bp, Arabidopsis thaliana columbia
  unsure (1)..(417): unsure at all n locations
tcaattgaactagtagattatgcatcggttgagttaaatcctcggatatgagagatctttgaactaagacctgaagccctcgctgcacgtttgagaatttgtgacgaagagtatcttcaaaggtatgatcaatgccttcgtcgttaaaaaaacatgctatatggagaaacaaatctttgtcttcgtcgtccaagacatcgtaactaaattttaaaatgctccctatttctccgtcaaggcgaatccgtaaccttggtagttccctttccaatcttccttggacattccccggaaatgagaaccataaccctaagtcccaaagggagattaccagcaagtcttgtaactttcgtagcaagcttctcgaaaccatcatcaggggaatcatgaccanaagcatggatgcagaagatttga

SEQ ID NO: 11528 - DNA, 515 bp, Arabidopsis thaliana columbia
agagctcgattacttacactgccaaaaaccttaagaaagaagcaaagaggaactcctcaagtacctcctgaagaagaagaagacggagaattggcggtggcggagactctgaggcggagggaatcagaagagcgagttcgggttggttgacggaggagataggagccgccgtgacgtgtggtagtagtagtagtgagaaagaagagatgaggaggaggagaaagagcggatgaggcggcggagacacggtgaggcgatgagacggaggcaataccgatgcctatcttgggagacgcagccatattttttttgattgccttacctttaccagagaccatacaattgtctctttggctttgcagttacaaaataacatcccgattttctgttggcgactgtgcctcacgcgccatcagcagtatctctttgcttccaagtccacaggcttagatgatttcaagcgttggactatatgtgatgaagcgactgaacggtggagatgtgttttgactgag

SEQ ID NO: 11529 - DNA, 475 bp, Arabidopsis thaliana columbia
agaaacaagtcgtccttatataaagccaaccacacccctttagcttctctcaccatcatcatcatcatcatcatcatcatttctctctatctctttctaaaacacaaccatgactgtttcttcatctccatgggctctcatggctctctttctaatggtttcttcaacaatggtaatggctattcctccacgcaaggccattgatgtaccatttggtcgtaactacgtcccaacttgggcttttgaccaccagaaacagttcaatggcggttccgaacttcagcttatcctcgacaaatacactggtacaattactattaccaaatctctgcctaatgatcacaatgcaagttttgatattcccattttttatttggtatataggctaaagcttaatttttaaaggttaaattttcttgagtttaaaactacatttcatttacagattaagtaattagcattaatcatctctatt

SEQ ID NO: 11530 - DNA, 758 bp, Arabidopsis thaliana
  unsure (1)..(758): unsure at all n locations
ctccaatctggatctggttcctcttcttcttggtctcttctccatctcatcggagctgatctcgaattgttctccgttcatttgttacggtggagatgacatcggatcaccgcgacgctcttttctctctggaactggaatcgcctgatccggacgaaggaggtgtagcagacggaggagaatctgataccgacgaggatttgcgcgacaacgatgatgttgttatgccgggaacgaacgaagctgaagctgaagacgacgatcccgaagaggaagatctcaattctccgtctacatcatcactccccatggtttctacgatctcagcgactgctgttgtttccgggaccccgacggcgacttcctctacaggcgccgtgaccgttgcacttccggctggatccgccgtccctgtctccgtgattcccgttgattccgatccgaagtggcaccgtatgacggagatcgtccatcagagaccaccgatcgatgattctagacgccttttccagaggctgtggacagacgaagacgagatcgagcttcttcgtggttttctcgattacatgacgatgcaccgcggaagagcatcgcatccgccggatacggctcngttttatgagcagataaagtcgaaacttcagctggatttcaacaagaaccagctggtggagaagcttcggagattgaagaagaagtacaggaatgtgatgagcaagatcagctctggtaaagaggtatcttcaagagcctcatga

SEQ ID NO: 11531 - DNA, 536 bp, Arabidopsis thaliana columbia
  unsure (1)..(536): unsure at all n locations
agagtctcccccgcggccgccagtgtgctctaaagtgataatgtcgtactggaaaatggcggacgcatggatgtgctgaccggacacacagccactaatacccgcgtggatgatggcggaacctcggatgtccgcaacggtggcaccgccacaccgtatccatgggaaatggcggtgtactgctggccgattccggtgccgctgtcagtggtacccggagcgacggaaaggcattcagtatcggaggcggtcaggcggatgccctgatgctggaaaaaggcagttcattcacgctgaacgccggtgatacggccacggataccacggtaaatggcggactgttcaccgccagggggcnatcactggcgggcaccaccacgctgaataacggcgccatacttaccctttccgggaagacggtgaacaacgataccctgaccatccgtgaaggcgatgcactcctgcagggaggctctctcaccggtaacggcagcgtggaaaaatcaggaatttttcagacgttccggggtaattat

SEQ ID NO: 11532 - DNA, 240 bp, Arabidopsis thaliana columbia
agaacaacatttgcagtttcgacaagtgttaacacaactagctccatccaaatcatcccaaagagtcttcaaagtagtatagtaatcagataaactcatattgccttgttgtaaactccaaatctgctgtgtcaactgataagatcttggtaagtttgcgatatgacatcgtgtatccaaggctttccgcatttccgcagcatcattgaatcagatgaatactcttgtaaatttgctttg

SEQ ID NO: 11533 - DNA, 395 bp, Arabidopsis thaliana columbia
gatttctgatgaaaggtatgagatatgagtgatgtttctcaatgggaaatgtgtttatcctctcatgtgttattgtagaaatgttttcatacctttagtaccgtcaggggaagcaaccaatcctctgaaaatgcagttgccttcttcgtccttggatgcgtatccagcaataggagtacgtgatgagccatctaagcatttcaagaaaagctctctcgcatgaaatcgctagtcttgtattcctcgtggttcagtgaggctaagtaagttgcctacagatgtaaaacaccagtccgatcatttactacaaatcatagatgccaatccaaagatcccataaatagaaacatcatccgctaatgtaaattccaagagagcttgacataccattttat

SEQ ID NO: 11534 - DNA, 581 bp, Arabidopsis thaliana columbia
gcatgataggacaatttggtgttggtttctactctgcttatcttgttgcagagaaggttgttgtcactacaaagcacaatgatgatgaacaatacgtttgggagtctcaagctggtggttccttcactgtcactagggatgtggatggggaaccacttggtagaggaactaagatcaccctcttccttaaggacgatcaggtaaggaatcgtagctttgagtgttttggggattgtttcttttcttttggtgttttctgtgttcttacaagtgtgtttattcatgcagcttgaatacttggaggagaggagactcaaagacttggtgaagaagcactctgagttcatcagttaccctatctacctttggaccgagaaaaccaccgagaaggagatcagtgacgatgaggatgaagatgaaccaaagaaagaaaacgaaggtgaggttgaagaagttgatgaggagaaggagaaagatggtaaaaagaagaagaaaatcaaggaagtctctcacgagtgggaactcatcaacaagcagaaaccgatctggttgaggaagcagaagagatcctaaggaagagt

SEQ ID NO: 11535 - DNA, 545 bp, Arabidopsis thaliana columbia
tcaccatactcattagcgtggctattaaggtactcagttgactcctccaaaacaagacatgagttcttgttgctgctgttggtgatggtattggacaagctgttggaactgaggagagattaacgtggagccatcaataggaaacccaaagcaaccattaccgagactcgaagcagctcctgacgatccgaagaaacctccagtggaaataggacgagacgtgagtggactaatgtgagtgtgttgaccttcgtaggttgtaaccacagtgcttggatctctgaatgatctctccactctcttcttcacgttacatgaagccgttgtgcaacggtagtaactcctgcaaacgaaacaccatttacacaaaatcaactttggttcacaattaagtctttctttggacactgtaaacagtagtaaatttaattagtaaacactaacacccaaacattaagaaacaatgggacagtgctagatcaacaaattaacatagtgcatgtcccaagagcaaatcaaaaaagaagaaccaaacaacaaggaag

SEQ ID NO: 11536 - DNA, 586 bp, Arabidopsis thaliana columbia
cctgcacttttgagctgtccagttctgcagaatcatcgtcttgtttctcagtctctgcatcaggtttatcattgggcagggaggttgaatcagagccgtttggtggcaatgagtcctccacttctgatttttctggttctgttggactatcgtcttgtttctcagtctccaagctttgagcttctgcagcagcgggtttaccattggatagggtagtcatatcagaggggcttggtggcgatgagatcctcaaattagttgaaacaggtggagcataaggataaggagtaggcagagaagacatggccaagcccgtattgttataagggtttagcagcattgagtgatcaaatttgcagtttgctccaaacttgcaaaatccgtaggccttgaagttaccacatgctggctgtccctgaacacagcaaaatgagagaaattagtgtcccaaagcttgttggctttaacagaataaacagaacgagttgcggaaatgtcaagttggcaaaaaataacaaagaaggacaagagacttactggtcttgctggaagacaatagggtcaagagagttggtggtgattgtac

SEQ ID NO: 11537 - DNA, 639 bp, Arabidopsis thaliana columbia
caagatgggttcggaaaagatgcgcaaattcctatatgtcagttaaaacggacattagtaaagcatatgaccgcattgaatggcgtttcttagaagaagtgttgcggaagaaaggatttgctcatcaatggataacttgggtaatggaatgcatcagatcagtctccttctcggttctaattaatggcagcccatatgaaaatttccaattaagtcgcggtttacgacaaggagaccctttgtccccatatctttttattttgtgttcagatgtgttgagttccttaatgacacaagcaaatgcggagaaaaagattcaaggcatacaggtgagcaatggaggacccatgatctcgcacctcctctttgctgatgactctttgtttttcctcaaagcagatcagaaaaatagcttaaatctcctaagtatctttaaggagtatgaagccgcttccggtcagaagattaacttagagaaatcttctataacttttggcaataaagtttccagcatactagaaatagtataatgagtactttataaataccaaatattggagggggaggtaaatacctgggtctactggagcaatttgggagacagagaaaagaaatgcttgactacataaaggaaagaat

SEQ ID NO: 11538 - DNA, 627 bp, Arabidopsis thaliana columbia
  unsure (1)..(627): unsure at all n locations
tcaaaaccatgaggatatgcatctatgatccttctatcgtgtgattttcgagtttattatcctatgtgctctctctactttgaggtccattttgtcatatgtctgttactaccgtttgaacatatagaatgcggaagaaaacttactggcatagtaactcgcagtcaactatgctgtcaggcccagatcgtcgagccttcccacttgagcgaaattgacggaaagcgagtgggttcagacccgcaacatgaggaacagcatccactagctttttctggagagactgtaacctccggaatgtgacctcatccagtggagcaatgcaaccaaaactgccgtctagagtaccaaataacaaagcaaatcgatttattttatctgctccagaagaaaccatctgcagacgtaggaactttgacacatgggcaccaacgtgaaattccgcccttgaaagaagtttcagacccttccagctctcaatcatctttggtgcataataaaatacctgttggggatcagtccaagtcaatttaagagttgaggtatttcacaataatccatcttctacatataactgtataagtaaggcatgatntcaccacgtaaacactatatgcgataagagaa

SEQ ID NO: 11539 - DNA, 906 bp, Arabidopsis thaliana columbia
aaatattaagttgatgtgatgtaccataaaagtacaatcatagaaaagcgtaaggataacgattagtagaaaaaattgtggagacagttgactgagactgttcttagtgggagataccccacaatagtccacgaatgtgaagtgtattgcatttgcatacttacaaagccacaacataattgttgtcccctctaaatatataatgtccctccccatccgttgataagtgattttacctccacataaaatattttacataaagataagagttatatatggaataaaaggtagtaaaaagttaagtctccaaaaaacatacaagttcggaataaaagtagagtcactaaatattaaaacagacataaattctaacatggacatcaaacacgaagagcttcaataaactcctcatagatgtctacagcaaatctcatcctgagatcttcaacggactcctcagttatggagtcatggctaatggcctgaaaatgaagctcaataaacttcacaacaagcgggccactgtcatctgcatgctcagtttggaagacctcagggagacgatcataagcaaactcaaggggcacttcatttgtcctcaggtcttgggggacaagcgactttataataagcggaatcaggacaataaaaggtttcatcaaaaccgtccatctgtttggcagtcttcgagtcagcgatagggtctagcacacctatggtaccctctttctgatttatgacaatggaaacgcagtgaccggcagtgagatgtaaaggagtgtacaagatgtcgacatcagcgaaccaagcctatcggatgctacggccagggacgatacctttcacatagtcccagatcttactgttccacgaccagtcagatttacttttggccttcttataacg

SEQ ID NO: 11540 - DNA, 347 bp, Arabidopsis thaliana
taatgttccactagcaattgaactacttgatatcatgagtctgccaaatcgactggagaagtcagatttagggtctgagcatcaccatggaattataaccgaactctttataaaaactcttctcccttgagaagtaagaatgaaacgggcaagctatagagtgagattactacacaggagaagaaacgaatctgctgaaaatgcagccaccggtaaagttggattaagtctctaatacatccgactcctcttcttctcagtctttaaactgatcttgctccgcctcgattgtgccttatctcttgaacctgagtttccaaaactccttcttacagatcttggacttg

SEQ ID NO: 11541 - DNA, 562 bp, Arabidopsis thaliana
gatatcaagtagttcaattgctagtggaacattagcatgaatctcattcattaacgatatcaatgtaaggagtaacatttatcaatctcattcgaaccataagaactgtaaaatgaaggacaaattccaaacagagactacatttatcaataaattaagccgtgtacatatggaattttagacattgataactttcttgtcaaaattttcccccacaaagcatagaattaagaccacaacaacgaacacagatagcaacatgtctggatagtatctgcaagtattctcctcacttgcctatgtcactttgttttggaactcagatgactcaaagactctagcagtgttatcgacagataccgaaacaatgaagtccgtgttggtagagactgagatggcctggaccgcatcttggtgaccatggtaggtatggacgcagttgcctaataagctgtcccaaatgctcactgtaccattggcacagccagtggctaagtacttggaggttcctaccaagtcagagatgtcacacttcctgtaacgaaaaaagaagaagagagga

SEQ ID NO: 11542 - DNA, 572 bp, Arabidopsis thaliana columbia
  unsure (1)..(572): unsure at all n locations
aacccatgtaactctagtacaatcatcaactacagttagaaagtacttatatccttctatagactctactgaaaaaggtccccatatgtccaaatgaactaagtcaaatggattagaagacacattattattaaaaggaaaagacagacgcttctgcttagctaaaggacacacagaacaatgatgaggactagctaatgcagacttattaagagaaagacaatcagagagaagttctaacttggcagttgagggatgaccaaggcgttggtgccatagattcccatcagctgacaaggatccacagaagttgatgacactagatgatgcaactggtgtattcagggattgaagattgaggatgtagagattgtgatgaagattagcactcccaatcatccatccccgagaacactcctgtaaaacacatgatgtaggataaaagtgagcaaaacatttattatctcgtaaaagagtactcacactaatcaaattaaaacganatgatggaacaaacaaagcattgtgaagaccaatgaatcagatacatgaatggtgcatgtatgagtgat

SEQ ID NO: 11543 - DNA, 647 bp, Arabidopsis thaliana columbia
gtaacgaccgccagatcttgaggctcaagaaaacgtctgaaacatcatcatcactcatcaaagattaattaacataccttgcaactgcaaacgaatcatcaaaccgtaacagttcgagaaagcacaaagacaggcgacttgcggaatttattcacaagcgagagtgattggaccttcccccaaatttcaccatcttcacgtctctccaacgccacctctacgcaccaaacatttacttccccgtaataatcaaacctagcctggctttgataacatcccaaaatcatcaacttcccaccaaaattcgtcattctagactcactataaacgaggttaggcaagtaatcaacacccatgacaggtctccaacccatttctcttggatcatacacgacaatgggagttacatgaaggtgatccggaacaacggcatacaacaaattatcaaccacacaatacaacacctgccagaaataccccaattgatttcctgcaggtccccaatcttcccatctacgtcctcttagatcgtaagccacacgattgttacatccaaaatgtaaatcttattatcaaaacgaaatgaacattaaacggtgctttcgacgaccatagggggataatcactaggcacatttcccaagtat

SEQ ID NO: 11544 - DNA, 424 bp, Arabidopsis thaliana columbia
gtttaatatattttattgttcatacaaaacacatgccaccgacatctgacttttaaaacagaaccagtaatcatcgattcattattatttattatagtttccgtacgaaattaaacttccttaaaaaaaacctagtttccttgtgcttcttcttcatggatcatcaacatagctccgattcacctatgcatgaatccacaacttcttcttcttcttcttcatggagtttcggcaatctaatcaaaaccctatcgacaaaatccgaatctgtaatcggatcctaccgtcgcgatttggtcgaattcggatccgaattgaagaaagaaacctcaataatccgacgagtagcttcaagattacctgactctctcgaaattggcgcctccgtcgcttcggaatctctcgaatcggtaggtcaagttat

SEQ ID NO: 11545 - DNA, 541 bp, Arabidopsis thaliana columbia
tttcaatacactgcatagcaatccagctaaaggaacattcatggtatggacaaaaaatttacctgcaatggcgctctgctgtcctggcttatcctcaagcaatttcatagacttctgaagtagcttcaatgcttcctcaggttcatctacagactcataaatagcagaaatctcagttaatccaccagcaatctcctccacagttgtcccaggcaccggcttattgtatatcctcaacgcattctcacagtaagacttagactcacgaagtttccctgttctatggtaaagctcagccaatctaacaaacactgacgcaaccgtcggatgagtctctcctttagaagccttaaacacagtaagagccttctgatatgaaaacacagcttcatcaaaccggcacagcgacatgtaaatattcccaatactaacatcaatcgatgcaacctcagattcttgtccactcgcaatcatagccatactagcaagaacaagatgctcaagagcgttttcataatctcctttagcctcgcagataatt

SEQ ID NO: 11546 - DNA, 524 bp, Arabidopsis thaliana
gggtctagaggattacgggataatgcgtgatccgaccacatacaaagaccctgacaagtttatgccagagaggtttcttgtggtggaacaagatacagagagaaagatgggttactaccagcaatatatgttggaattaaaaggccaagatgtgaattatcttgcgtttgggagcggaagacgaggatgtcttggagcttctcacgcttctctggtgttgagtctcacaattgggtcactcgtgcagtgttttaattggacggtgaagggagatgaagacaaaatcaagatcaagttacctaccggcttttcggcttcagggactgctggaggaagctcacttatgtgttctcctgaattatgttttgatccatttggataccaaactaagtgaatttctgcagataaacatcattaggaatttggaatcatatgtactgtgctctgttttatgctctgttttatgttctgttttcataagcttaccagttaccactattgatggaaaaaaaatgtttcagtta

SEQ ID NO: 11547 - DNA, 440 bp, Arabidopsis thaliana columbia
tctagaggatttcttctactcgtcggtaccaaagtagcgatcaccaaactcacccaagcctggtataaccctgaactcttcgttcagacactgatcgatttctgacgtcacaatcttcaactttgggaaccgtttgcagacgcaatggattccttctggcgcctgcacgatgcagaatcgattgtaagtttttgactgagagatagagagagaacattggttgatttaacactcactgagataagattgaggaatataatgtgggcttcaggtactcctttctgtatgagtagttctatcgcctgatttgcagagttaccttcaagatatcatccaaagtggaaagattcagaaaaaaatatacttcaaagcagaagaaaaagaaatagaaataactgaaattacctgtgcctaaaacaggatctaatagcaggacatga

SEQ ID NO: 11548 - DNA, 459 bp, Arabidopsis thaliana columbia
aaaaaaaatctatgctaaaaagattgaatcaattctaaaagttactttagtaagagtctcttcaaaagattagtattcacatggaagatctccaaattcttccttcaagtgaaatcacaatcacagaaacatcgtcatgatacctccgacgatctccttgtggtatctctagcaattcatgaaagtccatacctaaaaaaaaaaaaaaatgcacgtgagtttaatcaaagattgcgtttcgaatcttaagtgcgtttgcgttttgttcttagtattaccatatttcttggcagctctaaggaggacttcttgaatgagatgttgagcaggatcgccttcagggaagggtgagatgaatgagtgaacctcgaagatggcttcctcgttcgagaagtattcgtatagtccatcggatgagaggattaggaatttgtcacgggatgagagtctatggtggtg

SEQ ID NO: 11549 - DNA, 908 bp, Arabidopsis thaliana
gaaatgcaaccgaatccagaccttgtccgagccatcgccaaccgctacgccgcgaatctccgcctctgtttgccgctccgacgaacatctctgcagctcgcgcgagcgtccatggaaatatcattactttcgggtttcagccacgtgcccatatcctgaaccgtttgattgatgtttattgtaaatcgtcagagctaaattatgcacgccaactgttcgatgaaatctctgaaccagataaaattgctagaaccaccatggtctctggctattgtgcttccggtgatatcaccctcgctcgaggggtttttgagaaagctcctgtgtgtatgcgtgatactgtaatgtacaatgcgatgatcactggcttttcacataacaatgatggttactctgctattaacctcttttgtaagatgaagcatgaaggattcaaacctgacaacttcactttcgcaagtgttctcgcgggtttagcgttagttgccgatgacgagaagcaatgtgtgcaatttcatgccgcagctctgaaatctggtgctggttatattacttcggtttctaacgctctggtgtctgtgtattcgaaatgtgcgtcttctccgtctctgctacattcagctagaaaagtgtttgatgagattcttgagaaagatgagaggtcgtggacgactatgatgacgggttatgtaaagaatggttattttgatttaggggaagagttgcttgaggggatggacgacaatatgaagctggttgcttataatgctatgatttctggttatgttaatcgtggtttttatcaggaggcattggagatggtaagaaggatggtttcatctggaattgagctcgatgagtttacatatcctagcgttattagcgcgtgtgccacagctggattgctt

SEQ ID NO: 11550 - DNA, 583 bp, Arabidopsis thaliana columbia
  unsure (1)..(583): unsure at all n locations
tgcaacatacgattgcgtacattccaaacacaccagctagtccaatggatttgagcagcacggggagactgtaagtgtacgattatgtcacagatccagaaggtgagtgcgcagatggcgatgcagattccgcggactcgagttggaaaaatctctgaacagaggatgtttggagcaggaccgaaacccatcacgaagaagcagaagtagagcacaacgcttacggttgataagaccgcgtgcacaatgctgttcatgtgaacaagatttgagattactaaaaccaatagagatgctatcaggattggtatcgtggtgagaagcaaggtcctgcaaatataaaataaaagacatttcataacgcattttagcttgtttcgtttatgtgtattgtaagaacaaaggaaatttaagttttaatcaccttcgaccagaaagatccatgagcctcattgcaacagctattgcaggtaacatcacaaaggttgtcaatgcacttataagtaaggatgctgaggaagaactaatcccatgttcgatagtaggatccgacacccgctgncaaggatttgcggtgtgtagt

SEQ ID NO: 11551 - DNA, 511 bp, Arabidopsis thaliana columbia
actatataccaccaagagaggatgtcattatgcagaacgaagcgccggatgatgtttacataattgtgtcaggagaagttgagatcattgattcagagatggagagagagtctgttttaggcactctacgttgtggagacatatttggagaagttggagccccttggttgccgaccacaaagctacacgtttcaaactaagtctgtatcacagcttctccgactcaaaacatctttccttattgagacaatgcagattacacaacaagacaatgccacaatgctcaagaacttcttgcagcatcacaaaaagctgcgtaatttagacattggtgatctaaaggcacaacaaaatggcgaacacacggatgttgtgcctcctaacattgcctcaaatctcatcgctgtggtgactacaggcaatgcagctcttcttgatgagcgtcttaaggctaagttcagccctgacattacagattccaaaggcaaaactccacttggtaccgttttgc

SEQ ID NO: 11552 - DNA, 579 bp, Arabidopsis thaliana columbia
atccccggcaagcagatacacggactagctttaaagaacaatattgcagatgaagcaaccactgaaaatgcgcttatagcttgttatgggaagtgtggggagatggatgggtgtgagaagatattttctagaatggcagagagaagagataatgtaacttggaactcaatgatctcggggtatatacataacgagctccttgccaaggccttggatttggtctggtttatgttgcagacaggtcagagattggatagtttcatgtatgcgactgttcttagcgcgtttgcttctgttgcaacgctagagcgtggtatggaagtgcatgcttgttcggtgagagcttgtttagaatctgacgtggtagttgggagtgcacttgttgacatgtattccaaatgtggaagactagattatgctttgaggttttttaacacaatgcctgtaagaaattcatattcttggaactctatgatttcgggctatgcacgacatgggcaaggagaagaagctttgaagctttttgaaactatgaagctcgatggccaaacaccacctgaccatgttacattcgtggga

SEQ ID NO: 11553 - DNA, 598 bp, Arabidopsis thaliana columbia
tcttaactcctgaatataatggcctagttgctgagccccaacgaacaaagcatcagcagccagaacaactccaaactacaaacatgacatgagagaagcagtcatgaggaacatgattcacaaaagaaagaagctacaagagattttgattaaaaaaactcaccagacgagcagtatataccaaacggtacccccaaccttctttcgcagcttgagctctttgctggtctgtccaactgcaagtaaaaagatgtatgagcataataccaaatgctgctaatgatgtacaagatagagctaggctattgacttacagtcattataaataaatacaggcctatccattattctcctcattgtcttttgagacttttacttttcaagctatgagaaagtctgagtagcaaaagagagaattacccgaggaactctgaaaaacctccaataccagcaagcttcaagggttggacaccttctgtcactagatcctgctatcacataatgaatgaattagttatcgatgttgtagaatcttgcaattcagaaacgaaactgaaaaagtataaagcacaaaactgaaagtttaaacaatcgtata

SEQ ID NO: 11554 - DNA, 503 bp, Arabidopsis thaliana columbia
tgagtgagtttcactttgctatacttttggcaagattattttcaaaagagacactttcatcttttttttcactattcaacattctttaatacaattttgcccttttttctttatttctctttttcatttttattatctttttactatcatttttatgcggaagaggatacgtttgaatgagattacactcaaaatgccgaatatacagttcgctcgggttattgggttgcaacacatgaggatcttcttgaggaggaggcaatacaacccccacctggatcgactgaagtaaaacaagcgatttggaaactccatgttgccccgaaaattaaacacttcttgtggagatgtgtaacaggagcactagcaacaaatacacgactgcgttcaagaaacattgatgcggacccaatatgtcaacggtgctgtattgaagaagaaacgatccatcacataatgtttaactgtccatatacccagtcggtatggcgcagtgcaaacat

SEQ ID NO: 11555 - DNA, 445 bp, Arabidopsis thaliana columbia
ggagaatctacattctatgaatcttttgctatacatggctccaatggcggcttgtatcttactaccatttacgctatacattgaaggaaacgttttaagagttctaatcgagaaagcgaggacggatccattgatcatcttcttgttagccgggaatgcgacagtggcatatttagtgaatttgacgaatttcttggtgacaaagcatacaagtgctctcacattgcaggttttggggaacggaaaagctgcggtggctgccggagtctcggttttgatatttaggaatccggtgacggtgatgggaatagccggatttggtgtgacgattatgggtgtggttctctatagcgacgtaggaagagatcgaattgctggaccagaagtgaaaagtgtgaagagaaagattattggatttaaaccggtgaagtaattattactttgt

SEQ ID NO: 11556 - DNA, 567 bp, Arabidopsis thaliana columbia
  unsure (1)..(567): unsure at all n locations
ccacgttcttcttcactgtttgacaataagctccaattttcagacttttcatttcaaacttgtgggtctcattttcctctggcctatataaatccactatcctccacttctgtctttcatcatcattccacatatacaaaatatcttcttgctcattattcatcatcaatctactactccgtaaactttgcttcctctgtctgtattagctcagaagagatatgggaagtactccgactgatttacccggtgaggatgtcgccgataacagatccggcgtcggcggtggtatttctgacgtctacggtgaggattccgccaccttggaccagcttgtcaccccttgggttacctctgtcgctaggtgagtcaacccacctttagatctcaatcatacccttttgttttactttttgtgatccatcacaattgcttcagctaagtaaagtttgcttttttaagtttctaaacttaccaacttctgtgaaatatgaacttagtgtatctcnatgttaaagttccgattccctctgtggggcttatagtggattgaaatgcttctgtttt

SEQ ID NO: 11557 - DNA, 544 bp, Arabidopsis thaliana columbia
tatgcaattcaagaaccaactaataattggttttgaaacctagctaggaagatatatgcattgcaaatgctactagatatagtgtttccaaaataaaagtaacttacgcaattagaccaagaatccccatgttgcatagaattgaaaatgtcaacggagggagagatcttgatctgtagagataagtctatgtaagaaaaattacttaatacttaacataaaacttgaaacagaatcgtgagaatgaagaacctgaaggagaagaatgtaagaggaagaagaagaagagatccaaaagtgtaagagtatacaagaaccacaaatgggctaagtcctttggacgtcgctgctttgaccagagtgtttactcctacgttagaaaactctgtcaccaccatcgccgtcaagatccagccatctctgttacataaccttccatgaaccattttttagttcttggcttcttctttcttctaagcgtctgtctctctgaaatgtgtatatatattacgtcatgggacttgatgggaaaagcatgtgaaca

SEQ ID NO: 11558 - DNA, 212 bp, Arabidopsis thaliana columbia
  unsure (1)..(212): unsure at all n locations
nnnnnnnnnnnnnnnnnnnnnnnnnnctaaagccctgatcgtcatctgtatcaccgccgtagtggcgcgctggtaacgagaaaagacctctgtgaggttcacgtccgaactggccagacggaggttgctgttttcacggctcacgaatccgagtaagagcaaccgcggggagtgatcccataagcgctaacttaagggttgaaccatctgaa

SEQ ID NO: 11559 - DNA, 428 bp, Arabidopsis thaliana columbia
gaaccacttcccttctgcaagtagtagaagaatgttgggccacatgatcgttatacacgtttacaaagttgagctctttagatttcttgatagccacgtctctcagaagatcatggattctacaagacatcacttttcctctttctcttctcactgcttcaagtaagcttctatctatcagctcttcgatgtagtaccgagccacatcttccatcatcatctcttcatccccttgtataaaaccttctgctacaagtaagtgtatcaacttctctaggtcaatctcatagtcctctgggaagatactaaggtacagaaaacagagtttggactcatgccgcagctccttgaaacttagatcaaacacaataggggcaacatgaatggagtcatcctttaggcgtctccataaactgttacaaacatca

SEQ ID NO: 11560 - DNA, 676 bp, Arabidopsis thaliana
tacagaataaggaaggcctaaaagcagtaaaggagagagacatattcctcctgagtctcgacctgcttacagtgagtttcatgatgaagccacaatgtgcatttttcgattgaaatcgcttaaagaaggacaagctcgtagtctcctaatacaagcagtccgtcaccacactgctcaggtaaagcttatgttcaaatttcgtctgtttgtttcatttctcatgaactttggtgatcgtctgttgtgtttctgacggttctttcttatgattctttatagatgcgtttgtttcacactggactgaaatcgctcgaggcagttgagcgtcatgtaaaagttgctgtagagaaacaacacattgactgtgatctatctgttcatgggaacgagatggaagctagcgaggatgatgatgatgatggccgatacatgaatagagaaggagaactcagttttgattacagaacaaatgagcagaaggtagaagcttcttctctctctacaccatgggccacaaaggtaagttgatttgacggtaaagcgataaatacacacattacctataaaacttgttcttatgctcttctctttttatctagatggatgatacagacctctcgaatcctcgccttctacaacaagaccagcagcggtatgttttattccaatatttgtg

SEQ ID NO: 11561 - DNA, 482 bp, Arabidopsis thaliana
tggagaatgtaattcgatgtctctctcgtttagctttgggtctcaagatgttcattccttttgatctgttagcattggagaaatgcttaataaacgtagcttcaacacgctcaacgagtctagtaacctcatcagagcttccaaggtaagagttatcaatcattttcatgtaagactttgaagcatgccttgaagttatctgtttcagaggaatttcatcgaacacctttcagtcatacttcaaaaaaatccccaaattcaaaaacctctcaaacctcaaaccaaatctttaccttatcatatttcttcaatatcttcgaaaacgctaattcattcaaaaagctgcatcgaatctcaaatccatcaatcataaaactccatgaaccagctttgatcatccaattcaacaacatatacgagtacgtacctgtagcttttgagtaccgaagcttctggtaaaactcaacgaaggcgcgtctgag

SEQ ID NO: 11562 - DNA, 524 bp, Arabidopsis thaliana columbia
tagaacacctcaactaattgataagtaggtagttagttactatatatttaatcaaagatcaaaatgtgacagttgtagtaccatctccttataaaagctatcttactgcaataatcttgtacctcaaggtacccaagatttctcattccttcttctaagtatagtaataaaggataccatgctttaaacttttcggggactattaaacttcgaggttgtcaattgattaaaaccttatactgaactgaagtaacactccgtcttatctaggagacctagttaccgcaaaaaaattattttctttagtaaatactcgataaaattaaagaccactctattggattataaactttattcatgtctgttttaatcgtcatataatttcgtccctaaaccatgaaacatctcttgtgaaattagaatattatatgaaagtaatattctttagataaaagccgattgtgtttccgaaataagatccgataggactttttaagtttttgtcataggaattaagatattat

SEQ ID NO: 11563 - DNA, 1036 bp, Arabidopsis thaliana
catattcttataaatttcttaagagaactaaaacgaacaagattatattaagaacatgttggtactagggccttactgaattgaagtatatgggcatccatgaaagaatcacaaagaaaccctggaaataagtcattaagtcagttcaaagaattccaacaaataggataacacctgatcataactgtaagtcacagtagttggtactaacaatttcccttccacaagaaatcctcatagtaacaagaatgaaagagttgtattgagaggaatctgtatacatacccagctatgcatggaatttgcaactataacagcccaagtcggcatcttggagagaaggcgtccaaaaggaggtattccacttgtgctaattcgtttgttctccatagtagatatttgcttcttttgctttatatactcaagttcagactttgtaatctgaggatgtcgatctggtgcacttgacgttgcagagagccacacgagcaaccaaaggaaccccgatagtccaaaaattacaaatgggccatatatacctccttgagacataagaataggagacaacatgagtcctacaacattcccaagctgaaaccctgccattgcaataccaaccgccctagaacgttctgttgggggaaaccatctacatcaaaagtactatcactaagaacccaataaacttcagtaaccagatcatgtgtgtgtctctttatcacatttgaagcagtaataaaatacaaagcatcactacctcgcaaccatgttgttcatacaaggaagagccactccttcagcaaccccaaccatcgctcttgcagcaagaagagcccacaaagaactatcagccgcccaaggggtaagaaaagttgccaacgaccacaaagccacaccccacgccatgactactttaccaccataacggtccaccaaagttccaccagcaattggagaaattaagtatccccatagaaacgatgactaccaaagaaacattcaagaaactatgagacgaacgagaacaatgattaat

SEQ ID NO: 11564 - DNA, 514 bp, Arabidopsis thaliana columbia
ggtttgagatattgaaaacactaaccgcacgactatcagtggcaacccggagataacgaacatgaggaggaatgagataatgatctctgctactagtgcttgtcctgatgaatcagttggagttgttccaaagaaagctttgggtgtcacattgaacattagtctcaatgttaaactcgctagtaatgaccccgtaagttgtgcacctatatacaatggtacctgtccggccaaaacattatacaattagattcgttgttgcaaagaaagttttggttgtcacgtgaacgcggaatttaatgtttgaaacagtttagagcttcttgaaaaaggagatagagatcagagacatttacctgataccaaggaaaccgccggaagacagcgaacgtgacagtgacggcagggttaaaatgtgcaccggaaatgtgaccagtagagtaaatcatgaccataacaatgagagccaggtcacacagatccctggaaatgttagtgttcctccgtacaagac

SEQ ID NO: 11565 - DNA, 506 bp, Arabidopsis thaliana
cgtaaccattcgaacttgctaggaccttccttgcctccaaaataatctccaacccccttgagaacgcagccttcaacagcatctccagtaattcgaacattacttacagatggaggcgctgccaccagaatttaaagttagtaccctcagatcaggaaattcacagacagcggcattagtagtttaaaagatgaaaaataaagaaatatacaaataacaaccactacactacatgaatcagttttatcatgcaagttaatcaatctgaaaacagttgacaggaatttacactaatccatagataaaattagataaataagattattgctatcgtaaagaattcaacaactattcaaaagaagcaagcaaccacagagactttgaaccattagtcaataatgaaagcaaagaaacacaaatgacaatgctatgcgaatgtagtgaaaaaggaaaagatactatctattagaagttttttccatctacctgcttttacgaactctggg

SEQ ID NO: 11566 - DNA, 898 bp, Arabidopsis thaliana
ttctaggctaagaagaagctatggtggctcaatctgtgatttctccattggtggcgaccgctttttgcattgcatagcgaggagaatgtgtttgatgtctgggagactccgccttgtccgatcatataattcactaccttaatactctggtttgcttttgttcacgtttagtttgcttgttttaatagagtccttagaaaactacagagaaaagaatagcaatagacaaagacaactatagcaatagactgatgatcttagttttgttctatacaaagaaagtgttgcttcttactaagaaatgatatcgattttatacgattttatgtctcttacaccgatcaacgatagccaggtcttcactcgatacagagttcttagtattagctgtgttttattttattctcgttagacttactaagctgtttccatggtggtccaaaatctcaacctcagcttctttaaggttttttgaggattcgttaccttagtacatgtgagtggttgcaactgctactgtcttttgggggcagttaaagtttatatcttcatttcgcttttccttaaagattcaagattttagcttttagtttttggaaggaattttcttttctcatttacactttccgggaaagtttgtggcataacaatgtgagctaccacattggataagctctgacctttaaagaatctagttcacttcttaccatcactttgcaaaatcagtctctaccctctctgttccatttccattcttaaaagctatattctcattcaagaatattggaaatctgatatgttaaaaaaaaagatggaaaagcttacctaaccgttgagaaaatcaaagactccctcaaggcaagtacaatcagctcgagtagtcaaaagcaatgtagtt

SEQ ID NO: 11567 - DNA, 590 bp, Arabidopsis thaliana
tcgctggaccaaaaggtatctggatgtctaaataggaagtggtactggcattaatgtttgttgcgattgcagtttctttcagctgagcatcctctgggagctcaccttagagcggcattgcgaagagatggtgaacgttgtggatcagttcccgtttctgtcattgctacagttgatgcaaagattaacagtcgttgtaaaattatcaatccttctgtggagtcagatcctttcttggccatttcctatgttatgaaggctgctgcaaagttggcagactacattgttgcatctccgcatggactccgaaggaaaaatgcatacccttcagaaatcgtggaagcactagctactcatgtatctgattccctacatagcagagaagtcgcggctgtatatataccatgtatcgatgaggaagttgttgagttagatactctttacatttcatcaaaccggcattacttggatagtattgctgaaaggctcggattgaaagatggcaaccaagtgatgatatccaggtgattatattgtcttttttctattagtaactggagctttcttggtgttaatctggtatgaaagta

SEQ ID NO: 11568 - DNA, 792 bp, Arabidopsis thaliana
tttgttgctattaaaacaatgatttactctctatctcacatttttttttttgtttcataagataataaaataatctgtttttgacttctaaacgtttttccttgcggcttcaacttccatgcaagctagatcattttatacggtactgtaccaaaaaccggattatgaaattaatttccggttcacttaaatctcacgttaccgtagtctcaaccaaaccgaaattttgaatatgtagtgaaagttagaagtcaagagcacatggaagcaatccaagaaggaggctcgagcagagctgggctaatggaagatgatgaagaagacgaagacgaacaaaacgaaacctctgtggtatctaccggagcaatcgataatgagactactacgagcaggatgagaggagcgagaccatctccgatcgatgtacttggtcgagttaagatcaacaacacaaaagagacacctcgttccaccattaaaggagttctcaaagtatcaaaacagacagatttaaaattcagcagagagaatctgatgaaagtcgaagagagtctcaagcgtgctttcatcgagttttatcagaagcttcgacttctcaagagctataggtgcgtatgggttcaaagtttgagtctttttatgattatgattgatgggtttttgattttgatattcgattatgttttgtgtagttttttgaatgtattggcgttctcgaagatattgaagaagtatgataaggtaagctttgagatttttgagttgaggttttttgaaggttttatatgaatg

SEQ ID NO: 11569 - DNA, 590 bp, Arabidopsis thaliana
tgttctagagagcatacgaatgggttgtgtgaattctaggcataggccttttagaagaaagtcaacaacactgaaagagtcatcagaggagaaacgttcctctcggattgattcgtcgaggaggattgatgattggattcaaccggaagatgggtttgatagattgagtaacagtggagatgctaaagttaggttgattgaatccgaaatgtttagtacaagtaggtgtcatgatcatcagattgggaagatattagagaatcctgcgacagttgctcatatggatagagttgtgcatgatcaggaattgagaagggcctctagtgctgttgtagactcggacttggatattgatccaaaggttgttaaggccaagctagatagatggaatagcaaagattccaaagttcggttgattgaatctgaaaagttgagttctagcatgttttctgagcatcatcagatagagaagggagtagagaaacctgaggttgaagcttcggttcgagtggttcatcgggaactgaagaggggttcaagcattgttagtccaaaggatgcagagcggaagcaagtggcagcaggatggc

SEQ ID NO: 11570 - DNA, 841 bp, Arabidopsis thaliana
ctaaaaagaaaaaattgatctcactaaaaaattccggtttataaaagctatcatcgtaaccggatcgccaatttgaaattgatgaatttatatatctcccgcgcgtttggttacagtgaatcctcgagctcaagctcacatggaggcaattcaagaaggaagcttcagcagagaaaacgaagacgaagatcacggctccgtccgcggacacaccggcgacgtgaaaacgagcagcttgaacacgatgagaggtgcgaggccagcaccaatcgaagttctagatcacattaagatcaacaacactaaagcaacacctagatccaccattaaaggcgttctcaattcctcaagccaaaacgagatcatattcaatagacagaatctaaacgaagtcgaagagaaactcaaattcgccttcgtcgagttttaccagaagcttcgtctcctcaaaagctacagttttttgaacgtgttggcgttttcgaagatattgaagaagtatgataaggtaaagatttggtttaaagtttgagatttttgattttgaggttgttttgaagtatgactgaaaggtgttcgatgaaatgccaaacacagataacttcgagaaatgcttcaaagtcttacatgaaaatggttgataattcgtaccttggaagctctgatgaggtaaacttgactagtttagtaactccattgattcctctgttttggactcctctgtttttgacctgctcctatattgcagcttatgaaactcatacaacgtgttgaatccacattcataaagcattttgcgaatggtcatagaagaaagggaatgaacattttacgacctcag

SEQ ID NO: 11571 - DNA, 421 bp, Arabidopsis thaliana columbia
ttcgagtcgggcaaactcatgtttgaactgatcaactccgctgtgatagcaagattgagtcaccaaagtaagacacactatctccttataaagaaacaagtttattggaagaatgagtcaaaccttgggtacagaaaatgggagtgtatgttctcttctccttgtagagactcttacaacatctgtggctgatactccaaaatctgtttcatatccagagagagaactttagaaataagttttgagagatgtcctagaactcaaaccatacttttcagtctcataagatcatgatgtctttatttacctctctgtacatgagttccctcacgtcatcgcgagtcgaattcctccactcaaactcatactcaagtttcgagataggtcgctcgatggttcatagccacatttgccaatcctt

SEQ ID NO: 11572 - DNA, 581 bp, Arabidopsis thaliana columbia
cacaaatggatggtttaatgataatgactacacagtgctccaaacgtttttgttacttaactgtgacgcctttgaactttgtgaatggtatgacttttatagtatgtaatattcacatatataatattttaacgctaactacaattataggatgttcgaagagtatatgacggagcaaatcctaagaatttctcctaaagaaatggaaaaagtgaaagacaactactttgctgaatggtgtaaagactatgtaagtataattagaaaataaatattgttaattaatataatatgattacgtactttataattactacctataatgtggttcaatttcagattaacgatgccacaaaatcttatcaatttccattatggatgttggatttcgtccaaggttctaaccgtaattatacatcttggcctatataccactcacgaggatattgtcttcacacgcataactatggaaaagataagaaaactcaaaattacggtgtctatgttcgtggaccactaacacggattattatgggttgatagaagagataatgatgattcaatatcatggtgttgttggg

SEQ ID NO: 11573 - DNA, 450 bp, Arabidopsis thaliana columbia
attatacgaaagagccactagacaagtatataatctacagccataccatcgcagatacaatccagttccacccgtaacaatgggaacacgccctctattaagaatatctttggtagcttgccttccatcatcataaaattgccccacagagtagtctaacaaagcatggaaaaatgtgtaagtttcttcctttacatacatcagtatcagaagcatctacactagtggcatttgcaatagcaacaaagtcgacaaataccttgagacggatgcaaaatgtcgataagatgatgaggcaccacctgaataattcgtaaaacatacaactttcaaatacaatgtgatcacgaacggcaccatcgtgagatagtcatgaataaatcttaccaaatatttcagaaagatacctttctatcgctatctgatggcttggctgatccaacatcaagg

SEQ ID NO: 11574 - DNA, 1234 bp, Arabidopsis thaliana
ctgaacattttgtaggatcttatggaggaggatcatataaaccttatgaaactacaaaaccagcaggtttgatcttttttacttgcagcttccaatgcaactttttctacagtgtctgattctcatttcctctaaaactgtcacagcttcatcttacaaagcaacaccaacaacatacagtccaaagcaatcaggtgcacaaatcgagtttcttcattccataactagcaactggatagccgggaacacaagatactataggcacaaagtgatcatcaaaaacaattctcaaaaaccaatatcagatctcaagcttaagattgaagatctctcaggacctatctggggtttaaacccaacgggacagaagtatacttaccagcttcctcaatggcaaaagactttgagagcaggacaagcttatgattttgtctatgtacaaggtggccctcaagctaaagtctcagttttgagttacaactagtgagaaaacaacactttcttcaatctttttgtttatgcttattatgagtgaaagatgtgaacatagccaaccgaagttgagcctaaatatgagaaatgtaaatttgtgacccttggtagagaatgcttttttgtctacctattcatatggcccatacttaggtaaaataagtaatgatagacgaagataacaatgattgaacacccaaagcactcaaaattgagcttaacttaacattcagacaaaaatttaaggttctgacagaaacttaactagaacaaaaaagaaacgaaacaataaaaggatgcgaagtatcataagttaacaacataagaagagacttttcttctacagacgcttctactcgtcaccgaagtagtcttcttacctgcaacatatattgcaaagccaacataaacccaagaattagtgacatgttaacttgttataaagaagctagaaaacatgaatcaagaacaatttatctaaccttggggagtaaaactaggtcttccacgaccacgatcacttcccctgccaccaccactaccaaaacgaccacgacctccatctcttcctctgccaccaccactaccaaaacgaccacgacctccatctcttcctctgccaccaccactaccgaaacgaccattgccccttccaaatccaccaccaccactgctatctcctctcggtctaggctcatcgactacaagatagaatcctcctccatatcacttccatttagtt

SEQ ID NO: 11575 - DNA, 344 bp, Arabidopsis thaliana columbia
  unsure (1)..(344): unsure at all n locations
tgtctagggaaaatcctcagttcctcataaatttagacttgatatgttgcaggtggcagactttggatctcttgaactctcacccgtcgatggaagaactctgacagactttatgcacaccagaggcttgtaaatgcattccttgggaagactggtaaccatttcacttcaccgtctttggcaatcgntttcgtcaaactagatggtagaacgtggttacgttgagaaacgcaatgctctctatttctcttaggtatgagtcttttctcgtctcttttcaggtcgtgctggctgtcaagcttcgtcatgtgtaatccctatgtgttgatgcaatgattgttcgg

SEQ ID NO: 11576 - DNA, 510 bp, Arabidopsis thaliana columbia
aaatctaatattgaaatggtcaaggagaatccatttattagtggaccttcataatacaacaaagaaagaaagaaaacgaaactcaaagagacaaattaaaagagtcaaagttcaaaatatgtactctttattttattgtgtttaataactttgtatttattataaaccaatccatatatatatacacatagaccatccaccattttcactcaaaccttctcacaaaaaccaacccaaattctttctatatattaaaaaaaaatcaacacaaaggaaaaaaaaatggattacgttttgattgttttgccacttgcattgtttctcatagcttacaaattcttattctcatccaaaacgcagggcttcaatctcccaccaggaccaactccgtttcctatcgtcggccatctccacctagtgaaaccaccggtccaccgtctcttccgccgcttcgctgaaaaatacggcgacatcttctccctccgttacggctctcgccaagtcgtagtg

SEQ ID NO: 11577 - DNA, 380 bp, Arabidopsis thaliana columbia
cttttcaaatgtgtctaactccttgaataatctctgtgttttcgatgaatgcttttagtttggtgattagatcagattaactcatctttctgttgattatctcagaatccactggccaccaagcaggttatagatgacgatggatggttcaatactggagatatgggttggattactcctcagcactcaacaggacggagcgtagctgtggaggtgtcatcgttcttgaagggcgtgccaaggacactatcgtgctttccacaggtatatcacatttgtactgtttgttgtcagcgtccacataaaccagttcctcggaaacctgaaacaaaattatgtttcctactgtctgtatgataagcatacattttaaacactac

SEQ ID NO: 11578 - DNA, 609 bp, Arabidopsis thaliana columbia
  unsure (1)..(609): unsure at all n locations
cccccattctgttcgaggtcaattctgtggagattgtttatacatgaggtacattagcctccaaccttctttgtttctgtgtttttgagtaattccttttgtgagaatcaactgggaattgagtagcttgctttgctcagcaaaatgaggattggaactgaatgttttaggttatgttttggtgattgaacagatatggagaacatgttcttgaagctctggaaaatccggactggatttgtccagtctgtcgcgatatctgcaactgcagtttctgtcgtacaaaaaaagggtggctcccaactggtgcagcttacaggaaggtagctatttcgattagtatgatccatggtgaaaattctgattttgagtccttggatagattcaaaagttaatggctttccctttgaatttcttttgttctcagatacataaactcgggtataagtctgttgcacattatctgattcaaaccaaccaacagtcagaaacaagtgaggatgatgaaactgatgctcctgcagatagtcaagcttcagaaggagatcatctcctcntcataactgatgggatcaggacaacaaattgcgacaactcgatgatgatgat

SEQ ID NO: 11579 - DNA, 321 bp, Arabidopsis thaliana columbia
cagaaacattgaaagaaacaagagccaactaacctcccagatttggtcatcagcgtattcctcaagagggtccaagttactgcgaaccgtgccttcaaacatggttggttcttgacgtatgatacttagtctggaacgcacgtcatgcagcccaatggtcaagatgtgtagtccaatgtgaaccgaatgactccagctgcaggttccacaatcctagtaagggtatgaatgagagtggatttgccacatccagttcttcctacgattcccgtcatcaggcctccccgagaagtgcatatcagcccacgcatcaccataggc

SEQ ID NO: 11580 - DNA, 520 bp, Arabidopsis thaliana columbia
ggtttggctgtattgaaagtaagctgcaagatgtaacagagttcttttgctaggattatgttaaagacatttgcatatcactatcatcggctctaaaagttcttactactgtctattagatttgcaaatctctcacagcatgcaattcagtaagctaatacgagaccaaaaaacaaacctgaagcatcatcaaatcgaactttggctgaccaatatgctctacagtgatggaaccaaagaggttccctaacaatgcagcatcaggaacagtcaaaccttcaacaagcccaacaatcaaacctccgagaaagctgtctccggcaccggtaggatccacctgcttcgccaagaacggaggaaccgtcatttcatcatccttatgataaatcctacaccgtttttcaccattagtcaccaccacacaacacaagtgcttcatttgttcaacatccatgaaaagagcttcgtctgacgaagctttcaagaatccaattcgatgcaagatgtgataaaatccact

SEQ ID NO: 11581 - DNA, 526 bp, Arabidopsis thaliana columbia
tgtaatatggatgaaaaatataacactttatttaataaataataataaaaaaactttaccatcatcacttatttattctcaaccaaaatcacaactctagtacatttagagttgtctccctttaaaatcaatctaacaccaataggtaaaagctggtgaagacctccattaatgcccccattttcctctctattactttttacatatgcacctatatatatagagacaatcatgttctcttctacattctcatttcatagcaaaacaccaaaacagagttcacagaaacatattcaaagatttttcacaaatattaccattttaaatctataaacaatgacgaactcggtggctaagttggcactactagggttttgcattctgcaagtgacgagcttacttgttccgcaagcaaatgctagggctttccttgtgtttggagattcactcgttgacaatggtaacaatgactttcttgctaccactgctcgtgccgataattcccttatggtacgattcccaactc

SEQ ID NO: 11582 - DNA, 981 bp, Arabidopsis thaliana
tctgcagtgccttgatagtcttgtatttcccccaatgacgaaaaagattgatgaggggaagaagtcggtaaagaaggtgcacaagaagtttctcgtcttatccaaggttgatagaaccatccctcctgatgcgaacaaagagttaaggaaatctcgaaccatgtttggaaaaagtgtaccactagagaaaactctcgatgatgcacgttcatacatagattctgtgaaggaagcatttcatgatgagcctgcaaaatatgccgagtttctcaagctcttgaatgattataaagctcgtaggtatggattattttctccatgtacatttgattttctcttaatttcatgtctcaatctacacaacaaacacacatgtgaactgattctgatgttactaatttctttgtagactcgatgccgatagtgtcattgcaagagtggacgaactcacgaaagatcaccggaatctgcttcttggtttaagggccatcctcctgcctgcggtaaatcaacaattcctcacaaggctaagggtaaaagaaccgcccgtcccgaggctagcagaaccatccctgtgaagcttaagataaccattattccaccaaaggctagaagaaccatcccttccgaggctgacaaacctacacacactgatgaattgaactttatgaacaagcttccaccaaagcgtagaagaaccatcccttccgaggctgagaaaccgacacacactgatgaattgaactttatgaacaagcttccaacaaagcgtagaagaaccatcccttccgaggctgagaaacctacacacactgatgaattgaactttatgaacaagcttccaacaaaggctagaagaaccatcccttccgaggctgagaaacctacacacactgatgaattgaactttatgaacaagcttaaggtatataaaatgatggtacgatgtctgatattacttacatcctttgctaacttgtg

SEQ ID NO: 11583 - DNA, 586 bp, Arabidopsis thaliana columbia
attcaacaacagtgttcctagaccaggaaccccaaaggtgaaaatactgtctcactatatagatgcacatcggttttaactaaagaaagttgggcttatacaactaaccttttagaccacaatgcaattatgtcaagaaatatttagataagcctctcgataaaagaacaaagttccaaaacaacagacttgcgagttttagttttctaatacaaaatcaaagtatcagaacgttctttgagaccacaacgcaagaatggagagagacaaattcgagcagaaaccaaaaaagataaacaccttaaaagttcaaaagatttgtcagacttttttttaacaaaaaccagaaaaggggattttaagaagatcaatactcccacttcttgagctccatgccatctggtggagtgctctccactttcttagtcccaacttctttccagtttgtcgacagtaccgtcccattcgactctgcctgtcaaacccaaaaaccaccccgagaggaaaatctcattagtcgaagagcaaagcagagttattaaccagaattttaaagaccacagatagatttgctccaaatgatttg

SEQ ID NO: 11584 - DNA, 573 bp, Arabidopsis thaliana columbia
cgcatccaagttgcaactaaaagtgtttagaaagaagcggagtcaaagaaacagtgtagcaagccagttcaatgcaaggatattggacttgcagtggcgacgcaaaatccaacaggtgataaacacacaagcaactttcatctataatatttttcttagatttctatcttttgaattaatactagttttacaaaatgcaggtacatcgctagctgatatatgggaaagaagtttgactattgatgctatcactaagttgtttgaagaattagacatcaacaaagagggtctttgccttccacataatagagaaactgcacttattctatacaaaaagtcgtatgaagagcaaaaggcaatagtgaagtatagcaagaagcagaaaccgaaagtacaattggatcctgaaacgagtcgagtgtggaaactcttaatgtcaagtatcgactgtgacggtgttgatggatcagatgaggaaaaccgtaaatggtgggaagaggagaggaacatgttccatggacgtgcaaactcgttcattgcgcgaatgcgtgttgtccaaggtattatttattg

SEQ ID NO: 11585 - DNA, 535 bp, Arabidopsis thaliana columbia
tcagctcttccaccttcgtagagacaacatgagaatgccaccatgtcctaaaaaaccaaggctttttatttatcttgtctctctaaagcatactaatactaaactatcactaaagcaaagtgattctgtaaatcaaagacaaaaacttacctcctcaaatcgaaggtggaccgagacatactttcctccggtcgccgagcttttctcaaccatccgatcgactaacttctcagctagtgttgatataggtgaagaaaacttcaatgctttgtaattagctatgcacctcaaaagttgtatatacggtggaacactcatcgccaatctatttgcgaaaggagttatccgaataaccctgaatcgaataaaacaataacactgccttgagagatataagagctaagccaagtaaagaagcttagagattaaagtctacctaccccatgttcctttaaaaccggataaacttccccgttatagtagttcacagtagcccaagcttgaacacgaatagtaggaatacttgaaacattgt

SEQ ID NO: 11586 - DNA, 562 bp, Arabidopsis thaliana columbia
ctcagacttaaaatcagaattcagagaaccttaattaacatacactacaaacctcaataaatcaattcttgccaaagataggcttaacaagacagaaccttacatcgttcctgacactagggatggccagagtctctgcattcttgataccgagagttgtcagctcccgcagtgatgtctgatacaagaaaaaaaagacacatcacttcttcactcttactgactaatcgactaatcgatggttttaacaaatcgtaaggataagcttagatagagagatcgatatacaccgtacggcgcgaaagatacggctgggagctccatttcttagcccaaccttcttcactcaatttatcgagagcttccttaacaccattactatctttctgcatcaacaaatgatcccactttcagaattatgttttaactgcagagttcatcgaatcaagaagtaaagcatgtaaaggttgtgaactgaattgaccttgttaatggcggattcgagagaactcaaatcaaagccagatgaagcagtaggagaagaagaagaagacgaaggtga

SEQ ID NO: 11587 - DNA, 535 bp, Arabidopsis thaliana columbia
gaagaaaaagacagcatttaatgaacgaaaataatattaatgaatttggaagaaggaacgaaccaacgagaaaaatcaacgaaataatttagacaaatgtagcgattggtccactacccatccaaaagtccaaatgaatacttcaccgttgataattctattcaattgttttcttctgtagaagaccatatattattaagtctctagtccattgtaaataaatgtttctttcaaataaatggaaatacaaaaaagaaaagaaaaaaaagacagcatttaatgatgataacgatttggaagaaggaaccaaccaattagagtaacaaaccaaggaggcgactcacatgaaagcaaaagctgacatggcagtgaattcagttttataaaaaaggcttcaaggccgagagttcgtagtacaaactcttctctcagtcatcacagaaaataaaaaacaatggcgaataagttcactagacaccagatttcagagtttagggaacagttcagcgtatacgacaagaatggtgatggtatg

SEQ ID NO: 11588 - DNA, 1031 bp, Arabidopsis thaliana columbia
cctgttatagtccatacctgccccgcgacggcgtaaagaagagcaataatacaaggtaggcaacaacagagggcgattccaataagacatgccagcacaacgcaaaagatggcaaagaacacatcaaatgcaaggaaaacaaaggttaacctgcaaacattaataaacataatgatgtcattaccattcaactagaagaaataaacattgagcaaaccaacacataccaatacaaatgcgtcgcgttttgcagaaggatatcaccaccagaaacaagccagtagaatccaacaatccaccagacaaatgatattatagtgttcattgattcacaagtcttagtgctgaaaataattgattctcataaatcattagtaaatcattttggctaaagaacaaaacagcacagataattgaatcgagagctaacctcagaaacctctcatcgttgtcttcatcttcactatcctgattcgtagcttgagcagcttctaaatctccaggtctgcttctagcattcctctttctaaactcaagccaaacaaggacaacatgaacaagacactgaatcgcataaccacagatccaaatcctaataggaacatttggcttctcttctttaaaaaccaaaagcataacaatcgcaacaagaacaaaagcagtgttccaaagcatatccaaagcaacaacaggtttcgagtaaccccaatcagctcgtcgctcttcaagctcttgtgcagctgtttctctaaccaccatcgaagctcctcgtcgtcctgaagctcgatttaatagaaccgcgattacaggttgacgacgtggtgatgattgccgtgaacggagaagtggtgtggatgagtcggaaccggaaggtgattcaggtgaagacatcgttgaatccgtctttgcttgatacagaattgagagagatgaagataaatctagggtttgttgtgtttcttgtacctatcagtacactcaaaagtcaaaatagagacaagagaaagtactttaataagtgtatcggtgat

SEQ ID NO: 11589 - DNA, 597 bp, Arabidopsis thaliana columbia
tttgaagccttctattctcatccgttaaagtctcgcaacatttcttcaaaaactcacaatccacttctgtttgctttagttttgttctgttcaaattaaaatttaattaaaaaatatttttatgaaccaaaataaagaaagaaaagtatgatattaaaattcacaaaagtaatcaattatatttacctagctctcctgttttggaaccacacttcaacttgtctaggccttagattcagctgtctcgcaagagcttgtttttgcttctgtaaattcatagaaaaaataattaacgatatgattaacgtaaataagaagagactgattagtttaattaaggaaataattaactatatcatacgggattaagggtgctatgaagtttgaagttatcttcgagaagagcagattgttgtttagtgagtctaagctttttacgagcactaacaccttcttcatcgtcatgatcatcactcactctcgaacacaccactctctccgtcgtctcctccgcctcttcttctccatcgccgccggagatttctctttctctctttaccattcgctcgagaaagatgagatccgctgtgggacgag

SEQ ID NO: 11590 - DNA, 571 bp, Arabidopsis thaliana columbia
aacggccgccagtgtgctctaaaggatattttggtaacgtcagacctgaccagtcgctacaaaatttcacgcaaaaccctttggtcatggcaaagtgcagacacaatgcctcggggcttcgtatgcccgttcccaccccctgactggcccggcaaccctaatcgctggcgctctgagtcaatcaaagagtgggaggataaaaagaagataaattaactgaagggctctccgatgatctcttcaagatggctctgccaaacgcggagcagtgtttctgatcatcgatatagtcatgaaggttgtaatgcgccataacccccaccatctgatgcccgagcagcttttcaattacgtgcggcgggcaacctaactcagagagatttgtggctatcgtccgcctcatatcatgaagcgaccactctgccatacctgttccattccaaatagaacgggcgtaattggatgcacaggtgaatgaacgggcgaatctttgatcccgcatcaattttacgttgtgaagtcaccaggtgattggtgtttatttcttgaggtgattctgccaggttacggc

SEQ ID NO: 11591 - DNA, 587 bp, Arabidopsis thaliana columbia
ccaataatcagaccaacctgtcagttgaagctgaattagatatgattaaattgttgctcggaaagaataaactagggaataccttatcatttggaactttaatctctatctgttctgggatccctatcgcatgagtggaaggatggcccctagcaactagggcaggtgaacctcctgcttcagcctaatgtagtacgagaagaaattcttgtaaccaaatatcttacagatacaaagatgccaaaactactgaaaaaaacaactgttaacctctgctatgactgcactgataagcttctcagcactttcaatgcatgcaacacttccaattatctccactggtcttaacgctgagctcggatcagcttctgaatccctcaaaatttggattttggcaccagagttaaactgaagataccgtatagtctcccacctttaccaatcaacacacctacctgcaaagcattgtgataagcacgtcagtgaaagtattccgaaagaaaaaaactcacagaacagccaaaaatgaaaaccaaatcatatcacctttgaacttgggacatctatcatacgagttgtcgactgtg

SEQ ID NO: 11592 - DNA, 602 bp, Arabidopsis thaliana columbia
caaacctgcaaggattcatcatctactctttaaccccttttttaactgatggcattcaatagtttacttaacacaagcatttgaaaatgactctcttatctcaccttcctaaagccatctcgatttgagctttgacaaaatatatataagcttcacaagccataccagaaaaccgagtctgcgaacaagatacagggaacggctctactttaggaacttctaatagctttgactgtgcatcatcaagccggtgaagtttcaagaatgcttctactttacacataaatagctgtagatacatataagacacagcagttaaaagatattaaagttcacaaggaaacatctaatcccacataatttgattcttacctgtggagaaaaatcagctccagaaacaatagcagcatctgcttctatcaaaactgttttccaatcagtgactcttcgcgcatcaacacatttaatcaaatgtttctccactgcttcaagcttctgcaactccatgggatctgatggtccccaagaaacaaagatgcttcttgcactattacctgacctaatctgcaatccaacaagtaattacagccagcacacattga

SEQ ID NO: 11593 - DNA, 575 bp, Arabidopsis thaliana columbia
gagggagataatagtgccattgacatgctcgttggtgatatttatggtggcatggattactccaaggtaggagtcaactttgcatcatactacatgtgatctcatgtgttataggatgtgactactctcctatatgaaactcagaatgctttattactactgttctagtgattctcattactcaatcatacagattggtctctctgcttcaacaatagcttctagttttggcaaggcgatatctgaaaataaggaactggacgattacagacctgaagatatttccttgtctctgttgcggatgatttcatacaatattgggcaggtatgcattggcgagtccaaaggattcaacgaagttcttaagcaagaataagcctaaatgtatctcatttttattcctaagcatgattccatttggaagttttgatcagtgaatgtgataagttattgagaatattatgagtttctgatttgttttgttgctgtgtagatatcgtacttgaatgcccttcgctttgggttgaagcgaatattttttggaggattttcataaggggcatgcatataccatg

SEQ ID NO: 11594 - DNA, 562 bp, Arabidopsis thaliana columbia
gggaaaaacacaaggttccacatcctcgagattcaattccagacatgaggaataaactgtcttactctccggctgagatgtgcaacaagttccaagtgaagcatatgttatgcaaatatgatatatgacaataggcataagaaatgaagtattaaggatgcccaaggtttacctcactgtaatccacaaacatcttgtttgctcgtaaatacgcctctatcatggagacctgcaatccaattcacaaatcaataccattatgaaagtctttaacacactaaataatgaagattttcccaaatgtgacattttgtgcattttcttacagtgtcatcgctcctgcctgtcaaccttagatactgcaaagtgacatgatcgactgggaagaatcccatggtcgcaccgtactcaggagacatattggcaattgtagcacggtcagctaaagacaattctctcatcccttcccgctgtgtatgaaaaagcagtcgatgcatatgtgagctagcctactcggtaaggtactatgtaagtaaataagagacatatatgaaatatgata

SEQ ID NO: 11595 - DNA, 1115 bp, Arabidopsis thaliana
tagtcaccaaaaacagtaacacttgaatatcaagcaaacagatttttatataaccatgaatttaaaacacaaataatacacagactacctacatgtaaagaagattagagcaaaattgatatcgacttataatataattacatgtttagtttttatttattgttttgaataaatgttgtgaaaaccaaaacccaaaaaaaaaaaacttgtatcacctcattacacaatcatccttcccctgcttttccataatcaatctcaacgaataattgaaataaatgcctaagtgacattggtcatctgggcttttaattttttgatattcacatattattacattgtagatctttagagaactctcacgtacttgtttctccattctttattacctgcaagaacaagtgccaattggatttagaaaacaattagagcaaccaaatgcaggcaacaacgaagactaaacggctaaccttattcacttgaggggatcaatgtgagggtagagtcccaggacatgttccggcatgaaatcatgccttgtcagtattccaacaataggcggtctctgcaatacgaaaacatacgcgttagaaacataaacaagtctagcgagaggaagagagagcgagaaagagactgacccctggtgttttaggcaccacacacaagtggcgaagaccaagttgccggaaaagaatagccgccttagctagagacagagtctcaagcacagtgtaaggagatgtgttagtgatgggatggagatcaacatacatgtccatctcctcctcacttagatccaaatcttcaatcttgagccccttacctaaccctgctttaccaaagtcacgggctttgcaacttctcagaatttgtgaaccaaaagttgttctctgcttcgagaatttcttcccttggagaagcacaaggagatgagatctcaaggcaatcccacatagctcagaagcttctgtgaaaggtggctcatcaattacagggaaaccattatgtcttgtcattattaaagcctgccatattaccccaaccttttcaactctcgaaaaggatatcaaagctccagaaactacgtcatttgcaaccaaattgcgcatgta

SEQ ID NO: 11596 - DNA, 468 bp, Arabidopsis thaliana columbia
gttttgaatctttcaggggagaacacggtgagttcactggggaggtttgtgctgatcatttggttattcgtggttctgatcatcaactcgagctacacggccagtctcacttcgatcctaaccattcgacagctgacatctcggattgaaggaatagatagcttggtaacgagcaatgaaccaattggagttcaagacggtacctttgctcggaactatctaatcaacgagcttaacatactaccttcaaggattgttcctctgaaagacgaagaacagtacctttctgctctgcaacgcggtcccaacgctggcggtgtggcagccattgtagatgagcttccttacatcgaagttcttttgacaaatagcaactgcaaattccgtacagtagggcaagagtcacacgcacaggctggggtttcgtatgtaaaatcggttttgagaaacttaccttcaaatatatta

SEQ ID NO: 11597 - DNA, 540 bp, Arabidopsis thaliana columbia
  unsure (1)..(540): unsure at all n locations
aaacagatgatggttattcaattataatctaatagattttttcattaaaaacaaaactttttgcttatttgagatgatggttaggttatctcccaattgcaatccaaggtcaaccttcagctttctcgcaaaccacgcctacgtatctttatcttcacatctcacaatcactacaagaaaacaggtcatttgcaaggtaggtagtcctcctcgcggatgcgtcgtaaatatcactttgcatgtactttgcgacgcatttgaattcgtcgtgaatctcttgtcgcaaaacaaaattcgtcgcaattgtttcgtcactgttgcgaagaaacaggtccctcgtagagcctacacaatataaacgtcgcaaagtacatgcaatgttgcgatgaatatgcaagtaagtgtgtcgtgtagagtgaggaatttgccagggatagttcaagaatccaatttaaacccagtttcacaaattggattttttgtctgaatttaacattaaaagtatatcgaaaaaaacaagaaatcanaagtaaatatgaa

SEQ ID NO: 11598 - DNA, 550 bp, Arabidopsis thaliana columbia
ctcatgggttgggtggagagcaaacgatgggtcgatttcttcaacccggattctcaatcggttgagtgggcaacgcatggtcgaagacgccgagaatttcgcgaactataccggcgatcagggataccccggtgggagattcttcgatccgttgggtctcgccgggaaaaaccgcgacggtgtttatgagccggactttgagaagctggagaggctgaaattggcagagattaagcactcgaggctcgcaatggttgccatgttgatcttttactttgaggccgggcaggggaaaacgcctctcggtgctcttggtttgtgagaaaacggcatgatgtttttgattctgtagatacaatttctcttccaaaaacctaatgtttctcttcttcaatgtgacatttgggaaaagatcatcaaaccattgctataaatgtaaaatgaaatcatgaggcttgttcgtagataactttattatcacaactcaaatgtgaaagggaatactaaacatcaatgaaagagatcacgacttcatttctttgccacaaat

SEQ ID NO: 11599 - DNA, 541 bp, Arabidopsis thaliana columbia
tgtccaagaaggacattagaggatttgagattgccgtgaactagctgccatgcttggtggatgtaagagagaccctgagcgacgtcttctgctatcttcaaacaagatgtccaatgcaatggcgttgccctcgacgattttgtacctaaacaaataccataccaacttgtaacataagcttttgagacctcaaaaaaaaaaaaccatatagtaaagttaactgtatagaaattccatctgaccactagagctaactgtacagtaaagttttaaaaaattgagtaaaaaccctcgtaagtcgtaactagtaaatttattacaagcattaatcacgcaaaccaaacaaatgcttgatgtcttcaatgataaatctacgaatcatgtaataaaattcaatgctcaaaaagaataaaaattatataatcgcatgagatatggtttacgaagcttaccgtggacaagagacgagagactgccatttggcaaataatcataaatcaataacctctcttccttggcctgaaaataagctctgagtgga

SEQ ID NO: 11600 - DNA, 589 bp, Arabidopsis thaliana columbia
tcatgtattctcctatctttcaccaacattaacttgtagtaggtcaaccatacccatatacattatctacccatatacataatctaagcatcgataaatttgattatatgtttagatatacctcgaatctagaaggatcgaatttttcaggatcggggaagaattcggaggagtgatggattcgccggaaaagaggaagaaccttccaaccctttgggatcaagtagccatcatattcgacgtcttgtactgcttctctaaatgtaaaggacagtacacttgctgctcttagtgtctcttgtatcacctaccaaattaaagtacgtatagtaaccattaattgattgtacgatcaagaatatgacatcatcatgacaaatttgttttatcaatatattgaaatggtgtataccctagtggtcagtggcatttttcttgtatcttcccatgagattcttcggttttctttttttattttctgtcgaatgctgaattgcccctctagtaagatagaccaagaaaaattaacataagaaaaatgaaatggcttcttggctagaaccgcaaaagtttcattaatattggggga

SEQ ID NO: 11601 - DNA, 789 bp, Arabidopsis thaliana columbia
cttcaataaccatccaaagcttcaaacattcgtatccatgggagcaatgttcgctgcactctgccagaaaaacagccttaagaaggtaaaaataatctcttcttcatcagaaaccttccttaccgatgaagtcaaagcctacttatcaataatgtaacctccattctctttgcagcttgagaccggatttacaataccgtgtttggaggaggttgttatcacagtgagatctccactgaacgcagaacagaagatgaacacgcttgaatcactagtgaaatacgcgagaggtctgaaacgaatggtgataaggattctccggatgaagagcaatcacagcagtgcagatgatttctgcgatgatatctgcaagttccggcacatgaacgagcatcttgttcatatagaatgaaataattttttgctgctaatcttattttcagccatttgatttctgtttctctttctggtcgctgagcatttcttatattgaactcttgagtaattgttgtttcctgattcatggttatgatgaacttatgacaattgttttttaaacgaaaaattatggacacatttcttaattagctttcttgttttcttaatctacattaataatatactagtagtgatctagcagaatataattacagtttatgataaagtttgtttttggagtatacttatgtatcaaagaagtattgtcctatgcttaaaaaagataaaagaagataatctccttaaaacaagataaacctcagattgcattacattaaaataaaccgagaa

SEQ ID NO: 11602 - DNA, 510 bp, Arabidopsis thaliana columbia
tatcagagcaaagaagagaaaaaataaaaaccatttgaaatttcgattaccttttttgtgttttctgttgaaatgtcttattattttcaatatcgagggtggatggatcaacgtgttgatccattaacaaatcgtgtttcaaatgagtttgctgaggggtaaatgtttttatcgaattttcttgtaaccagccttcttaccaagaaacaaatactattttatttccttgtgcgcgttgtaaaaacggaaagcagcgtgaagcagaaatggttatgaaacatcttctacgagtggggtttaagggaaattactatgtttggttgaaccatggagaaacattttatgatgttggagaatcatcaggaacaagtaattttaccggtgaagaagcaacatggtcatcacattataagacttttcaagttcctgaaaatacgtacgagtattgtccatatgggtatgttgatatcgaacaagagatgggggcccacaagaagagaagatttgatg

SEQ ID NO: 11603 - DNA, 536 bp, Arabidopsis thaliana columbia
tcaaaaactttgaacttttgctgagttaggctccagaagaaaatgtggaaagttgttctcctcatgacagtcctattgcaaaactgttgggttcgagttcaagcagtgacaatcctttaaagcagcagtctagtggaagtgaccgatgggcacaaagagaagctgctttgatgaagtttcgccttaaacgtaaagagcgatgttttgagaaaaaggtaagctctaaacaagcttaagctcttgtttcctgagacgaaactaacgttttttttggtatcctttaggttaggtaccatagcaggaagaaactagctgagcaacggcctcacgtcaaaggtcaattcattcgcaagtaagttcaaatcctttccaagatttctccctctagatgtttcgaaaagtatcctgatatagtaatgtactcacatggagtcctttgcctttaggagggatgatcataaatcaggaagtgaagacaattgaacaacaagattggtatagaagagagatcccctccaatatctgaagaacagaag

SEQ ID NO: 11604 - DNA, 573 bp, Arabidopsis thaliana columbia
cacttgatactttatcgacactggtgtttcatcctctctacggtcaaaggagtgtgcttagtagcgttttgagatacgcggtaccgtagtactagtgtctctaccgtcatggtacagccgcagaatcacagccgcggtttcttcaatcgccttattcgtcacatctgcaagcgccacaaccccaagaataacacatgagaatactctgcctacttgttaactttttttcttactagcattaaaaggaaagaaaaaaacagcattttgagtagcaaatgagaatggtgtttaagttttgtttacctatcactgcccatccggggtttcgctcatagatccttgacgcgaaatctagttctttccgaacaagatcaatccccgagtaattgttctctgcctctgtatctacgcctagcgttttaacccttgttcttctaatcgcttgcagtacaacgagctggatcttcaaaccaaaaacttttctcggttcaacctgaaagagcgtcctgggtggtccacgcccatcacaaacggcacattagcaactttgtaccctttttgagcaatgtaagt

SEQ ID NO: 11605 - DNA, 509 bp, Arabidopsis thaliana columbia
gttgtcaagaagaaggaataaagaaaggagcttggactcctgaggaagatcaaaagcttattgcttatcttcacctacatggtgaaggtggatggcgtactctccctgaaaaagctggtatatatttttttttgtcatatataggtttaaatattagctactttttaattaaaagaaattattgttatagtgtgtgtaaatgtatataggattgaagagatgtggaaagagttgtagattgagatgggctaattacttaagacccgacattaagagaggagagtttagtcctgaagaagacgacactatcatcaagcttcatgctcttaagggtaacaagtaagtatctctttttttctttctttcttaattcagtttggattagataatcattactatatgtgtaatgttgcatgaaaatactttacttttcatctcaaatgccaaccataactttttaaatcttttttgataaagattccaaatcttcattagaataaataatattt

SEQ ID NO: 11606 - DNA, 1202 bp, Arabidopsis thaliana
tcttcaatctcaccaatgacataccttcgataccttaaactggaatcagagaaagaacctgcagcttctatagctcttctttgtgtttcgagctctgctatcttgcctgctgtttcagaagcatccttcgcagctttatgtgctctctctttttccactatggactttgtagatttctctgataactgtccttcttgcacccacccttcctcttcaattttctgacgttggagctccttcgcctttgatccataagtaaaatttctttcagtcagcactgtacaagaatatatatacacagggacggtttcgtcttatatcgttttacctcttgctttgcagctagtgcttctctgcaagctgatccatacatgtcaattgcgtgtttcagttcctgcttcaatctccgcatctcagcttccacttcttcctatacatttttcaagaaaaatatatagtaaaccattcccgaaaacatatgtattgctatctataaccaatcaaacgcatcttaccaagttttgtggtgaacaagaacaagatgaccgaccgctatcttgtgagacgaatgagaaatcatgttggatatttgtgtcattgaacctgattcctagacgcatagagtgtccagagctcgtcgactctctcggagttaaaccagaatcaggaaaatcgtagatgaaggaagggcttccagtggtgcttgtactcggcctgcctgagctcacaaaagatatgtcagaccttccggtacttgtacttggccggcctgagcttgcggtacttggcctgcctgagcaaacaaatgatatgtcgttttcggaatcttccaaatcaaagaatgagtttgcgtaatttgacgtccttgccataggtgacctgttgacgatattaccgcgaaagaaagagcgataagtatcttccttcaaaacgaatcagttttttgtcaaagacgaaaaatatcctcatgaaacattactttccataatcttcaatggagctagcagtcgaagacctgggaggagccctatctgtttgtaccaacgaaagaaaaaaattcaagatgtgtgtggtgtcacatggtttagcctaaaaaaactagttaatgattttacctctaaagctcatggtgtttctgaacttttcgtagtttatgatttcagagtggttttcaatctgacccataagcggagaccgatatg

SEQ ID NO: 11607 - DNA, 372 bp, Arabidopsis thaliana columbia
tcagatgccgtatctcttgttggtcagatggtggaaatgggatatcagcccgattcattcacattcaacagtctaattcatggactttttcgccacaacagagcttcagaagcagtggctttagttgaccgggtggttgtgagaggttgtcaaccagatctggttacttatggcattgtagtaaatggattatgtgagagatgtgatattggtttggctttgagtttgttaaagaagatggatcaagggacaatagagcctggtgttgtgatctacaacgctatgattgatgctctttgcaactactaaaacgtgaatgatgcactcaatctgttcactagaatgttctaacgaaaggaattagaccgcgtg

SEQ ID NO: 11608 - DNA, 456 bp, Arabidopsis thaliana columbia
gggaatataagaatataagctcaatttggcattctaaggttttaggcagttcatgaacaaaaaagaacttgatattgcaaaaatttagcaattacagatgtattcttaaaccacattcctgtgattaacgcatcatgaatttgaactcgaagcaaggacatttcaggggcagagaccattacttccaagaatggttttagtgggaagaacgaaaaagatatagggaaccattaggataaaatgccaaaccatgtacggaaactgttgtttcccgcccatctgtttaaccttcgggcggaaatttggactccctcttggacaaggatattagagcatatccagatccaatgctgcgaccatttcactgacgtgcaggaatctccatattagtagagttcactaagctgttgcgatacatccagaataactacgaagacgtagattttgtttaagggg

SEQ ID NO: 11609 - DNA, 435 bp, Arabidopsis thaliana columbia
  unsure (1)..(435): unsure at all n locations
nnnnnnnnnnnnnnnnnnnnnnnnnctaaaggccgtatattacgggtcgtgaaactggcctggcaggcgcgatcctcgacgaagctgacatttatatgcggtattattgctgatggcctgcatgttgattacgccaacattcgcaacgctatacgtctgaaagacgacaaactgtgtctggttactgacgccatcgcgccagcaggtgccaacattgcacagttcacatttgcgggtaaaacaatatactaccgtaacggactttgtgtggatgagaacggtacgatcagcggttcatccttgacgatgattgaaggcctacgtgatctagtccaacattgcggtatcgacctggatgcagtgctacgtatggcgacagctctatccggcgcgctcgataggcgttgagaaaggtctctggcacactcaccgcag

SEQ ID NO: 11610 - DNA, 916 bp, Arabidopsis thaliana
ggttgtcatatattgtgaacttggttcccagaaaaccagacctatcccacaagataagtagagactgcttagacaaaagagcttttgatggttaagactttaactcgggacaattgcttaccttaatttgccaacataagtactgctgctccgtgagaagttctttgcagatagggagattataaagtctgtgcatgtcgctcttctaatccttcttgctgctaacaacagtttgtcgttctcagtctccgctgaaattcgaaacaaggatcatccttagaacaacagtttctacattgttgaaaactttagtcagggaataagggtcactcacaaggcatcaaaccataatagagaatgtatgtagctgttgctctgttcctcttaataaaacattgaattggagagtctcgaggccccggctgctcacaatcaaacaagaatattagatttccaacatgatgatgtgaacaaaagaaacagtaaactttctttacctgtttcaatgagattggaaaagtgagcttcccacactgctcagggatcctcacaatctccatagtgattcctctccatgatttacatactgaagcacaagagacaacggcagctcgagcgggccaagctgtctcactctcttcaaccctccagataatgtcatgaagcaactcaggcggcaaagaagcccatgggctctgtggtatgttatccagtggtggagttgtttgatcaggagcaatgtgagacgactttgaccagcttctcttggagatgcctccaagtccatccctcacttccttcagatcacgaaggatgcttttcaaagacatctcttttcagcataccacaaaactccccgatagctgcaatcactcaaagttcatcttcttataatctcgttaaaggaaacaaaaca

SEQ ID NO: 11611 - DNA, 539 bp, Arabidopsis thaliana columbia
atcagactcttgaacacttacagtggaaggcgtctcccagaaggacctgaacctcttcctcttcctactctcccacctctaactccttgtctgcaataatcagtgatacattcacttcagcacataaactcaaaactattctcttgtaaaaaaaaaacagaccggcaacatacccaatgaagacactcctcttcatccttccattcaatccagtcacattaacacgagctgcgacaggagcagattcagtatttccacccagaatctccagtttcataggccttccatccaaaagtacattattgtatttcctcatagcttgaattgcatcacttcttctcatatacacaacttcagccgatccctgtatgacacagaacatcagatatcaaatattacagaaacacggtaatgaacagataaaccatagcaaaaagaaaacagaacttacacttggacgcccatttttgtcatagtgaatgcatatcttttcagctctccaattcagcatagagttcctagatccatatgatagtaca

SEQ ID NO: 11612 - DNA, 991 bp, Arabidopsis thaliana columbia
cctccaatctccactgcccagctcgaaccttgttcagtgcttgatattcctagggtgccggtatccttgtgttgcatctgtaacttcaaatgtataagcttttaagaaaacttccccaacaatttgataaatgatctattaatcagtcatgaataaacggaaacgtctcttcacaaactatggagaatataaagcaactttccttgggaagactagaaattattaagtacctttgaacttgcacttttagtgagcttgtcagcatgctgagagacactctgcaggaagagcatgtgcttgatcgtgcactctagcaaggaatcaatactgcactgtacaatataacaacatagttagaaaatagcagaagaaaatatacaattcatgacactacaactgcatgagtgcagtcagtcacatgctctgaatagaaaaaccaccttagatccattaggcacaagctcccttagttctttgatacgatcctgaataagttgcctgtcccttggacgaggccgagaactttcaccaggtttagctctctttttgttcttcttgggaatttccagggacgtcggaaactggtcgctggatgaactgagacatgttgatgaaaacccaatggaagaaaatgctccgcagatatttgatggattctgttggataagcccatctgctagaggcggctggctaatcacactatcaactgtgctaacaatattttgcttattatgaccaaaaggttctgcctgtgccatttcagcagttgtaagcaatgactgtgttgacctgcttgaagatatttcacgcctgacattaccatcaccattactcatactagcaacaacggcatctagaagattctcggagctggattcacatgtcaggtgactatggctcatatcatttgttcgtcttatagctgcagcagattcaaactttgctagctccccataatcagtgcttgtattactgaacgctggccctaatg

SEQ ID NO: 11613 - DNA, 559 bp, Arabidopsis thaliana columbia
gttctgattgcttttgcgcattgcttagttttagagtgaaatgtggctccagtgtgctatcagagtttcattaaagcttgagacttgagaaattttggtttttgcagctcttgtatgtgctcctggtacaggccttctatggggcttggtgtagtgttggagaaagcctgcattgtgaatattccaatttagcgagtcttcaccggcctcacagcgtatcgattacagagtttggagcggttggagatggtgtgactctaaacactaaagcctttcagaatgctctgttctacctcaattctttctctgataaaggcggggcaagctttttgttccgctggtcagtggcttaccgggagtttcgaccttatcagtcacctcaccttatggctagataaaggtgcaacgattctcgggtcaacggcaagtctctgcctttttgaatctttacaagcataccctttgctatatgaactgtgatcacttatacaacttgttaacactcagagctcagagagttggccgtggttgatcagtaccatcatatggacgaggaaga

SEQ ID NO: 11614 - DNA, 946 bp, Arabidopsis thaliana
ggtacctcccttgatgcacgacgtcggtatcctggttccggaaatagtacaaatcgcttggatcagaacagagagagtagatgcaagcatcctttaaaacgttatctctgtacaccatatctcttccccttcggccagccttcaagataggacctagcaaccaccaacgatcatcagccacgagcttgacgatcttagccaacagatcgtcagggatgtcaggcatttctgttctcatttttttgtggataatctttgagaggaaacaaagacaagttttcttcttctacgatgttattgcaggttgattaaatatataagccacaataaagtagtggttgggaaagttacagttgagaataattacatcctcaaaccaaaacatattaatgacatgatgcctactctttaaaattacccactaatagtaaaaattaaactgtacagcgaaatctgtacaccgatttcggtacaccaccgtcagtacgctgcagtcggtagagtgcaacaaaatttaaacgaaaatacatgaccaataaggctaggaaggtatcaagtcatcagtagtacatgccactttgaaagaaaattagacaatatgcataaccttgatgtacatcgctatctgtgcaccgctatctgtacatcgctatctgtacaccgctctctgtacaacccaatctgtacagcattatctgtacgccgctttctgtacagcacaaactgtaaagctgtttgtacagcgaaatctgtacaccactttcagtacaccaccataagtacgctgcaatcactagagtgcaacaaattataaacaaaaatacatgaccaataaggctacaaaaatgcagtaaatgtggtatgcagtgatcagtagtacaagccactttggaagaaaattagacaatatgcataaccctatgtgtatatcgctatcagtacaccg

SEQ ID NO: 11615 - DNA, 582 bp, Arabidopsis thaliana columbia
gatagaaataaagtagttcttgttcagcttcgaggagagtagctatataagtaagtaccctgtcgctattggattgaacacttgttatggtgtgagagtgtaaatctgagcaaagagactccatgtaatctctcattactctcaagaacttagtcgcggcttctgcctgagaaacagtcagtcatatgatcgggttaagcaatttcattttggtagaatttgaggtgcaatgcattggtaaactacttacttgcacttcattgcatttataaaccgggtgtcttctagcgttcgagctctgatgagccaatgttgcatggattggagccaactgagccataagttctctacactgaggcaatgctggcatgttacatatttttacctgaagaaacataattaacgttacatgccttgagaattgtcggttttatcggttttggatacctaacaaaaaaagaaaagaaatacaagactttcatgataaggccacgaacctgattgttgaggatgttactagaataagattagacgtcttgacctccaatcaataggttactgtgtatatgacctgccaggtgg

SEQ ID NO: 11616 - DNA, 529 bp, Arabidopsis thaliana columbia
atctctcgaaccattcccatgattatatatgcctacatagagcacccgatgacaaaccttcaccgagtcagttctgtctaacgaatgaacaaaataccaatgacccgcaacaaatccgtgttctgatcaaccaagcttcttatcagatccttttaggttcaagttgaaccatttcctcttggatttgtctctattctctgttccgccttcttctcccgcactatccccatcaccttttgattcatctccctgagctttgctgctacttccattgctcaagttgttgccgcttggtgtcttcacaacagagaaggtcgaatggattgtatcccgttgctttacagttcgaccacctgcaccattattcaatatacacaaaccagacacgattagaatgatcaaaagtatgtcagaaaacaaatgcaagagctcctctgtggttcatgtgcacaacatctcttctatagaaccattgcgtgtgaacaaagtaaaggatacagtgtaatatagagaacatgacgcacagttt

SEQ ID NO: 11617 - DNA, 447 bp, Arabidopsis thaliana
catagtcacttagcaatgtaatccatcttctttgtctaagattcaactccatctgcgagaataaatactttaggctcttgtgatctgtgaatatttgcatattttcaccataaagatactgacgccacaacttaagagcaaaaactactacatccaactcaaggtcatgtgtaggatagttaacctcatgcttatgtagttgtctagatgcataagcgatcaccttattttcttgcatcaatacacagcccagccttgataaagaagcatcattgtacatcacataccctacaccaggtctcggaatagttaaaactagagcagaagttaacctcttctttaatgctctaaacctctgctcacaagactcactacaaacaaacttagctcctttgcaaagtagttgtgtgaggggttttgcaattcgagaaaaattctcgatgaact

SEQ ID NO: 11618 - DNA, 965 bp, Arabidopsis thaliana
ctatcttaatttagtttagctgaatagcgctcgatttgtatcgtgacatgactaatgttgtactccctgcggatgtaatcaattaccttgttgagcaccatatctgcatctgcttctggtctgatattgacatggcaagccaatagcacttttcccactgtgatagcccatatgtggagctcatgaacagccaccacttcttccatttcgagcaaacccttttcgagctttgtggcgtcaatctctctgggtgtactctccatcaatacttctagaatgttgcgaatcatgttgatggttgttcctaggacaataaccgaaaaggcaagtgtgcagatcagatccactatcttccattccggattgtaccaaatgatagctcctccaatcataacaccaacactctggatggaatccccaaggacatgcagataagctccttggagattgatgtttctctttcttttctcttttgctgcgacttgagtcttcgatttgtccaacaattgctcagtaacatccccatgagcatgatgcttgtcctctccatgaccatgactatggccatgttcatgatcgtgatgatggtgatgagtggtaacagtcaccccatggctatgattgtgatggtcatggccgtggcatgcccatgtccatgactgtgaccatgatcatgccctagcagaacagccattatgatgttcaccactagaccaaaggcagcaaccagaaacatgaggaatccattaacctcactggtctctgtaacaattctgataatcgcttcataaaccagaatacccgtgagcaaccaaatgagctggatagatacaagagcacccaaaatctcaatcctgaagaacccgtaagtctgcctaggagtcgcttccagccagcagccacaatgagaagagggagatacaaaggcagaacgtcagagagcaatgagctgcatcggttaatat

SEQ ID NO: 11619 - DNA, 951 bp, Arabidopsis thaliana
ctggaactctgccaaagtttcatgaggcacatccatttcatcttcttctacctcagcattttggtcttcacggtcaggacctccattctcctcatcatcttcaatttcgcgaatgataacaccctaattttgatgccccgcaggtggaaggttttcatcatcactgtcaccctcagagtgttgttcctccccaccattctgtatcacacaagcgtctttgtcatgggtgagcattccacagacttcacagaagcctctcagccgttcgtaccgaaacctgagcagagtgttgtctccagcctgaaactgaaaattcctttagaagggcagggggagttgaatgtcccagtcaatacggactctgacgtattccacccgagccgccgtttctgcatcatagtccacatcgaggaggtttccaagcgatctccctatgtgagagatgacttcacggttaaggtaatgatatgggatccctcggatctggacccagaaagggatgaaatcgattagaggttggttgtaaagaggattacattgttgaaggataagcattctgtcgttgaaggcccacaatcctcttctcataaccagatccagtgactcttctctcgggaaaatgaattggaattggtttcccccaacgatccgaccgtgaaacagaccgaattgtccccacacgcgaggcatcgacgcaatgattgatctcaggttctgtcttcgtggcatgaccggtcgtcccatgatgaggaaccggagttccgcctctgcattcgccactacctccagtggtagtgctacctatgcatcatccacccccagattgatatcctgaacagcccttctcagattgtcagccatttttgcaattactttgtagaatcaaataggaaattggatacttgtgatttgcgataaagatgagtgagagaaactggttcttagatttgc

SEQ ID NO: 11620 - DNA, 2097 bp, Arabidopsis thaliana
tcaacagcctaattcctcttcattcttctcagacggcgggtcatggaatctcagtacggcgatttcttcttgtcttggtattcgtctcttctcacctcccacgcagaccgagtcctctccgttgcttcatctgcatttagcgggattggagtgcctctatgtgggaagctacctctcttacaccaatggcacaagctaagatctcatccttctgagttaacagctggattctacagctctaatggtcaggacaggtacgagctatcgcagagatctttgcaaagaactcttgtagaatgataataccaggaatggacctatccgacgagcaccaatcacctgaatctctctcgagccccgagtcattacttggccacatcaaaacttcctgcaagaaacaaggagtcgttgtctcagggcaaaactcatccaccccggttcctggtgggtttgagaggatcgttgagaatctgaaggatgagaatgtaggaattgatctgttcacttaccagagaatgggagcacttttcttctctccagagcatttccatgctttcacagtctttgtccggaacctgagccaattcgagttgtcctcagacgatcaagcctcagaggctgaggttgaggccgagacagctagcataggttcaggcactggtgcacctagtttgcaaaccgcttaatgaaatgcaaaatcataattttttatgtaaataagaaaagtctcctgttgttttagcatttatatagaatgtcatattactgtaaaattatttgcaaccatttcttcacaaaacataaatcctgaagcttaagacaaagaactcccttgttttggttcgagtgatggcacaatatagcaatagagttgattttcttgcaagatcacaatgtacaaaaaagctacaaaacaaaaggaactgtaacattatcaaacacaagacaacgactcgttgtttttaaaaagaacacaatttacaaaaggctacaaattgctctttacaagatagatatagcgatatcttaacaaagtcttgtaaatcattcacaagcgattctagtctcaaagctgctcaagcaaatggcaaaagcctggaaagctgagatcgggtatccataatccatcgtgaacatatctttcccgactttcccaaactgcaatataatccgctcgctctgcctctccggtgacattcccgtgccactgccacagctagctcctgctgccacgagctgaaagttcttcactgacgctactgtgacacggccatggaaattcaagcaccagcagcgtagctgctcgtgccaccgtggtgtcttgttgctcagcactaatggtgtttctttcaggtggcttgagctactgcgtaatggttttgactgagacctggataaggttgaccgagtaccgagtaagggaaactctgatggttctgaagctactccttgaggctccattgtgcttgtaggtattgtgtccataagacattgcatctttcttggtcccctaattgtgccatcaagacattacatattaggtcccctattagcttctatattacataattttgaaaagtaaaaaagggacctttccacacacattttcagtaactcttctcaagaatctctaattttgattttaaaactacgactagtctaccagagaccaaaaagatgttgaagaaaagtaataaagttgagacaaataacttttcaaataggaaagctaaatctggaaaagatcattaccgggatcctaagacattcagctcatatgtgatatgagcgacaggataacttccaagaggaacttttgctgaaacttttgcgggattataagatcggctctttctcaactttgcggctcccgttgaaggcagcagatttccatcaaagacagtgaatttcgttcctaggaagttcgatcttcgacaagtttagaaagagcaatatatcaacaagagtttcaatagaaagaacaacttataaataagcaaaggacctttactggaactgcatgaagtttactagatcatgttaagtccttctaatccatcaatgccaagctcaaaatgctaataataagactcttaa

SEQ ID NO: 11621 - DNA, 594 bp, Arabidopsis thaliana
tctccagaagcatctggctcagtggagcatccgacttctgaagaagcatctagcgtctgacgaggcatcatgctctaggtggagcagtttggctcgatagagcatctggcttctgaagaagcatctggcctctaacgagtcataaggctccaagtggagccaacaaagtgttaattagggtttcttttgtataagtactattcttaacctaacctccatgtattctgatttctgtaattctccagtaataaaatctgtctctttgcccgtggatgtagccaacaaaaagtgttggtgaaccacgttaaatcagtgtcgtgttctttatatttttgttatcttgctcacatctgttataacataaaaggtgtatcttttccacacacaacacacgcttgtttccctttcactttatacccaactaatgtccccaaagctggataatcagtgatactcacagcaacattaccttcagtgtaaaattctcttttagaaatgagtcataaacgataataccttcattccacagatcattaagatcatctatcaaaggtggtagatagacgctaatattgttgcttggtgcagttggcc

SEQ ID NO: 11622 - DNA, 604 bp, Arabidopsis thaliana columbia
ctcatttctggttatgcgcagatgaatcattgcagagaagcaatcaaactcttcgacgagatggttgctttgggtctaaaacccgataatgtcgccattgtttcaactctttcagcttgtgcacaatcaggggattggcaaaaagggaaagctattcatgattacacgaaaaggaagagacttttcattgattccttcttagctactggattggtggatttctatgcaaaatgtggtttcatcgatacagcgatggagatcttcgaattatgttcagataaaactttattcacatggaatgcaatgatcactggtcttgcaatgcacggtaacggtgagctaacggttgattacttccgtaagatggttagttctggaatcaaaccagacggagtaaccttcataagtgttttagtgggttgcagccattctggtctagttgatgaagccaggaacctttttgaccaaatgagatctttgtatgatgttaatagagagatgaagcattacgggtgtatggcggatttgcttggaagagcaggattgatcgaagaagcagcggaaatgatcgagcaaatgcgtaaagatggagggaacagagaga

SEQ ID NO: 11623 - DNA, 582 bp, Arabidopsis thaliana columbia
tgatcattggaaactacagtgatggtaatcttgttgcatccttgttagcacacaaacttggtgtcactcaggtttgtctcttgtttctatccatagccattgagaaatatgttgtcttgctctaaagctaagaatcttttgatttattattacacagtgcaccatcgctcatgctttggagaagactaagtacccggattctgatatctactggaagaagctcgacgagaagtatcacttttcttgccagttcacggctgatcttatcgccatgaaccacacagatttcatcatcacaagtactttccaagaaattgctggaaggtaaagagagaagacttgagtctcaagaaaacaagaattttctacaatttccattggtttaacgtttgagttaaaagcaacctcttttcttttatagcaaggacactgttggtcaatatgagagccacagatctttcacactgtccgggttgtactgtgtagttcacggtattgatgtgtttgatcaaagtcaacattgtctccctggagcagatatgagcactacttcgcttacacgaggagaagcgtagattactg

SEQ ID NO: 11624 - DNA, 758 bp, Arabidopsis thaliana
tttcattgtttcaattcagattcgaaaattgaaagtttctgtgacattacagttagagaaaggagcttattgaagaatcaatggcctctgatagagaagagtttaacttgtgtggacctacacacctcacaactgttgattggtatgtttggattgttaactcaagatcaaacatgtagttagacttatgaaatggattcttgagatatgtctttgtgtttttttacaggggaaatgaagatcaccaacgttgtgtagcagcttgtttggtacaaggaatctatatagtagagcaagaccgtcagcttaaacgtgaaggcactgaagctcttgcatctccatggtgggaatcattcaactttaaattgatccgtcaccttaaagacgatgctgatttctccatctttggtggcatttttgaatacaaatcgttacagccagatgttgtggactctggagtcccacggtatgttatagcctttagagggactttgactaaagcggattcgataacccgtgatatcgagttggatatccatattatacggaatgggcttcaccgaacgtcgcgttttgagatagcgatgcaagctgtgagaagtatggctgattctgtgggagcttcgagcttttggcttacggggcattctttaggtgcagcgatggcgcttcttgctggtaaaacaatggggaagagtggagtgtatattaagtcattgttgtttaacctccttatgtgtctccccgattgagaggat

SEQ ID NO: 11625 - DNA, 466 bp, Arabidopsis thaliana columbia
tgaaatagtaattacatctcaaacagatgaccagaaccggtcactttatccaaccaaaaataaagaagcaaaccagtttaaattatctaatgagaaaacaacaagactaagaccagtttttaaacctagttcacaaatccaaatgatgttaccaaaaaacacataaggttcagagaattcaaaacctacccctgaattaattcaacgttcgaactaaaagaaaaacaaaacactctgaccacggagtatattaacaattgaatatttgtctaaccaaaaataacattgaaaacaaaacaaaactaagaataccggatcggtttggtttggttatcgccaggaagaaagagtgaggagaggtaaatcgttccaggccaaagagatgaagccaggcttagattcaacaattgaatacaaattgctgtaattgtaatccacaatagaatcttcgcttggctcactgcgt

SEQ ID NO: 11626 - DNA, 589 bp, Arabidopsis thaliana columbia
agccattttttcgagaatgtcaaaatggaagaagtgaaacctgtggagatacctacaccatctgatcagtcgctgtccattactgcaccttccaggaatgggcagatcaacccaagtactcgttcattcaaaatagtcacagagagccccctcgtcgttatgtttctttttcagctgtatagcagacttgttcagattaatattcctaatttgttacccctgatggttgctgctatatctattcctggacctgagaaagtttcttcacatatgaagcctcagttcatcgaactgaagggtgctcaggttaaggtgagacaatggctctctatccagaaggaaaccataacttatttgggcagtgagaaaaatatttaattaaggcctacactgccttgttgtttccctgaattattttgttttttaagggatattgacttgtagtgtttgtttgcagaccgtttcctttttgacttatttgttaaaaagttgtgccgaatatatcaagccgcatgaagaaagcatttgtaagagcattgtaaatttgcttgtcacatgttcggattctgcatctatcagaaaggtggag

SEQ ID NO: 11627 - DNA, 562 bp, Arabidopsis thaliana columbia
aaaaatagtccatagtacagatcaaagctgtcaccagcagtattctccaccagttttagcaatgtctcataacctttggtatctataggagtagattccaagctcagcttctccagaagccttcccactgtgtgtgtgataaactgtgatccagcagcatgccaatcatgttcagcacacgacatctccaccatacgacatccttcacgggcaaaaatatcaagaaaactgttacacctcgattttcttctatcatccattccaatcctaaccttatcaaacacaaaggcaagattgttccatccatttttaccactctctggcccaaacataggatgcgtgcacaaaatatcaaaatcttgtgggagagtttgaagaaataaattcctcgggaactcttttactgagagtacatccacaaaaagtgtgcttctcttcagtctctgaaacggtagtgactcgagaactttttcagtcgaaaggattgacgtacagagaataataacttcaggatgctcttcaaatagatcatcaagatctgaaaaatacgaaacaccgagct

SEQ ID NO: 11628 - DNA, 561 bp, Arabidopsis thaliana columbia
tacaagatgttcaactacatgcaacagttactcatgtgttaagagctcaaagtgagtaaggaaaaagagtatcttagaacaagacaactaactgagaatggagactcaacacaggcaactattcaaacaaaatgttaaaggatgaaaagaaaagtcacatgagaagattcataggtctcatgagacaaagtgaaaacaaaaattcctctcagaaactccaaacaagtatacctggttcaacatgaaaggttaagtaatcaattccatcaggtacactactgttgtacttgtaaggacccttcccattgatgaggactccatctggcatcccaagtactttcccagagtcaagtgctctccttaatgcctgagaagcaacagtgtctcagctatacataaaacatgggtgctgaaaaacaaaatgcatagaagggaaatatacagaagtgttgattacatactttatggtcctgagtgtaccaacaccaataatgaagatgagttcacatcaggctgtgggaaagggataggaataatgtcccggttattaacacgatggga

SEQ ID NO: 11629 - DNA, 473 bp, Arabidopsis thaliana columbia
gtgtaagtgtttacattatgcaaagactgtttttgatagaatgaagcagaagaatgttgtgtcttggacagcaatggttgtgggttatggccagaccgggcgtgctgaagaggctgttaagattttccttgatatgcagagaagtggaattgacccagatcattatactctgggacaagcgatcagtgcttgtgccaacgtaagtagcttagaagagggctcccagtttcgtggaaaagctataacttctggcctaatacattatgtcactgtttcagattcattggtgactctgtatggaaaatgtggagatattggtgattcgactaggttgttcaacgagatgaatgtcagggatgcagtctcttggactgcaatggtttctgcgtatggcgatttgcaagggccgtcgaggctattcagttgtttgacataatggtacaacatggtctaaaacatgatggagtgacttt

SEQ ID NO: 11630 - DNA, 538 bp, Arabidopsis thaliana columbia
gaccgttctcccaccacgagccagttcccacaaaatcgacacaatcctttgagcagtggtagaatcaagcccagaagtgggctcatcaagaaagagcaaactagggtttataagaatctcttgccctatactaacccttttcctctcaccacctgaaacacctctcaagaagggtcctccaatgatagtatccttacatctgtctagacccagttcagtcatgactgccttagcttgtttgatcttctcttgttttttaaaagaattaggaagcctaagaagcgcagtgaatactagagtttccgtaacagtcaagttagggtaaagagcatcatcttgagtcacgaaacccgtagttcgtttcacagctttggataatggcttgttattgtaagatatgttccctgtgagctttcctttaccttccccaacccgtcctcctaaagccgtcaacaagctggtcttgccgctcccggaggaccaagcatagccaagatctctcccggtttgacgatccctgttaagcccttcaagatgg

SEQ ID NO: 11631 - DNA, 505 bp, Arabidopsis thaliana columbia
cctgatttttgttttttttttccctgctttgctttgaatctgtcacgttaagggttgttacaatcgcagattaatctagctttgttattttgactgagattttcaaagatcgtaatgtattttttgattccaattcgtaaggttatgttttgattgtagtgatgatgtgtgttgatttcgaaattattgtttgctatgcagaacgattcggtgatgagaagatgatcaatcatcagtgaaatttgtgtgtattgttaaagagttatggattctgcaaagggttggtttcagaagcggcagatgcgtggaggatccagatataaaggtgcttcaggtggtgctggtggaggtggaagtaatggctctgccgatgagcacaacgtcgaaactgatgaagaagctgtttcaaacactaccaaacagaaagttgcagcagctaaacagtacattgagaatcattacaaagagcagatgaagattctacaagagaggaaagaaaggtatt

SEQ ID NO: 11632 - DNA, 508 bp, Arabidopsis thaliana
gatttacacgttacagattcttaatcattttgtaattttttgagtaaaagtgttatatttgatcattttgttattttgctagggttttggtttacttgtgactctcatctcaatatgggctaacacgtgttcaacagatttcaatggttagacgtacgccacagtagccatttcaaaatatatggtgctgataagaaaaaggagtgataatgtggggacccttatcttttcttcaacgtgataataaattatttgataagtgagctgtatcatttaattagttaccaagtgaactagagttatgttcccagtaatggttatgttcacagcccggtggtgcggaccgtgtcgtgacatgatccccatactgaacaaaatggactcggaatacaagaatgagttcaaattctacacagtaaactttgacacagagataaggttcacagaacgttttgacataagttatctcccgaccactctcgtctttaaaggcggtgaacaaatggct

SEQ ID NO: 11633 - DNA, 502 bp, Arabidopsis thaliana columbia
cgactactatctgttagggaactggttgcagaggcctgatcagatgacacttgcgatgtcggagcagacggtggaaataatgaagactggcctgttgaggatgagaccatctcaggggatgatggagacaaagctggtaaactaaaagtgaaaccagctgtgggaccacgtgatcgagaaggtgttgacggagctgcttgactgagatctactttgacactggtcaaaggtttaccaaatggaacattgaaccccgtagctgaaacagtggatgtagatgtgaccggaaacgtttgcgggactggtgctgagctaatgggtatacatgctggaactgaaattcatattaaagttgaccagtgtcatcgaccagacattaaagtgcctatagctgactgctatgtgaatcaaacgaagtacacagagatcaacgtaaacatgcatggatcttgcgaagaggatggcactggagctgatgatgctgtaaatgaggtggaagtgg

SEQ ID NO: 11634 - DNA, 628 bp, Arabidopsis thaliana columbia
cacttatctccctttgcgatttgaatgagtggaggaggtgtgttgcttttaaacggaagcgtagaaaattgtgacactttctagactagaaaagtgaagagtagtgacactttcactcctctttgcgatctagtagaaaattgttatcccgaaactgctagatcgcactcctgagctttcactcctatgttgtgatcgagaatttgaaaattttttataaaattttcatttgaacactcgatcacatccttgttgatcactccagctgttattcatttcctgagaatcaaagacacaaccaaaacgaatcaaaagtaacaaataaataaatagtatatacagggatagtcatgggacttcctcccaagtgagcttgtttagagtctctagcttgactcctcacactaatcaagtggagaaaatgtgacagagggaacttgagaagtctcctcttcactgatatcatcatcatactcagcatcctctcttgacagttgcacagctgagtattcaattcttctttcctcatagtaggctgcttcctctctggaggatagttgatagtaggtttttctcaattacctaaacactatctttccgttgtagacagatgagatatgatcagaag

SEQ ID NO: 11635 - DNA, 935 bp, Arabidopsis thaliana
ccctggatacaatggccttgacaaggacttggcaataagattttagcaccaccgaacaatcaataaggtgagacgctgccatcagggctgaacgagcagccagagcctccgcaacaagcagagaagacacatgcttacaacaggtagagtgtttagagggacgacatgcgccactggataacaaagtccatcctaatcctgcagtttgagcttgggaacagtacgctgcatcagagttgataatcagagtggagcggatctcttctcttgtcttatgctgtctggtcgggaagagctgaggtggaggcataagtttcttctgttgagcagactaccattcttttgcatccaagatggccttaatcatgatttcctgctcagaaaacataagcttttcaaaggttagcttgtttctagctgtccacagattccagcaagtccaagggtaatggggtccgctgcctaatcctgtgggaggaagacaaatcttctttttccaccaatccaagctttccttaacattagagagtggaggcaattgagcactatcgataggtgccaatttccatactctctgggcgaagggacaagcaaaaaggatatggtcaatagattcaagctctctgcatttactgcaggaagattcaacaaagattttcctagacataagctgttctcctgttggcaggcttcattaaaagctttccataagaaaaatttaacttttggagaggttttcacggacaaatcacactaaaccagttgacgggtccctgaggatgaagtgacagatcttttagagcttgtcgtgccacatgataactggattttgttgagtagtaccatccggattaagtaccagacttgtctatctttccctgcagttggcttggtttgatactgagaatatgatctgctagcactgggaaagtcgc

SEQ ID NO: 11636 - DNA, 394 bp, Arabidopsis thaliana columbia
ttgttacatttcgaagaagataaaaagaatcaggattttaccattttggtgccgtactcaatggcttgttcagtgtggaaagtgccgttctttccggtgatgccttgacagaggactcgtgtgtttttgtcaacgaaaaccgccgcaggaggattgaggatccgacgcgaaggagcgagattgggtcaacgaagtgagagactggcatgacggaaaaacctctgagccgccggtagaacaacggcgagcttttgatgacagagatccgataagccttgccacttgtctagacatgattgattggcttcttcttctcggtgctttcgatccgaatcaagttgtgaaccctaaactgtgtgtaagacggaaatggagcaaagaaaattcagcggac

SEQ ID NO: 11637 - DNA, 1243 bp, Arabidopsis thaliana
caagaagcttctcttctctctctctctctctcttcaatgccctcctctgctactagcacatatctcctctctttaaaacaagtctctctcacagcttcttcaccactccttctccagctcaaagaccgtttctttcaccagccaaagctccttaacatgggattctcaactgggaaaagaaaatcaagagatgaagaagaagatagagtgagcttcttcgcttctgaattccccatggatgacctcaacgatgacgttctcgagagagtcctctcatggctaccaacttcttgcttctttcgtatgagctctgtttgcaaaagatggaaatcaagccaaacctcgaaaagcttcaagcttgcttgctctcaaatccctactcgagatccttggttcttcatgatcgacaacgattccaattcttcctccttcgttttcgactccactgagaactcctggaaaaatctcaaccgccgcgatttcctccaccaccaccgtcaagatttcatccccgtcgcttcttccggcggcttgctctgttaccgctgctccatctccggcgacttcctcctccgtaatccactcactggatcttctcgtgacattccttctcaagataacaacaacaacaaacctctccaagccgtagccatgaccaccactactgttactccctccagctatacgctcgttaccatctccggtgaaatcccaaatctcagtttcaagatctacgaatcaaacgcagattcttggagcaaagaccaagaactggaatcagtcaagaacaatgattcatcattacatgatgattatgatactgacagtggcacagtctactttcttagcaaacaaggaaacgttgtcgtggcgagtaacaatcttcagagaagtccgtcgaagcaatactcttccgttattaccgttacagatgaagccgaaatcgtctattttctcagctcttacggaacaattgtagcttgtgatctcactaaacgatgcttcaccgagctaccaaagcttcttcctccgttcctagagtactccatcgacttggtggaatgtgaaggaacaatgtatgtgattcttctctctgagttctttgaaagcgcaagtttaaggatctggagacttgacaataaccgggaatgggttcaagtcgggatgttgctcccgcgttgtctcatgagttatacggtaagaaaggcgacataaactgcgttggaggagctggaaacaagat

SEQ ID NO: 11638 - DNA, 650 bp, Arabidopsis thaliana columbia
acaacaagttgaatgtttacttgtatttctctgaaccggtactgaattcttcggctgaaattctcagacgactaaacacaaaccaaggtgatttgcttcctatcgacggaaataccaacgggaatcgccgtttcgcgtttatggtttgtgcttctgctgctgttattaaggatgttttgtgctatcgttatatttcgtttcatgttaatctttgaatgtaatattcaaactcttttgttctcaggtcacaaatacatcacggcgtgcaatagtcacggtgacccttgactcgaattcaattagaagcagacatgggacacctgcatctccaactgcaccactcacttttctttatggtgagtaagttacacatttttgtttctagattcttgttttggttctctctttgaatgaaacatgtatccgcatgatcttagataccgagagacctcatgttatattgaacacaacatctggtatgaggacaagaaagcacaccatccctgtctggatcaaattcatgaagccagtgtttgggtttactcctcatttgtatcaactcaggtggatacttgataggttagtggcttgtgtgcttctacttcttgattttgggctaagtgatttcataagacttttgctcttttgtt

SEQ ID NO: 11639 - DNA, 727 bp, Arabidopsis thaliana
ggtcgcggacgtaacagccgtggaatctggttataacccgccccaatctctcccgctatctcgatgcaatgtgaagcgatgagagcagctgcagatgccattgcagctgcaacggttgttgattcaaccgcatcttctgcggccgcaatagcgttagatgctgcggttgcggcaacaactgcagctactcctgcgacagagaccgcggcgtgaatctcagcgttgcgagttctggtctcttgtttcttcttctccttctgatcctttaatcttcttcccattgttcttcctcttatcatgctcttgtacaaatgctgtatcattcacaacgattttattcatatttgctcatatgttttgattctcataatatatcatctagtaatagtcacttggcgaggagtagtctaattgactagtatatattattatattctccagacataacatattaatccgaatctaaaaatccaataaaactagaaccgaattcatgtaacgggtagatctagccaaattgatgtttgacattatatttgagttttctcaaatgaagtccttctttttgtcagcaattatttcgaacgtaaaaaaaagttaaccatagaatttccgctcattgcacattactcactgtgttaccctttttattatttcaaaaagaaaaggatatggattgaataaacaattgcatgatttcatcatgacaattataatgctttctctt

SEQ ID NO: 11640 - DNA, 488 bp, Arabidopsis thaliana columbia
gtttggcttgagtcaatatcttttcttattaagatctagactctacagagagagattgttggttcacacacatatcaaagttacaatctttctgggaatttgaatgaatacgatcaaaaagagttgaaaaaacgaaaactttacgacgatgctgcaacgagctgcgagtaatgcgtattcatggttggtgggcgggtcatattcggaccatacaatctaaatggctcgaacaaaaccttcaaggtctctccttttgaatccatgtctctttatataggtgtttgtttctaaaaagttgagatctttgaggtttgatctattttttgttttggatatgaatttgtagatattgaagagaaggttcaatatgtgttgaagctattacaagaagatggagattcgtttgcgacgatgcagagatgtattataagaagagaccagaactcattagcttcgttggagaatcttacagagcttatagagcttta

SEQ ID NO: 11641 - DNA, 941 bp, Arabidopsis thaliana
tccccttctcttcttcagtttacttctctagattttcttatccagtgtaatctattcttgtctgtctgttcctgtgttattgggttttattttgtgtagttcggttgtaagtttggaactcttctttggtataaatcttaacattaaaaccaaaaaaaaaaaaaaaaatttccgggtaacaaagtgtctctgatgattttcagagacgagaaaatgtattgagcttcgtatgttctttgattcttctcgaatgtctcaaagaactttttgttaattggtattgtattggttgcatctaaaggaaccatagtaatcggaacacctgaatgaaaaacctgtaatgaacacataacacataactattaaacaacattaaagaaaccaaaacacatcactataatatctttgattgatcttaacacctggtaagcagcaaaaggatcggtgaagatgttgaattcagcgtaaggattacttgtataatctgtgaacaagtttccgcagaatccgttagggttttgacagcgtacactaccacccataacgtaaatgtgttggatgttatgtttgaggtgaggatttgacatcatgaagagagctagattggtgtgagaaccgatcacgaagatgctgattggaccttcagaaactttgtcgacgattactttttgtgccgttggttgctcgagaggagtgtatcttcggttcccctgttttcccaccaaaagagaactaatcagaaaaacattttttttgatgtttttatctacaaattttgcttacgtaaatttatttgttgacatatcatattctacttattgatcatttttttgatgaaaatggcaaaacataggatgaccactggactaacaaacatctttgacatagaaatatgtctgaagatcacccttgttttgctccaccaatgtgtggcctactaa

SEQ ID NO: 11642 - DNA, 492 bp, Arabidopsis thaliana columbia
gtataaacacacttccccatatacagaaaagccaagagacaagtgcagtgtgagaaatttaggacaggtccctagtttcatattgttaccgagaatgataatgtacagagcaaatttaaggtacacaagcctaatttgtagttaccttgttgagtgcttcaagaagtagtgtttcagcttcatcgaagttacccatttgcatacagcaaacagctttgccattcaagatcaagcatgtcattgggtacttctcagaaaaatcctcgagaatgagataagcttcctgtatcttcgaaccgccctgaaatcaaataaagccttagcataagaagcaaatacacaactctttgaaagaataagccagaacacattgaatatttcgcattataccactgccaggttcaacaagcgctacgaagttgagtgagagtgtggtcttcatcaacatgttgcatcactctaagctgcttctcagcatactctgctctatgc

SEQ ID NO: 11643 - DNA, 1289 bp, Arabidopsis thaliana
ctatatcatgggttcaacaacctgcagaagtggtgagcaaagcttgcttattctcaactcatgaagctgtctagatttccacaggtgaaaaagaaaaaaaaattacttttagaatctgaattctcatagattatagattatacgagtctgagggaagaatattgtaacaagcaggtatatgtgaaattcagtgctctattcaggatctcaagaaccggcttcccgtatcaggacctatcgcctctcctatctcaacttgtgtcccattttggggcaaatcgtgtcatgtggggcaggtaaacatacttatttacctcgctttcccgactaaaaaccacaaaaaaccttctatatctactaacaatacatgatcatatacggattggctgttttccatctgctgcagtgacttcccatttgttgttcttgaatgtggatataaagaagctaaagaagctgtgactatcattgcaaaagaagcatccttgtcaagttctgagatggactggattctgggaaagactctgatgcagctcttccctggacaatgggttcttccttgagaggcttgtcagaagtaataggttgcatgcggatgagataatgaagcaagcaatggaagttgtatcattaaagatacttaactctagcctatatattaccaaacactagatgtataccaatttagtaaatcaacaaaaatcttatgtgttgatatcataatgattcatcgtgagatgatggagggcctggatgttgatgtgctctgatcgaaaatttcttccacaatgggtgagctgctaggatcccctttccgtgttcaatgaggtgaggtgataatttataatcatcggtggctttgctgggacatttatgagggataagtttcaagaatcaagcttctctccagtagcttgttttacaagtaagtaagagttggcgtctccggttataatttatacccgtgtaagttagtttcatctatttacgaaatcgccatgatggagtatcgagttgtgcaagtgatagcaatgtggaattcaaagagacaattgagttttctttgagaattgaaagaagtggtgatcgagattagtcagcattgtaaaacttgtttgggttggattcttgaaatgtacaagcgcggtttcatatggtagaatcgattcagagagtgtgaagtgaatttacacaacttgctaaactagtagagcaagtgaagctcttaaaaatagaaatcctctctgcctaacaacttttgttttactcgtcttaattatctacattag

SEQ ID NO: 11644 - DNA, 490 bp, Arabidopsis thaliana columbia
atttatgttcataattacaattcttttatgttctttacaagcatagctatttgcaaactctaagatgtttgttggttactgcacttttaggcatatgttcagcagctagagaacagtcgaatgaagctaacacaacttgagcaggagctactaagagcactgcaacaggccctaactttgttcaactatatctgtgtagatatctgctctgttgcatacatatcattttgctcttaatcctagggtgtctttatctcaagctctgtagaccaagcccattctaccgctggagatggtgagttcgctgtctcataattcatcaccgtttacaggtgatgtggttgaacactttagttttgatggttataaagtagagcaagcactagtttggttgatggtgtcgatccattcttgcgagataattttttatgaatgcgtcgctcttacaggggcaatggcatttgatgtagaatacagacgatggcaggaa

SEQ ID NO: 11645 - DNA, 341 bp, Arabidopsis thaliana columbia
cccgacatggtaaaccataaggacatagtgcatgttaaagaaagaaaaaaataatccctatagattagatccataccttccaagaaaacgtatatcattggcgatcttcatcagcgatgtggcgattgtgttaagtgacccactggtttcaacacaagcatcgtgtgcagcctggaaaaagcagaataatttagcaactgatttcaccgtttaggaacatcttgtctagttggcaccagaggcagagctaggaatgggtttcgtgtcaataaataatagaggtagtttggaggctaccagagcttcgaacttgttttctgcagtgacaaatggcaagtttg

SEQ ID NO: 11646 - DNA, 465 bp, Arabidopsis thaliana columbia
  unsure (1)..(465): unsure at all n locations
nnnnnnnnnnnnnnnnnnnnctaaagggtgctttagtcgagtgaagaaaaacaagaatcaggtgaaggtggagagtgctgaaaatatctaaaacgattcacaaaactgtgagctcgtatgccagtcatttgcacgagtgtatggacctccggtgacatgtaagactgatgccagctaatgcagacgcagtagaagcatgtgttccagtccctagtagcacaggcgctgacgctgtataaatgttagccgtagtctgagccagacgcgggcgcgctctctcggaggangtcataaaatcagcaccagctgatcatcagcatcgatgaaaacgaagccgaagtactacaacgtggagtcggtcacggcgtagtcaaagacgaacgcgaacaaaccctgaaccatctcctgatagagacggatttgtatgagggatangaagtgattatcgtctacgcagcgacaaac

SEQ ID NO: 11647 - DNA, 553 bp, Arabidopsis thaliana columbia
  unsure (1)..(553): unsure at all n locations
nnnnnnnnnnnnnnnnnnnnnnntaaagccaccagtaccgggccgggcggattatattcatcaccttgccgatttactggcagaagcaagcggaacaattccagcgaatgcagcattctggatatcggcgttggtgcgaactgtatttatccgctgattggcgtacatgaatatggctggcgttttaccggtagtgaaaccagcagccaggcgttaagcagtgcgcaggcgattatcagttctaatccggggcttaaccgcgccattcgtctgcgtcggcaaaaagagagtggggcgatttttaacggcatcatccataaaaacgagcaatacgacgcgaccttgtgtaacccgccattccacgattccgccgctgcgcacgggcaggtagtgagcgtaaacgccgtaacctggggctgaacaaagacgatgcactgaactttggcggccacaacaggagttgtggtgtgaaggcggtgaagtcactttataaaaagatgattgaagagagcaaaggcttcgcgaacgaggtgatgtggtttcatcactggta

SEQ ID NO: 11648 - DNA, 385 bp, Arabidopsis thaliana columbia
tccatagtcttactaaaagagtggagaatattgtgatcattacaaatatatttcgagttgcgggaatatcagccatatacattgggttatcctatttattaccgttgtactaacttcaagcaacaaaaaactagcagaggagcaacttagatttccgatattagtaagttaggtcggtcttacttggtggggtccagagtaatagtgcacacggaccacgcggctttgagatacttattggcaaagaaggacgcgaaaccgaggctacttagatggattctacttctccaagagtttgatttggttataaaggacaagaaaggaattgagaatggagtcgcgaatcacttgtctagacttcgggtcgaggaggacataccgataa

SEQ ID NO: 11649 - DNA, 1135 bp, Arabidopsis thaliana
gaatagaagctataatgtagctgaacctagggaacaactattcttttgatttgtccaggctttttagccattttcagtttgtttatttcttcatatgagaaacagttatcttaccatataaccattttgcaaactagaaaacagatctaatctcaaatttctgacagagtttttgcaccagatttggtcttctaagtgttggctcttgttatctttatatcaatatccaaattttgttatgtttgcttttgctattttgttgctattgtcttgaatcgaattggcacagaaagagtatctggctaaaaccaaaaacgcaagagcggttgagaataaggtttggttgttctcctgatgaataggtcgttgacagagaagagccttaaagaacctaaggtgacatgaaatttttagcccttttcctgaaatagctttgtgttgtgttgtgttggtacgaaccactatatatatctcttttgtgtcttcacctacatttgctcagcctctaataaggagaaaaaagaaacaaacagttttggcttcttgaaaggaatcagaatcttttagctccacagttcttcccattgtgtaaatttgttttcgtttcaaaccgatttctttctattaaacaccatgggaggctgtgcgagcaaacctaaggaatctgatatccctgaaaccgaaaagactgttgtcgagtccaagaacgtcgaaactgaaaccgtatctcaggtttgtagaacaagttcattagagaatgatcggtttttatccattttgtctatgttttaggtgaaagatgtgtgattgttttgttgatttacaggagaaggcagatgaagttgtcacagaaaagaaggaagagtctgctggagatgtagcagagacaccgaaggaagctgaggcagccaaaccggccgaggccgaggcagctaagcctgccgaggctgaggtagccaagcctgccgaggctgaggtagccaagcctgctgaggctgaggcagctccagaggtggtgaagaccgaagaagctgtcgtcgaaactgttaaggagactgagccaccaaaacacgaggaggctgttgtagcagccaattacaccggttcttccttttcttccaggcggccgggggat

SEQ ID NO: 11650 - DNA, 520 bp, Arabidopsis thaliana columbia
tgtttgccactgtttcaactacatggagttgattgagttatagtgactataacaacattaggactttgaatttagttgtcattttttggaacgtgactttctgaaactcgattcttactgagtacttacggcttagataagtagatttgcatgaatcatgatctctgcgtgctttatgattcacatggtaaaaatgacacttgtgatggtggaatccctcatttatatttttgtgggatccaggtgattgttgagaaggctgagaagagtgatataccaaccatcgacaagaaaaagtaagcatataaatggcatcagtatccttttcattcggacctgacttgttaataatagtgattgataactaagcttttttcaaatttgcaggtacctagtcccggctgatctgactgtggggcagtttgtgtatgtcattcgcaaaagaatcgtattgagtgcagaaaaggctatcttcatattcgtggacaatgttcttcctccagcaggtaaacagatagat

SEQ ID NO: 11651 - DNA, 602 bp, Arabidopsis thaliana columbia
  unsure (1)..(602): unsure at all n locations
nnnnnnnnnnnnnnnnnnnnctaaagggtagatggtttatgtgtgcgtgtcggggcattgcgctgccacagccaggcattcactattaaattgaaaaaagatgtgtctattccgaccgtggaagaactgctggctgcgcacaatccgtgggcgaaagtcgttccgaacgatcgggaaatcactatgcgtgactaaccccagctgccgttaccggcacgctgaccacgccggtaggcgcctgcgtaactgaatatgggaccagagttcctgtcagcctttaccgtgggcgaccagctgctgtggggggccgcggagncgctgcgtcggatgcttcgtcaactggcgtaatctttattcattaaatctggggcgcgatgccgccctgttagtgcgtaatacaggagtaagcgcagatgtttcatgatttaccgggagttaaatagagcattggctattctttaagggtggctgaatacatgagtattccagccttacctgaagtgaggcgacgcagagaggatcacagagtctgcgccgttcaggtaaaaaaatgtccaacagaagtaaaaaccaattggatggggtgcacaataacaggaagc

SEQ ID NO: 11652 - DNA, 757 bp, Arabidopsis thaliana columbia
  unsure (1)..(757): unsure at all n locations
ttttttttaaagcgaactgaatcaacaaattaaagaaataaaattacaaataaataaacccataaaaacatttttaatttctcttccaaatctccaagtctccttaaaatcaatgtttaacgagagttgaaagcgccaagcaattatcagccatacggtacaaaaccccggcggatttataaatgacgttgacctccttagtttccttcatcgagtcgctgcaagtatcgtaatccgtcaaggcggcgctaaggttaatgttaaggctaaaaccatcattttccttaatgtttgtaagagccttttccaaattatcaaacgcgctattgaagttggacaaacaagtcgcgactcctccatcgcgtttcagctctttctccgcgattttcttggcttgcctcgtccgcttcatcaactcttttatggccacatccgtcgctgcattcacattagtttgacccttaatggtacttctgcacaatgcaggaaaatccgacaccgtgcaggggtcagctagagaaatactcaacgcttggcttgaggtagcggcgaggaggaggaagattgtcacatacggattgatagacatcgtgtgtatgatagatacacggaaacgtatatatattgtgtatatatacacgtcttgtgtttgcgatctgacaccgggtggtggattagtttttatggaagaaggagatgagtttatatatgcgtatgaataagnatggtatatttagtatgtttttgaacaagtatt

SEQ ID NO: 11653 - DNA, 545 bp, Arabidopsis thaliana columbia
agcggattttccaacaatgactatctcacacttggagtcgatcaacttcctttgttcggtggccgtactgctgttcaatgctatgaagattttatgctcagtttttcaacaaaatttgagccatatcttgggaatgtgattgaagaaataagtataggtcttggtccttcgggggagcttaggtacttctgatcttctgtggactaccaccggtaaagccacaatagctacaataggagtttcttacacagttatctcttgcagatatcctgcacatccttctggagatgggaggtggaaatttcctggaattggtgaattccaatgccatgacaagtacatgtgagtgcttatttattgaaaatttgtatttgcctgtactaatcacacttacagatttatactacttggtttaggatggaagacttgatggcagtggcatcccaagaaggcaaacctcaatggggaagcagagatcctccgaataccggctgctataatagctttccatctggagttccgttctttgaggagggcaatgatag

SEQ ID NO: 11654 - DNA, 506 bp, Arabidopsis thaliana columbia
  unsure (1)..(506): unsure at all n locations
cggccgccagtgtgctctaaaggcagtatttaggcattgaaccgttgcttgaccgtttaccaggcagcctgtccggagcgaaaaacagcgcgtgcgattggtcgggctttgctgacagcaccggaattgctgttgctggatgaaccgctggcgtcactggatattccgcgtaaacgcgaactgttgccttatctgcaacggctgacacgggaaatcaacattccgatgttgtatgtcagccattcgctggatgagatcctccatctggcagacagagtgatggtactggaaaacggtcaggtgaaagcctttgcgcngctggaggaagtgtggggcagtagcgtgatgaatccgtggctgccgaaagagcaacaaagtagcattctgaaagtgacggtgcttgagcatcatccgcattacgcgatgaccgcgctggccgtgggcgatcagcatttgtgggtcaataagctggacgaaccgctgcaagctgcgctacgtatccgcat

SEQ ID NO: 11655 - DNA, 480 bp, Arabidopsis thaliana columbia
agcactgtacaacgtcaggcagcagattgattttcaccgtaatggtgacctgttcaggcgtttgtcgctcttcatccagcaccgcgccggggaactgcgttttcagggcggcgagaatcgcttcgccacgatttgacgatgaattaacgttcactgtgtttctccgaaacagatgcggtgcctgaaggcaaaaaatcatgccaggtgctacgttgtgcaggcagatcgtgcgtccctgagaggactatagtggaagcgcccgccaggatcctgatgacaggttgtggaatatgcgttcccatcgccagcatcatgaccagcagaatcaccattggcgaggtggtcaacagccgagatcccccggttaacggcctgcggcggtttcgccattaacacccgcgcacgcatccgtaccaggcccgccagcaccagcgttaacagcaataacagcaggacgataatcagcaggtgattacgtgc

SEQ ID NO: 11656 - DNA, 418 bp, Arabidopsis thaliana columbia
  unsure (1)..(418): unsure at all n locations
nnnnnnnnnnnnnnnnnnnnnnnnnnctaaagaataagcggggttgctgaatcgttaaggtaggcggtaatagaaaagaaatcgaggcaaaaatgagcaaagtcagactcgcaattatcggtaacggtatggtcggccatcgctttatcgaagatcttcttgataaatctgatgcggccaactttgatattaccgttttctgtgaagaaccgcgcatcgcttatgaccgcgtacacctctcgtcttacttctctcaccacaccgccgaagagctgtcgctggtgcgcgaaggcttctacgagaatacacggcatcaaagttctggtcggcgaacgcgctatcaccatcaagcgtcaggagaaggtgattcactccagcgtcggacgtaccgttttttatgacaagctgatcatggcaa

SEQ ID NO: 11657 - DNA, 541 bp, Arabidopsis thaliana columbia
cagctatgtaaattttatcacttagaaaagttttatccattagactctgttctttttggtcatccaaggggcctggtggtactagaagatcttcatacattttggtggtattcagaaagaggttaatagaagaaccagtcccgtacagtcggccctcatagttagaaacgaaaagctcagggaagcttgaggcaacatattcctctcctcatcttttaggttcgaggtttagcgtgtaactcgatttggacggattatcaggggtttcccacgccaccaaatattgattgacgccccaatgaaaattccaacccaatgccatttttggaagtaagtatccgtcgggaaatggaagctttgccataagaaacctcgctgtgtcgttatcccctgtgttcttgatagcgaagtttccgtcagcaagcagttttttttttaaatgagtacattacatacttacacaaattacagaacaacaaatcaaacgaccgagttgaaataactagaaaatgaatagaacaactgcatcaaaccaaataga

SEQ ID NO: 11658 - DNA, 508 bp, Arabidopsis thaliana columbia
taatttgcagtcttccaaggtctacttaaagtcctagccggtatcgacaccaacttcacagttacctcaaaagccttagacgaagagaatgactccgctgaactgtacttgatgaaatggacaacatttctagtccaaccaacgactctgttcatcacaaaccttgtaggagtggttgcagacttgcagtgtttgattttgcctaatagttgtttgtagttgatgtcttaagggaacataggcagcgtttgattttgcctaatagttgttttgagggatcaatatattactcgattcaatccaattttcataccatatatcaagaaagatgaacaacaagagtcattgtcatgaaacccaaacatttatttagcaaaagagtttcagaaaaactgactcagaagattccacaagagtttttgtgcaatttataggcttgaaacaaaagaaattacttcaaactgtcaggttcttgtagacaaggagtgacttcatgcttcagaatctg

SEQ ID NO: 11659 - DNA, 579 bp, Arabidopsis thaliana columbia
tcatagttcttaactggtgatgcttcttcttctacaataaacacagaagaaaccatctctaattcatcaatcaactaactcaaaattgagattctcaagctcgaattcataccaattcataagtaaccaaatcgacaaatcccggagaatcgacgtcggaagtttgtaacggagctccgcagccgtaacaacatgagactgaggtatcaacaactttccgtgcaataatctcctctttctttttcttcttctcctttttgatctctttcttcactactttctgagcttcatgagctcgttggttctccaggaacctttctccaggggttggagcagcgccgcaaatccatctcgttccgagagtgaaactggtggttctgaattagctattgatttacagacgattgatgtcgtcggattacggtaaatgacggtgagattgggtcacgtctcgtcgttgtgtggcgacgaggaagagaaggaaacgttgagagtgttcgtacgccattgctgagatttttcctcacagctgttgtttgttgttatgttacctattaaaccctagagagagacaagaga

SEQ ID NO: 11660 - DNA, 569 bp, Arabidopsis thaliana columbia
ctagaggacgccacacaaacccagtttttgttgcagtccattatctggagtcccttgctactctgaagtaagatggtcagtgagctgaagtctgagtgtggtggcattcccaaggccatttcaggttccgggcatgctggataacaattcactgccatgacttgtgagccttcttctatctcttcttgtaagtaatttttctccagtcccaggctttctgagatagcttctattaactgcttgtgtagcaaatgtgttgcctctgcatagcttgcccactttatccctgaaaggtaggtgtgaatcagaaaataatatcagttttcatcaaagctttgttacaactttttaaaaaagagagctaggttttgtatatattgagacagtgaagctggcctaaaaatgttttacttacttgtagcatggaggatttgatggccacatatcgatccactttgagagtggatgagagtaatgcttgatgaaatctctccagtagtgaactctgtctgttgaatggttaaggcttgtgcatacctgactggctcatgaacgtttgcagacaccag

SEQ ID NO: 11661 - DNA, 596 bp, Arabidopsis thaliana columbia
ccccgaggatttgacgtctgttggaaaccggagatgagaaaacacaggtgaagatgcataatgtggtcagaagctttgcattgtggatggcatctgaacaggggacttataaggagctgatcctagttgagcctagcatgggacatactgaagctcctaaagcagaaaactggcgacaagcgttggtgatctcattgttagataacagaatccagaccttgcctgaaaaactcatatgcccgaaactgacaacactgatgctccaacagaacagctctttgaagaagattccaacagggtttttcatgcatatgcctgttctcagagtcttggacttgtcgttcacaagtatcactgagattccgttgtctatcaagtatttggtggagttgtatcatctgtctatgtcaggaacaaagataagtgtattgccacaggagcttgggaatcttagaaaactgaagcatctggacctacaaagaactcagtttcttcagacgatcccacgagatgccatatgttggctgagcaagctcgaggttctgaacttgtactacagttacgccggttgggaactgcagacgtttggagaagat

SEQ ID NO: 11662 - DNA, 907 bp, Arabidopsis thaliana
aattttgatcacctttaaatccaattggcttttcaatcaaacagcaaaaggaattcatgttttatttacaatgcaaaaatcaaacctcatgtgaaaacccatagaattgcattgctccccttagcattaactgcacgtcagatgcgagttccataactcctgcatactctagtctttctacccggtggtctatctctcgtagttccaaaaggttatttacacctccagctgcataaccattctgaattctcttccacaaatttgtcagcataggtacaatctgctgaccttccttgtcgattctcctctggagcttgctaatcacgattttgcactgcaaagtccaggaccaaaatagttcagactaacgaaacaaaatagatgcaccaaaaaatatcaaccgaatgttacaatgaagtaaattccatttaacagaacatacccgtttctgtatgatgtgggacattcttgcaccagcatttgaagagctaataggactagttccatcccatgtttctctggaagcttcagcgttatcctccacggtaagctgtgtagcattcaatctaccagattttggtgatgagacatggagtttggaagtactagctaccttctttgcaggtacactccttagtctcgaggacgaatcactctgatcttgtcttgaactatgcgagtcaacaactgtccttaactttgatcggtagctacgatccacttgcaatggctgagctgcaggcatctcactaccgtcaactctttctgccgtctgacggggtcttagacgaatactccgtttccgttttatcgtaggttgcagaacctgttcttcatcccttcatcacggtcatgggcccaacttcctgatcgttggagatctatgtgagaatccctgatgctgcta

SEQ ID NO: 11663 - DNA, 595 bp, Arabidopsis thaliana columbia
ggcttagaacctcttaatttcgataacaacatcgaattatccaatgcttcaaagaactttcccagattctcgtacctgcacaaatccaaatcctaatcagttaaaaaggggaaaaaattgaaactttttataaaccctagagattaaaacttacttctccggaagtttctctttctctgcatttttgttagagcttttacgttttgaaggagaagatgatgatgaatcgaaaaagagcctgcttttggcagatgaagcaaccggatcttcagatctgcgacgagatccagcggcttgacgaatttctttcactgataaagccacagatcggtttctcgatctactaagcatgttctcaagtggtttttccggcgtaggcaatgctacagaagacggatttggattcccggtttgagatttcgaagacggcgaatccatcaccaatcgtttcttcgatttgaatggaatggatctagaagagcctggtgtactcatttttatcaacaatgtctatagagtgtcagatgcagagaggagatagtggaggagatagatgaagacgatgaagacgacggaagaagaagaagggtttaga

SEQ ID NO: 11664 - DNA, 491 bp, Arabidopsis thaliana columbia
ttcttagcgtggaagcgcgcaagataagtttgagaagctggatatgaatcaagcattgcacagtaacgtagaggcctgagataagttaaatttgtatcagattctataaagcgagtgatttcttgcacaactagcctccactccttaaagtttgtctcctacacaagagaagaaatatgtataaaaaaagagacttgaaccaatataaatcacaacaagggtcagatcaaaagtaccctaaaattggatatgctgtgatcaaccaaaagcctaagcttgtcagctaagtgcaaaagcatttgtttccgatcaacaatcaacgaaacaagcagaaacctggcatagaagcgtaactccttaaatcgagcaccaagatctttcccctgagcttcatcaaagtagctccttttcaaaatcgcttcatagaaaacaaaagcctcaagaagaaacctagcttcactagtcctcatgtattgactaaagtaaagctg

SEQ ID NO: 11665 - DNA, 1169 bp, Arabidopsis thaliana
tagtaacggccgccagtgacgaactacttgaggaagtgatactctcatggactcttaatcaactaagagaatgtgagactacagctcagaatttgtgcccgacgtacataaaaactcaagagtacgtcttctcaggaacgagaatatgctggaaatggctattggttctgtgttataaatcttcttccaaacttatgtgcatcatcgttcacaaaccttttctcataatgttgttgcagtataaaattatgtcaaggtccctatgaccctatactgataaaagcatgggaagaatgggatgcaaaacatgggtctgagaatgatcacccagattttccggagaaacaagtcagattcttttcactccattagattttaaggtctgtttatataggatgctaaatgatttgtagaagcaatattcattttctgtgtggtgtttgcttccagtgttatgtcatgtttgttctggaacatggtggcaaagaccttgaaagctttgttcttttgaactttgatgaagcaaggagcttactggttcaggtaagttgtagagtatagattctatttgctgttacagaaattatgtaaaaatgatattttttcttccggttaatggcatgtgtttcacatctaaggccaccgctggcctggctgttgctgaagctgcttttgagttcgagcacagggacctgcactggtaattttagtgtttgatttggtaagtttactacttattagttttctctcgcttgaacttcttattttcatttctcttttcaggggaaacattcttctcagtcgtaataactcggatactctgccttttattcttgagggaaaacaagtttgcatcaaaactttcggagtacagatatccataatcgactttactctttcaagaatcaatacaggtgggtttctgattctcaatactgcgacataatgtaaaccataaggtccaatctaacacttaaacagttaaactaccaataatcatggtgctaatgtgctcaggtgaaaagatactctttctggaccttacttctgatccataccttttcaaaggaccaaaaggagataaacaagtaaggaaaattaattaagttccttattacccaagagttaagagaaatgtacatttgatttaagttttaatacggttatta

SEQ ID NO: 11666 - DNA, 505 bp, Arabidopsis thaliana
ccctagttgtgaagtagacattctttacctgaaacacaccaaactcatcaatactatcaaacacataaactcaacccatataatctagccatcatcccaattaaccaccatgcaaaacacagaaaccgtcactgtcctattaatccattactaagacaccttcacagtcattcctaacacagaaactctcatcatcagatgattcattccctaaatcatcattctcttgtattgatattgctgctgcaacaaactcctcatctgtttctaactcatgatatcctcttggtggcgccttcattactacataccaaggtgaagagtcgtcctctcatgagtagaagacatgttttgcttaggcagccagaatgtatggatcctgaagaaatgcagtttggtttaaatggagattgacaagagtgaatccgtcttcttctttcactccattgcctttgtttgcaaatgacactgaatataggacttgaacatgtggtagtccacaaga

SEQ ID NO: 11667 - DNA, 532 bp, Arabidopsis thaliana
tgcttgataaaaacgttacatgctgtggataatactactagagtaaattatttattacataacggtgcaagcgttgggattctcgtcgctaaaaagagaaatgtagtggttctcgggagctcccggcaacagctgcaactgcgactgctcagatttcctgacataaccggccggagcttttttgtcgtaagttccgaccgcgtatggatatgcgaccatgttgtaaggaacgtacggccatatctccgcttttttccctgtcctttcgattctctttaataccttctttggttccacgtatccactcaccgtcactttatgtatctttctattcacctccaccgatttcacacctgcgcgatttttatattgatataaagaccgtgttaatttggcttgttgtatgtagaaatggtttggcgtgcttacatgagtactcgtttaatggaaatcaaaattacaaaaaaacttacagaaaccattcatgacataagtagtctacgagttggagattcgaacctttcatggagga

SEQ ID NO: 11668 - DNA, 433 bp, Arabidopsis thaliana
gtccccgttccgttccgttctgtacacatagaatccgcaaagattacaagttaaaaagaaaagacagtacataatcccttcagagatctcatgagtttgacacaataaacaacaaagaagagttacacatatacctttaaataaactttaaattaatattagatttagattcctggtttaggagctgctctgcagagaactgggaaaggatccttgacccctaagaactttattaccttggcttggtactcaacaagaggcccatcaggaaactctcgagccataaaagtgatgtacaacctccatgtagctgctcccctttcagtagctctcacaacatttaccaattccaaagtatttccctgtgagaaaaaatgtataaaattccaaataaaccaaaatacgaaatttcttcaacgagaataaaaagtaa

SEQ ID NO: 11669 - DNA, 587 bp, Arabidopsis thaliana
tggtatgtagtaatgaaggcaccaccaagaggatatcatgagttagaaacaaaagaggagtttgttgcagcatcagtattaattcaggagaatgacgatatagggaatgaatcaagtgatgatgaaagtttttgtgttaggaatgactgtgaaggtgtcttagtagctgattaataggacagtagggagtctttgcgtgttggttaatgggagtttctgtgttggttaatggagtctttgtgtgttggttaatgggatgagtttttgtgtttgatagtattgatcagtttggtgtgtttcaggtaaagaatgtctactttacaacaggagaaccaacctcgccgcagtaagcgtatgccagggatagagttgagctctacttttggattaaagaaacatagaaaaagcaagaaaactgtggcagaaaaagcagccatagccaatcatcaacaggaggaagagactgaacaagtagctgatgttcttggttcagacttggctgcagaagaggaagaagaacaagtagctgctgttcctggttcagacttggctgcagaagaggaagaagacaagtagctgatgaagaa

SEQ ID NO: 11670 - DNA, 812 bp, Arabidopsis thaliana
gttgatttaacaaaatattaagaaaaaacatgtaaaaggctaaaagctggcctctttcaacgtcgaagtatcaaaacactagtgttgggcccattcacagtgtccccaaaagtcatattaatccatggagagattcagctaacgtcacagaaccgtcacataatctcatcaccgccttaaaactcataaaatctgacaggccacgtgtaaatgagcaataagttcacgtactcattttccaacaccaccatcaccgatacataataaaaaccatttcatcacaacagtcttcttcatttctttctaatttcttctcttcatgaattaagccaaaccaacaaaaaaaatcatttaattttcgcggagagatggagaaattctcgtacaactcttatccagattcaaccgactcgtcaccgagatctcgtgagatcgaattcgataacccgccgcctccatgggatgatcagaaccagaaccagcagcaacatagctacaaggtgaagtttatgtgcagctatggcggcaagattcagccacggcctcacgataatcagctcacttacgtaaacggagaaacgaagattctttccgttgatcgcgggattagattccctgttttagcttccaaactctccaccgtatgcggcggcggtgatggcggcggaggagaagttacgtttaagtatcagcttccgggagaagacttagacgctttgatctcggttacgaacgatgatgatctggagcatatgatgcacgagtacgatcgcttgcttcgtttgtcgtctaagccagcgaggatgcgtttg

SEQ ID NO: 11671 - DNA, 441 bp, Arabidopsis thaliana columbia
gaaccttgccccacaatctgttctagaggtgagccgacaaaccactaattttatttcagtagaaattttcttgcgctagaatatgttgaattctgttgcctttccacatatattattctggtgagatttattaaaatatatttatatatctttccagggtttgaatgcgattttggatcatcgtgctcaagtcttcatcccagaactgggctgtacctttgaatgccctccaacatttagagtttttgcatgtcagaatccttccactcaaggtggtggcaggaaaggtcttcccaagtctttgcttaaccgattcacgacagtatgttctactattcgttttctggtcctggatgctcatgacatgtcaaatttttattataattccaaatgaaaatttcatctgctccgcctcaaatgttttcaggtttatgtggacga

SEQ ID NO: 11672 - DNA, 508 bp, Arabidopsis thaliana columbia
aatgtttcttttgaatactgtgtgatctaagaaattgtacctttatgattagaagtgattttctcttacttacagtctctggtgctaaaggttttgatgttttgtttgcagccaatttatgggttttcagtgtcaaaagtgatagattctgggcatccagattacaaaaagggagacttactttggggattagttggatggggggagtacagtcttatcactccagatttttcacattacaagatccaacacaccgatgttcccttatcctactacactggacttctcggtatgttatctctgcttctcttttgttcatgtatgtaattcacttgatagtgagaaagctggctatatacaatgcttgatgtacctctctctatgattattggcatgatagaatggtcttagaagctcctaatcatgtagaatagttgttttggttgctaacatatctaataacttggtcaaaactctacaagtttcagtagtttactggtagtcttag

SEQ ID NO: 11673 - DNA, 681 bp, Arabidopsis thaliana
gcattggtccattacatgaacatctggcctaccgaccaatgtttatttatgtgattttttcacgttttgttcacttgccaaatagacaaaaaggtcaagtgattcttgcaaaaccgcgtttgttgacttaaaacaataatcacatggagaattcatcaatattttatctaaccatagaatttttttatttattttgattaaaataccgctttgtataccatggtccataatagtcccagaaattaccctgttttggacacacaaaattctaactgagacaatatcatgcaaaatttcaaagtgaaactcatttcactttatttcctcctaacttatcgtattcgtacgtctatatagatgtttcacacaaccgctacaacggtcggacggcctattccagcaccaaaaagaccataattcaacatagaaaccctctgctttgccaccggaaacatattctcctcagtttcggatactggcgacacagattttatctcacaagttccaaaccatttagcctgcatgtatttgtgttttctccaaggacacatgtgcatcttcttgtctttcatacacttcttcgctgcggtgcacaatatctttattaatgattttagcctctccgttttaccgacatacacttcaggtaacattccgatgagtcgcttgtactcttcactg

SEQ ID NO: 11674 - DNA, 814 bp, Arabidopsis thaliana
ggctcttttgacgccactgattctttctcagctttcgacggctcactccaagtcgaggactccgtcgacgatgtttttgcagcgccgtcttctgactacggtgcttactccaacggtgacggcatcttcggatccaacggggatcacgacggtcctatcttgccaccaccgtcggagatggaatcagatgagggatttgctcttagagaatggagaaggttagatctactcaaagttttgatctttgttgctttttgtttacttcttcctgaagaaaatcgataaagtggataaatttagttgagaatctctttgataatctgagaatttcaattttgaattttgattcacaatttttgtgaattgaagttatctgctagttagtgtccattgttctcagaagtaatcagtttattagattggatctgttacttttgcttagagtttattgctcaaatcgtgtgttctagaataacatcttgatccgtaagcttgtaatgcttgttgagttgattaagatgtatagatctgatttcgtgctatggctttattatgtttatgtgtagacaaaatgcaattcaacttgaggagaaggagaagagagaaaaggaattgttgaagcaaattattgaggaagctgatcaatacaaagaagagtttcataagaagattgaagtaacttgtgaaaacaacaaagcagctaacagagagaaggaaaaggtttgttcttttgctaaaagatttgaattttttatcatcttttctcaatctgtgttgttgtcatgtggtttgtggagaattgtcaatgcaagtc

SEQ ID NO: 11675 - DNA, 539 bp, Arabidopsis thaliana columbia
tatcaccaaactattctctaaatcaaactatctaaacttctagaggagtttgttttcgcaacaaagtttatagataacgataccaacctgcccaattcgtccaaatccgcaaataatgatgtgaccctgtaaatcatccgtctgcaagtaaattcagaaagtaaaggatcagtcatttttaccccaagaatgcatgagcttcggaaggatattgaggtcaatcatggctttattgttttaaatttacaattgaaactaggaatggtgataaatgacttattttaaagtgttgtgaaggagtacctcgctttcaactggtaataaacttcgaacatgttgtaactcaaatcgagacgcaattaattggccgccagcagctaaccaaggagtaagagccattgatatcccacgacgagaaacagtaatgaagatagctgcggagtcattataccgtggaagaaatccaatcaagccttagaggaaacatgggaataaagtagaactgaaacctcagctgtcatatccataaaacatgacaa

SEQ ID NO: 11676 - DNA, 528 bp, Arabidopsis thaliana columbia
tctagttttacaaattatgttgattccttcttgagcatataagaaaagggataatttagtgagcacattcaaaaatttcttgatgtatgcagcgatgggatgaatggttacatagcttcatgtggtggagatagtcagccttcatgtttctgctccacagtcgagggtatggaagatgttttaaccaatcaagtcatgtaagccctcaatacaacaatttggggttaatcacttttttgccatccccatccatccccttgagctttatgaagatgcatattggaatctgatattcatcaaattaacattcttttattttcagttgtgccatatacaaacttccagaagatatcagaggcagtgagattactcatcagattccaagattggcaatccctaaaaaggtattgttgagtttactattgattggctccaattttggtttcaagttgtggtgaagacaaagaactgctttgatgggtttagtagtagaccaaagtccttgtttttagtggttagttacagtgt

SEQ ID NO: 11677 - DNA, 836 bp, Arabidopsis thaliana
ggaagatatagtgtaagctgattaattggtcttaataaacactttttttttgtcaacaaatgaagcatttttaagtttgtaacaaaaaaacttattgcaaccaatgtgtatatccaaaaaaaacaatcactcatccaaagccgaagatttatgtgaaataaaacacaaacagtcttacaaacacacaaataattaattttatttagtatttttggtctgttttctttaaatgtatttcctacattgaattttgtagtggaattcaatgtattaagtttagtttattcatatataatcaatgttataaaatttttgataagagttaatcggaacattgtttagtcaataaagatagcttaatttcatatataagtcagccgtctaagctgattaattggtcatacaaaagaaattttttaacattttactgacttttttttaaccaatttgatgaaaaccaaagtggtcgaatgatttttgcttaaacctagttttgccattaaacaaaggtttaggcggtggatttttaagacgagagacaataactaaaaaacaataccaaaacaaacaaaacctaataaaactttcggtatttaaagtctcgataacatcttcttccacaagtctctctctctctctcttccatagaaaatatgaagaagctctacagaaaaggaaccgtacacccgtcgccgccgcagataaaatccaacgaccaccttcttactcttcttcccgtcgctattttctcactagcggcggttctctcagcggaagaccgtgaagttatagcctatctcatatcaaccgcatcttactccggcgagcgaaaccct

SEQ ID NO: 11678 - DNA, 596 bp, Arabidopsis thaliana columbia
cttagtgcaattcaaatttcagtctcttttatgggaccataatactctcatttcaaaatcaaacttcatcacctcctttcctcaatttcaggggttaattctagtgtttttttcattcacatgaatttggtttagcttctttcgtttataccaaagaaatctagtcaaatgttacatacaatatatattacaaatgaacataaacgacaaaccatcatcactccaagcactagataaaaaagagtaagagaataggctagagactaattaaacatccaaatctaaccccaaacaattcaattctaaaagctaactcaaaatactagattaacttatcggaccaagtagtcaacgccaagaggaaacggtgaggagaggcacattgttccaagccaaggagatgaaacctggctccgattcaacaagtgaatacaatgtactataattgtagttccatagtagcagcttcgcttggctaaccgcgtaattactcggtttaaccggctcaaatccagctttctccatcaacactctccattgttctttctcctccattaacccaaaccggggttccaggtttattattatcatcatct

SEQ ID NO: 11679 - DNA, 329 bp, Arabidopsis thaliana columbia
tgagagtattataagtcactgcatttgggaagaaacctttacttaccaaaacattaagaacttttttggcttcatctagaagaccgtgaatgcaaagcccgttgatcagtgaattgtaagtgacaatattaggattaactgacctttgaatcatctcattgtactgtttcttagcctctaaaagctgcccctctttcccatacacatcgatcaaagcactgaaagtgattacatccgggctgattcccatctcatcatatcactcagtattcgagcagagacgccccatgtaccagaatggaaaaggcgagtaatgagagagttgtatg

SEQ ID NO: 11680 - DNA, 695 bp, Arabidopsis thaliana
gacgcgtcatgcgaaaagcttcttagtttaaacattactgtttccaataatcaagcttttgagctggaggccgcacaggtatataaggctgcttttttagtaggttgatcaacactgaaaggcgttcaggtttttgccatcaaaccagaaatagatatcggtttggtaaattacttttggttttaatggtttacataaaatcgtcaatcaaaatcccccaagcctgcattcggaaagacgattataccctttaattcttccaccctataaatactcgcatcgcatcaatcgtaatcagaactattaactttcattttccgatagaagaacttttttcacggcggcgataacaaatcaccggctaataaaggaaggaaaagaagaagaagagaagctatgacaacaatcagtcttcgcaagagtaacaccagactcccaccggaggtgaatcgcgtgctctacgttcgtaaccttccctttaacataacgagcgaagagatgtacgatatcttcggcaagtacggcgcaattcgccagattcgaatcggttgcgacaaggcgacgaaaggtactgccttcgtcgtttacgaggatatctacgatgccaagaacgccgtcgaccatctctctggcttcaacgtcgcgaatcggtacctaatcgtgttatactaccagcacgcgaagatgagcaaggg

SEQ ID NO: 11681 - DNA, 1191 bp, Arabidopsis thaliana
atgaagatgaacatcatgattgatataatgttgtagttggaagttcataaattctgtgtctttttgttcatgcatcttcttcttcttcagtgacacagtaagaaaataatcactttgggaataaattgtgaagcatttgtccacaaagattctacctttctgtactaagtagcctacccaaaggatatataagacgattttaaaatagatttggtaagtaatgatgtagagtggaccagtagaaaaacttataaatgaatttgttgttataatgtgactttgaggtttggagtcagtgacttataaatttgaagcatgatcttgtggggttttgtgacagagcaaataagttaaagcagccatgctggattctttttcaaataaagaaacatttcaaaaaatagaacagaaaaaatgatcatatctactacactaccaaccacatgcaaggaattatgaacactataaagcatgagtgtcattgaacatttgacaattcgtttgttttctcgagaataaaagataactttataaatggagattcattttaccatcttcttgatgaattcacaaattagaaattacaatcaagggtaaaaaacttgggggtaacttctacatatacatgtgtgtggttgtgtgtgttcataagaatgaaatcaactatcttcagagaaatatcttttgactctaacccgctcaccattgaagtagatgtatttgtattcagagaggtaccttctaaggatcagttttcgattttcttcttggttgagttccctgaaggctcgtgccactctcctcgcagagtcttcgtctgggctcaccttcagctcttccatgtctgcaaagacctaaaagagaacaaccgaaagaaaatgtatcttagaaccacgtcatacttcttgcagagaggtgtagagtatcttgaggagtatcttaagtgtaagatcaagataaattctcgagggaagaaagaaccttgttttacctcgataaccttatcgtgaaggtcatggtgagcatacaacgctatcatcctagcgaacaagcgtcttgggatggatcgtgtatgtgtgtgcagaatcatgttccataaggactctgcctcatcagccctttcgtccatatcaaatgccaataagaggatatcgtatgttcccattgtagcaccttgccctttgcttaaca

SEQ ID NO: 11682 - DNA, 486 bp, Arabidopsis thaliana columbia
gtacgtaagtcaatgagattacttgcagactactcatccgaaagcaacttgcaaatgtaatgtgcttaccactctttgaaaccttcaatataaagaacaacaatggttaattagatcataagcaaacaagaaacatttcaagctttgaggcaaagaaaatgaagaccctatttgtcctttttcttctccttctctgtgttttcgcgatcaacgcaaatcaagaagaagagaacctaccacaatctcatcataatctgcttcacaaagtccaacaatggagaacatctctgaaagaatcaagtgctgcagaactcaagctatcttcagcaatcattatggccggagtgttatgtttcctagctgccttaatctcgagcgcaggtggaatcggcggtggaggtttattcattcctatcatgactatagttgcaggggttgacttgaaaaccgcgtcaagcttctctgcttttatggtaccgggggatc

SEQ ID NO: 11683 - DNA, 580 bp, Arabidopsis thaliana columbia
gaattgtttaatttttgtgtggcagtgaggtgctaaaccggaattggaacgacacagattcaacggttctccctatataccgggaaatgattgccggcggaattagagtttgggttttcaggtctgcaaatttttgtttctttctgaaaaatattgttagtgccaaaatttatgactgactgttataacccgtgataactttttggttcagtggtgacgtcgattcagttgtaccagtgacagctactagatactcactagcaagacttagtttgagtaccagacttccttggtatccttggtatgtcaagaaacaggtatgtgtaaagaaaacccgaatcttgtttggttatctctggtttgacaaagaaatcgatttgaaccgaaattgtggatttaggttggaggatggacggaagtgtatgaaggactaacgttcgtgacggttagaggagcaggtcacgaggtgccattgttcaagccacgtgctgcttttgagctttttaagtatttcttgagaggcaagccacttccaaaggcttacaaaaattgaagtcaagagagagattgtaacatttga

SEQ ID NO: 11684 - DNA, 1147 bp, Arabidopsis thaliana
accacacaaatacgctcagtcatacacttatcaatctcaatcttaacaatcaattctattctgactgaatcaattgtcataaaagatcgagtcaaaaatacctcaatctcgggagattcgagtgttgtacgtgtaaacgagaggaggatggaagagaggtagcagcaggagaaggcgagccgagattgctcgagggattgctgttttgtagccaaccttcttgaacttgagaagcaaactgaagattccacaggacatcttcaatggaaggacgttctaaacggtctttaaggagacaccttacacatatctccatcattgtcttcagtgattggtctgaacaagctctatggaccgttggatccaccatgctcctacgtgctccatcatccgctgaaatgcttgcttgtaactacaacaaataaaaaagagtttttaaagtagatgatagcgattccacatcaagctacatatatatcgaatggtgttacctgctcttttagaacatcgacttgactctttgctctcaatggtcttcccactataagttcaagcaatatcactccaaaatcatagatatcgattttatcttcgtctttgatgctgttaagaaacagaggattaaaccatataaaccggtttacaagctgatgagaaacagaggattaaaccatataaaccgtttttgattcttttgagaaacagaggattaaaccatataaccgggtttacaagctgatgagaaacagagtaaagaagattattacacaccttggagtgcctttaggtccgctccgagatcctacttgccccaccttagaaaggaaagcaaaagagattcaaaattcaagaaacaaaaacattcgaacttttgacatcgtcatttacctttccaagaccttccacaagcaatggaagattatagctactgagtttcgccgcaaggttattgtcaagcaaaatgtctgtcattttaaggttgttatcataaacaccaggcacaataccggtatgcaagaactggatcccttttgctacacctatcgctacgcttatgcgttgttcccaagtaagcaatcttcccatgtgcccatctagcacagcagagacaagaacaatccgatttagttattaaaaaatatataat

SEQ ID NO: 11685 - DNA, 865 bp, Arabidopsis thaliana
catgtattaaacaaatactactacttcacctaacgtattttaatgtttgtcttgtatacaacttggtccctctcaccaattatgatcactagtgagcccaaccaaccgggcccaatacgctttcatcttctgggcccaatcatttttttcctcaaacttcaaaattttcattacagcatatcgctggtgtgtgcacggcatgcatgacaagctaaaacgaatggtggatataactaacatatacagcttatactatacatggtatacaaacaaaaatgatgatccaagctaacctactcactcatagttgtccatttattctttctcaaaacaaaatcccatacaccagacctctaagtctaagtctacgattacgagcatagtcacaatgtctctcgccaacagtctcttatcatcaagtaagtttcattattttctccccaatatcactttgtcgcatgcatttccatcctatcatttccccatccaatctcctttaaaaataaaaataaaattggatttatttctttcagtaaaaatgaaaaagttgtaaattagtatagtcttcattaatgttcatggaccttgattataaataaatgtcaaaaaatgaaactagacttgagttggtcttcctcgtcgcccatgccgctgccttccgtgacgccactccacgtcgacgcatttacttttcctccggctgttgagtcgcccgcttcccacaaaagacttttcctcggtggtgcaggttagcatcatagtctgtctatacaattaatgcacacagcagcattatgtggctaattacctttaatcacgcagggatatgatggtttgatattaaaggcaagttcgtgattgtgac

SEQ ID NO: 11686 - DNA, 813 bp, Arabidopsis thaliana
acattgacaacttgaccaagaacatctgcacgttgaaaattggtcttatatttaacgataaagtgttcaagttttaatttagcacactataatattaatgaaatacctaccaatgaaataacatggattcagttcaccaacaattatggattgaaatgtgggtaatgccatgtaaggatcatcaaaaatagaaacacatggtgagacaaatgtatggctaataaaagacatcttgaactgatgatcagtaacccggaaatgtcccctgacttgacccaaagagaagttctcaataactctccactggtcaagcgcaatgtgcctttcatacatattcaccaaactctttttaacacttgcatggatcttggatccctgtcacagaagattatagtttatcatcaagaagtatatatatgaaattaagaaaaactttgatcatattgcataacatgaacgtaccctctgatcagctagtaccatttcgagtgtttctcctgactgagctgtgtattgttttcaggtatggaggattttcacttgcacacgccagctggttttgaagggcttcaggtcagcaaggtaagtcgtagccattgcaccattcattttgtttataacttgttgctatttaattgcagtagggtgatgtgtttagggttgtaagttatgtgagtatttatagttttcaatcatacattgtttaggttagaaaaatggtataatcaaaatagaatttaagaatattctggaaccaaatctgcataactcgaagatatgaaatcaaaactgttatgatatataatgtataaa

SEQ ID NO: 11687 - DNA, 898 bp, Arabidopsis thaliana columbia
tccatggatatcgaaaaggcagggagcagaagagaagaagaagaacccattgttcaaaggccaaagctagacaaaggcaaaggaaaggctcatgtatttgctcctcctatgaactacaaccggatcatggacaaacacaagcaagaaaagatgagccctgccgggtggaaaagaggtgtagcaatcttcgattttgttcttagactcatcgcagcaatcacagctatggctgctgcagcaaagatggcgacaacggaagagactcttcctttcttcactcagttcttgcagttccaagctgactacactgatctaccaactatgtcgtaagtttctctccaaatgttactcttactataggttatgccaagaatgtagtaaccaactatggaaatgaaaccccaaatgtgtatagtcgtactatagataataccaagactgctacgtagcttaacccgttgaatccaaccaaagccaggctagttgcaaagttcaagcagtagttagagagaaaaaatgagctacgttttaaataaggggggaaaaaaaactatcaacatgaatttcgagcaatgtgcttggtgcttattagggatttaattatggtacatgattttcaattatataaagattcaaacttatatcatttttttttattgttttgttttgcagatcttttgtgatagtaaactcaatcgtgggtggctacctaaccctctcattgcctttttctatagtctgtatcctccgccccctcgcggtgccgcctaggctattcctgatcttatgtgatacggtaacatttataaaaaaaatttgaaaatgcatagttataataatgcaatgccaaacatacaaatgaaatttctcattttgtttgtggtttacaatgaaactt

SEQ ID NO: 11688 - DNA, 497 bp, Arabidopsis thaliana columbia
tgtaaggacaagctttatcacacacgtgaacgcgctcatcaactgctcagcaatggacactctgatgtccctgtagaggctactttcattaacttggaacaggtatcattgcaattagaatcttttaactcccggttatgatttggtactaaaccactctctcatgctatttgtgtagttcttggaacctcttgagctctgttaccgatctctgtgttcatgtggtgatcgtccaatagcagatggaagccttcttgatttcttgaggcaagtctcaacctttgggctctctcttgtgagacttgacataaggcaagaatctgaccgccacactgatgtattggatgctatcaccacgcatttagatatcggatcctacagagagtggtctgaagaacgccgccaagaatggcttttatctgagctaagtggcaaacgtccgcttttcggttctgatcttcctaaaaccgaagaaatagctgatgttctggacacgt

SEQ ID NO: 11689 - DNA, 926 bp, Arabidopsis thaliana
tccctaatggaatatattacaactccttcattaagtaacgatttataaacgttcagagatggaagagaaaaaaataaagtatggtggttagaaaaaaaaagatacgatgtgaataactacaacttgctatatcaaaaatattttattgtaattccgttatcatctaaacttaatttttgttagagaacataataacagtacatccaaagttaccctaaaattacgtgaaacatctcatgcaatgaatttacgtacccaactttacttgcatggggtatctataaataccctctaaaacacatttcatgcaaaatcaagcaacacttaaaaacccatttcgaaagagaaacatttctaaaaacagtctagtaataaaaaatgggcaaactcttggttgtaatgttaattgggatgttcttggctttcgaaagcttggaagctcttgactatggagatgcactgaacaaatcaattttgttctttgaaggccaaagatctggtaaactcccgactaatcaaagggttaaatggcgagctgattctggcctgtctgacggtgcatcagctaatgtaaaccgactatattcataaacatctctatatctatgcatatatgtcttccgaaatggaaccttatttcataagttttggcattatgttatctcttatagacttaaccaaattttcgggtgtttgatttctcaggtgaatttgattggaggatattacgatgctggtgacaatgtaaaatttgtgtggccaatgtcatttaccacaaccttgttgagttgggctgcacttgaataccagaatgagattactttcgttaaccagcttggttatcccggtctactatcaaatggggaactaattttatcctccgtgctcatacgtcgaccaacatgctatatacacaggtaactaac

SEQ ID NO: 11690 - DNA, 587 bp, Arabidopsis thaliana columbia
ctctaaatatgtagggtatccttatatctttcgagttttaacatgttccaaatcactttttaccttctttcccactctttggttacttgtttacccttatttttagcaggaattctatatatgttctaacatgttcctactttgtatatgttcgacttttgcaggaattcggagaacatcatccatatctgcagggcctggtcgcagtgatacaattgcaagtttgctagctgcattaatggaggtggttcggacaacagtagcatgcgagtgcgtgtatgtccgggcaatggttatcaaagcattgatatggatgcaaagtccagatgaatcattggatgagttaaaatcaatcattgcctcggagctttcagatcctggttggcctgcagctctagtcaatgatgttttgcttactttgcatgcccgctttaaggtaagtatgatgttttcttggcttttttgatttccagtgtagttgcgaacagtttcaaagttaagcagctctgttgtttgccacaatcctataagtatttagtagtctctgatgtacggaatctcttaatttcttagattttgtacaagag

SEQ ID NO: 11691 - DNA, 843 bp, Arabidopsis thaliana
atcatcatcatcttcttccaccgtcgttattgccaccgccggctccagggaaatttacagaaacccgacccggattcaattcgggtttggacccgtttgaaatctgagtaaggacaagggatagtgattccaccttcttgagaaaacccaaattcttcttcagcctctctaagaagctcaccaaacagaggatggttaaagtaaacgataggcaccaaaactctctgaaagtcgccgtcttttttaccgatgtaaaccgccgagtgacctttcggaaccgggtcgggcttttctcgaatgggttcttgaccaattggtatgtaccctgaattggagcatttagacccaataaacctggcgctgtgggatgtgagacttcgaccccaacttatgagttttgtgatggctctcggcttgcaaaccgggcggtttgggcttaaccgggtgtatcttgaacgacgaatcttaattctccggaggatccatcttgagatttgtttaatcggtcttctaattttgattcctcttaacttcctcatcgttgaaaaaacaaagtaacagagcttgaaaaatgttttgaacagaaccgtttactctgttttcatcaaacaagctttggagtttcaaacgggaagagaaatatagagtattgaggaatttgtggctgtgtaaacgctaaagaggaagagcagagtaagagacagagcagtttaaatagagaagaagccaagcgagactgagtcagctcaatggacgattggatgtaaagaaagtatcacaacctgttggattagattgtaggaaacgaaacgttcccctttttgcttttctcacctagagaat

SEQ ID NO: 11692 - DNA, 1103 bp, Arabidopsis thaliana
tctccctttgtcccaaatggccaatcctttagtatataatccggtgctaatcttcattatattggattctatattcttttatcatcgactaatcacaattaggctctagtacaaaatttgattatttacaacaaccgttcaaactccaaagattgagccttttgagatgtggacgtaacccttagttttaaaggtggaaacctttcgagatattttagagcatctttctatatgcagatccccaattgcaaaaacattaacttcatggaaacagtagttacaagcaagagacacaatacaagttaaatgtttgtgttttgagaagatgtcttggtaaaggaacaaaatttcatccagatatgaatcatttacagttaaaaccaaaagatggaacctttccgacatttgagcttccatatgctcaagcaagtctctgttctcgactcctgatagcgtcttcactctgtttttaagttagtgagaatgagttccgctaatatatcgacccatgtgtcaggaacaccgggtaggcaccaatgcatacagtcttgtccccatattgccaccgcgtcctgcttccctaaccagatcgctgggtgggcatctgctctgaattcgcttagatgggtcagatcaagtaacttgatctttgtcgtttgcaactcattcttgatgatttggttaatctttcttgcttctttgttcactccattgttcctgggatcaaaccacaagtcaagctgtctaggtcttagcatcaacatcatttatcagaatgcaataggattaaatcgaaagcgaatatctttgccacccatctctgaggaaagcctagagaaagaccagacttgcttagtaaagctcgttaccatacctggttttcttcgagtggcttatcgagcaaacaacttccattctggttccaatcaccaccatagaaatgccttggtgattgcaaacgccagaacttaagggtcttcgcagggacttctctttggatataagaaaccatattttgaagaactagttcaaatcctggtaatatatcaagaggaggatttatcggctttacctttcggtagaagacaagaggtgtcggggat

SEQ ID NO: 11693 - DNA, 529 bp, Arabidopsis thaliana
catttccaattgctcaaaaataagcaagacaaatagggcttttacaaaaacagaaagggatttttcaatggttcttcctggcaagcttagtccattcagtatggtacgcaccaggacgatcggttctctcataagtgtgagctccaaagagatctctctgcgcctgaaccagattcgccggcaatctagcacgtctataagtatcgaaatacgcaagactagcacacattccaggcgtgctaatcccagcagaaacagccaaaccaacaactcttctccaagcagcttgtctctgaaccatctctttagcaaactcaggatcaaccacaagactagccaagtccgggttcctctggtaagctttcttgatcctatccaagaaaaccgctcttataatacaaccacctttccaaatcctagccaattcaccaaaattcaagttccaactcttctctaaactcttagctctaagcaaattcatcccttgagcataactacaaatcttggaagcatacaaagcttgcctaac

SEQ ID NO: 11694 - DNA, 563 bp, Arabidopsis thaliana columbia
  unsure (1)..(563): unsure at all n locations
catacaccaatactttgatatcaataagctaatgctcaacactatgtgaacattcaacacctcacgcaacaatcagagccaatgtggcagggcaattggagaaattgatgtctgacttgcgtcaattgggtgtaattgaaacgcagtgttatgagcaaaatgtaccatcgcgaactaaacaaacgacaaaaattgacacgaatcgacgataatctaacgctgcgaacgttttgaatcagacttagaagcaacaagtagcaatcgaaatccccaaaacatcctcgaatttctaaaccaatctcactggggaaaatctctaaatcgaagaatcaaaagcacccaaaactcacaggagatctaacaacgacagcatcttcctcccgatctacaacaccacaaccatgaacgaagctcctgtcgttattattactgagcgaagaagggttaaatcgatggtaatcatcggaaggatgaaacggaggttttgttgaggcganacgtaagtgacgacgtataggtggtatactggcgtagatgtaccggaaccgagatgacggtggatg

SEQ ID NO: 11695 - DNA, 516 bp, Arabidopsis thaliana
caggtaatctagcacgcctgtaagtgtcgaaatacgctaaacttgcgcacattcctggtgtgctaatcccagcagatatagcaagacccaccactctcctccatgcagcttgcctctgaaccatctctttagcaaaatcaggatcaaccactaagctcgccaaattcgggtttctctggtaagctttcttgatcctgtccaagaaaaccgccctgataatacacccacctttccaaatcctagccatttcacccaaattcaagtcccaacctttctctaaactcttagccctaagcaaattcatcccttgagcataactacagatcttagaagcatacaaagcttgcctcacatcatcaatcaacctcttcttatcaacaccacgagacgcagaaccgatatcctccttcaatccagcttcttccaaaactttagcagcattctccctctcatccttcaatccactcaagtatctacaatccaacgacgcagcaatcgtaggcgccgcaacagaaa

SEQ ID NO: 11696 - DNA, 887 bp, Arabidopsis thaliana
  unsure (1)..(887): unsure at all n locations
aggacaaagacaccacctccactaccatctcctttcaagcaatgagaaaacactggcggcgtaatccctcgtgatgacaactgagagacaactgacaactttcccttgccgaaaccaaagattccatccactgctttgtctgactttgtcaagtccccagattggtaggtactacagctgttgcaaatagaagaaaattatgtacaaagtttaagatctttaatatgccatatactctacatgcaaaaacatggctagtgtttgagtagaaaaagttctcacccgaaaacaatgggagcagatgagtttgcaaccaaagactctcccaaaatcgcatcaaaatagaaggtgtcagtcatgtagtaacctgaagtcccacttccatcgccatagcgaaaggagtaaccacactggttattctcagaacattgtgcagctgtcgtctgaaaaactgaagaacaaatcggatctgaacaagtaacagagccagcagtcaaggaaccaggagcatcaaagaaatgaaggtcgatctgaaatgaatttgaaatagacaaaggataagccttttacacttgtctgtgctaatcccattatttcagtaaaaaaacttagacaaagctacttactccaagtccactagagtgagggcaattactgcaagaactacaagtaacccacaagatgtcacttccagtatcaatctgaacattgaactctgtaggaggagaacctaatttgacctttgtgaaataaagcctaccaagaaacaaaatacagctacatatcacaaaagagaagataataaattccattagaactccaataacagagtgtgtgtgcaaatgtgacatacatagtcatcttggagctgcaacacnaagaaaaag

SEQ ID NO: 11697 - DNA, 554 bp, Arabidopsis thaliana
cttgtgaacccaggttaaccagctgtgagaaagatttttttgtatctatttattagttattacaatactttgttgatgaaagtaagagataaattgtagtgacaaatcctcattaacaaaatattgtaagagataaatacaaaaaaaaaatcaaatcaaaataattaacaaatatgttccatagttttcagatctatacaacatgttttagacattgacttacaacattcagaagaacaacaacatattttgaaacagaaacaaacatttgacatgagagactaaacgtcaatattgttctctgtttggtaaagctccaccatcttcttcttgtttctcttatgcagagtgtagaagtaagatcctaaagccacaactgttgctatcaaagtaccaattctaggccaactaaactcatcatccatgaaatcaaatgccaacacaacaaacaaagccacaagtggtgaagtacacatatgaacaacatcgccaaacacacccgaaacataaagcccaaacccatcagcccgaccgcccaaacctgccacgacaat

SEQ ID NO: 11698 - DNA, 608 bp, Arabidopsis thaliana
ctcatcttactttacatctctcttggtgttcttgttgctgctcacagcaaattgtttgcacttgggaaattatacgcaaactttggcgtcttcacgctgatttccgcgactcagttgatatttaccgctattttcgcagccattattaaccgttttaagttcaccagatggattatcttatcgataatcggcagcattttgatttatgttttcggtagtcctgaatttggaggagagcctgatgaaaacgaagaattctacagcatccaagcttggttaactttcgctgcttcagttgctttcgcattatctctctgtttattccaactttgtttcgagaaagtgttggtaaagacaaagagatatggtaacaagaaagtgtttagaatggtcatagagatgcaaatttgtgtctcttttgtcgcaacggttgtttgtctcgtgggtttgtttgcgagtggcgagaataaggaactgcaaggcgatacactacggtttaagaaaggagaaacgtattacgttttgagtttgatcgggttggcattgtcgtggcaggattgggcggtcgggctgatgggtttggtgcgttatgttcagggtgtgtttgc

SEQ ID NO: 11699 - DNA, 430 bp, Arabidopsis thaliana
tcgaaaggcttttaataattattccaatctgcaaatttaaaaacgactaagttagcatgttatataattttgtacaatgatatttattttataataatcaaattaaataaatgatacctgtataattaatctacaaaaggttttggaatatttctttgaaaataacatttgtttgtttctttcttctgttttcctttactgtctgtaataagaaccttcagccttgcctttgatttcactctagacatagcgacatacaactgtccatgtgagaaaacaggcttcagcaaatttatgccaacattggctaatgactggcgttggctcttattgatcatcatagcaaatgcaacagataaaggaaactgcttccgtcgcattttaaagggcaatctatgagccgaaggagttaggggcatcatgagaataa

SEQ ID NO: 11700 - DNA, 1368 bp, Arabidopsis thaliana
atgtgcatggcctattggtatatttctggctttcatcgacgtaataaaccacttgcagaggaatgatcacccatggaagatatacaaaacaaataagcatataaaagacttcttctcatcagcctctggatttgagttgcttggggaagacgtttacgttgcattctatataggaaaggtacgagcctaaaggcataagagcttggtgcagcttatatcatcaagtgggatgtggctttattggtgtctcgatgccccatagatgttaacaatcaagtctacttgagaaatatatagggattcactcctctagcaaagtattgtaacaaataaatgcaaaacagagaaaagaaaaaaatcaaactaaaccaactaataaataaattacatagtttgatccatatctatacaacatattttggacattgacttacaagaatcagaataacaagaacagattgacaaacacttgacatgagaaactaaacttcaacattgttctcactttggttaagttccgccatcttcttcttgtttctcttgtgcagagtgtagaagtaagatcctaacgccaaaactgttcctatcaaagcaccaattctaggccaactaaacacatcatccataaaatcaaatgccaagacaacaaacaaagccacaaatggtgaagcacacatatgaacaacatcaccaaaaagacccgaaacataatgcaccaaacctatcatcccgaccgcccaaacctgccacgacaaagccaacccgaccaaactcagaacgtaatacgtttcccctttcttaaacctctcgctatcgcctttcagctccttatactcgtcactcgcaaacaaaccaactagacaaacaaccgaggcgacaaaagcgacacatatttgcatctctaagaccattctaaacactttcttgttaccatatctctttgtcttcaccaacagtttctcgaaactaagttggactaaacagagagataatgcgaaagaacatgaagcagcgaaagttaaccaagcttggatgccgtagaaatgttcattttcatcaggctctcctgaaaatacaggaccaccaaaagcatagctcacaagaatgagaactatcgatatgatgatccatctagtaaacttgaaacggttaatgatagctgtgaaaatcaaggtaaagatcaactgggaccctgaaatcagcatgaagaagccatagcttgagtataacttccaagtgcatacaatttgctgtgagcagcaacaagaacaccaagggagaagtaagcaagatgagacgaatggagaggaagcgagtattgatggtttcagggtctggttttggtgaagggaaaatgaagaagagagg

SEQ ID NO: 11701 - DNA, 701 bp, Arabidopsis thaliana
tccgacgtccttcatcctcgtccgtttcttcgtcggcttctcgctcgctaatttcgtagccaatcaatactggatgtcctccatgttctccggtaacgtcattggtctcgctaacggtgtctcagccggttgggctaacgtcggcgccggtatctctcagctccttatggctctcatatcctccaccatagccgaattccttccatgcgccgtcgcctggcgcgtgtccttcatatttcccgccatttttcaggttacaacggccgtcctcgttctcctctacggccaagatactccccacggtaacagaaaaaactcgaaccagaacaaactcacaattcctgaagaagaagaagtactagtagttgaagaagacgaacgttccagtttcgtcgagatcctaatcggcggacttggaaattacagagcgtggatcttagcgctgctctacggatactcgtacggcgtcgagctaacgacggacaacgtgatcgccggatatttctacgagagatttggagtgaatctggaggcggcggggacgatcgcggcgagtttcgggatatcgaacattgcgtcgcgaccggcgggagggatgatatcggatgcgctggggaagagattcggtatgagagggacgctgtgggggctatggatcgtgcaatcggtggctgggttgttgtgcgtgttactcgggacga

SEQ ID NO: 11702 - DNA, 600 bp, Arabidopsis thaliana columbia
aatggaaccaaaacggcgccgtcatggacgttaacaaaaccgtatggggccatgcaacatcaacggatctaatcaactggatcacactttctccagcaatcagaccatctcgaccgtccgatattaacggatgctggtccggctccgtcacgattctccctaatggcaaacctgtaattctttacaccggcaacgaccgttataaccgccaggtccaaaacttagttaaacctaaaaacctcaccgatccatatctacggcactggaccaaatcgccggaaaatcccctcgtgacacctagccccgtcaaccacatcaactccagcgcgtttcgtgatccaaccaccgcgtggtttggccgtgacgggcgttggcgcataaccaccggaagccaagaaggtcgacgtggattagcgattctacacacgagcaaagatttcgtaatatggaagcaatctccaaagcctcttcattaccacgacggtaccggaatgtgggagtgcctgattttttccggtggctaaactgattccggggctagatcgtcttttcaagtgggcgatggttaaacgtcttaagtgacttacagatcgtttatga

SEQ ID NO: 11703 - DNA, 706 bp, Arabidopsis thaliana
ttcacaatccttgtaattttctgcatatttttcatttaagacaaatacctcttgatgaccacttcggctcagtgggtgattcgacgtatttgggatcacaaccagcaacacatacgcgcttatcaatatttctgcagaagggtgtaactttgattaatatttgcaatatgcaaagcatttgaaaaaaattgcaaatgcttacccgccctcggaaatgtacccaacccacagctctgctttatcccatggcatattagggtgactccattcaatccatgccaatcgctcacacttgggatccaaccgtggaaatgcatagaaatcattgccacttacgagtacttttggttctggatctcaaatatcagaaagaacacatatgagtgtcaatgatcagctgtaataagttggaaacttagaaacatgtactacatggcactactgacataactcacatcccctatagactctttcaatgggagtaagaatacttctttcactaaagtttgataatctaccttcaagtgtctctccacttagattaacctccacgattgttgtaattgggtttgatctatcctggcgaccatctataaacaccagtcaaacaataacatgtaaatctcgataaaaacacaatcaaacatcaagagagtcccaatactaaacactagagacaaccaacctccctaacagtacataacgg

SEQ ID NO: 11704 - DNA, 490 bp, Arabidopsis thaliana
tgtagttcctcggttccacaaaaactctattgttataaattttgacaaaaaataattagaaaatgtctttatttatatttaaaactcataataaaaaaattaaaataaaaaaagaatagattacataattctccactggtattaaaaagcttgcattaagaaaattaaccaaagaaatgcttttattaattattccaacctgcaaatataaaaacgactaagttagtatgttatataattttttacaatgatatttattttataataatcaaaataaataaatcatacctgaaaaaataatctattaaaggtttcggaatatttatttgaaaacaacatttgttgtttcattcttatgttttcctttacatgtctgtaataagaaccttaagccctcccatttgatttcactctagacatagcgacatacaactgtccatgtgagaaaacaggtttcggtaaatatataccaacattgcctaatgactgg

SEQ ID NO: 11705 - DNA, 532 bp, Arabidopsis thaliana
gaacgaggttatatacaatacgatgattcttggttattgtaaggaaggtagttcttatagagcattgaagttgcttaaggagatggaagagaaagagttggctccaaatgttgctagctacagatatatgattgaagttctttgtaaagaaagaaaatcgaaagaagctgagcgtttagttgagaagatgattggattcagggattgatccatctacttcaatccttagtttgatctctagagccaaaaacgattcacatgtaagctcaaaataatgattagagcagttttaatctgagataaattaccgataatgcaacaacctaagctatgcagctacatgcatacacctagtcgagaaattatgacttgcattttgatgatttattctcagttttgattacaatcagaaggagccagcatccatggtgtttgatggtttgatggtttgtgagctcagagtataaccgccgagtcttaaaatttccaactgcggatccaagattcctctgactagagcaatgcgatcgac

SEQ ID NO: 11706 - DNA, 550 bp, Arabidopsis thaliana columbia
cacaggagcttccgtcaaatgccaaactttcccaccaacaaccttcccaacagcattaatcaacgtactttttccggcattctgcgatccaacagcccaaacatgacctctcttcccagccatagcagccacatcttcaaccaaatccttaatcccccaattcttaacaggactaacaaaatgcaacttagtaatcttacttaaaccaccttcacgagctcttaatctaacccattgctcaaacctattaggagacaacgaactcggtaacaaatcaatcttagtcacaacaacaacaactctaggtacattaccagacttcccttctttccaagccatattattctcatcaatagttctcgacacaagcttagctaccctcttaggaaaagaaccatcgaaatctgaagcatcaacaaccatcaacacaacagttctagcaccagaagctgaacctagtctcctaccaacagtatgatcaaaatcaaaatcaggaagaagattctcaaccgttggatcttcactctcccgtaatgtctaagtgaatgac

SEQ ID NO: 11707 - DNA, 555 bp, Arabidopsis thaliana
tgctgtcagtttcaatacagataacaaaaaagactaatccaatcaagcaaagtttcctgaaggcagtcaaattaacttttatcttctaactatagaccaaaatcatagtttaatatgtcataccagacattacttatcaccccagggcaatacttgttttctaggacaagtagctacagaattttataacaatcatttctatttctctttagtacataatcccaatagccaataagctatagatgacacaaactcaccttgtaactctcataagccaaaagctggaccgcactgtaaggtaacactcttatcacctgatgtcacattttcaaacagaattatccaataagtcaagacaaaaccaatcacttgatataaaaaaaacaagtccaaacaattacctgaggtaaatttcctttccaataacctttaactccttcttctttagctatcaaagtgattgcctacaaaatcatttccagtaagctcttgcatcatttataacatgaaagactaacgtacatacacacacgaacatcaacaaaaacaaactta

SEQ ID NO: 11708 - DNA, 895 bp, Arabidopsis thaliana
tgcaatcctttagtaaacacaaatgagaaataaaaggggagagacccgtaaacatcacaaaataactgtagagatcacattcacaaagacataattactgtacttcacaagaaagaaacaagggaacacacactcttgtgtctttctaatactcatcgccttcttcgtcgtcgtcctccgctccttctccaccaacttcctcataatctttctcgagggcagcaagatcctcacgagcctcagagaactctccttcttccataccctctcctacataccaatggacaaaggctcttttggagtacatgagatcaaacttatggtctatacgtgagaacacttcagcaactgcagtattattgctgatcatgcaaaccgctcgttgaaccttagccaggtcaccacctggaacaacggaaggcggctggtagtttatcccgcacttgaatccagttgggcacctaattttaacatgaccaaagatttgaaatgtgtagtagaaggagacttaagagagaaagaaacactagtagtgtgagctctttaccagtcaacaaactgaattgttcgtttggctttgatggcagcaacggctgtattgacatccttgggcacaacgtcaccacgatacatcaaacagcaagccatgtacttgccatgcctagggtcacatttagccatcatattggagggttcaaagacggaagtcgtgatctcagggaccgaaaactgctcatggtaggcctttgcagatgaaatcacaggtgcataagaggagagcatgaagtggatccgagggtaaggtacaaggttggtctggaactcggtgatgtccacattgatggcaccgtcaaatcttagagaagttgtaagcgaagagatggtttgggagatc

SEQ ID NO: 11709 - DNA, 1160 bp, Arabidopsis thaliana columbia
caggttcttcaatatctagaaagcaggtgcaaagtacacaagaatgctatcaagttttgtcaggaaatactaagtaagaagcctgttgagtggaaacccatttcacgtaacgacttatcgcatcccattcgtgatgttgatatggtcatcaccgtgggtggagacggtaccctcttgcatgccagtcatttcattgatgactctgttccggttctaggagtcaattctgacccaacacaagctcacgaggttttgtagcccaatttttctcatattcctatatataaagaatgtaaaaaagaatctaagtggtttgttataactataggtcgaagaactgagcgatcagtttgacgctagtagaagtactggtcatctttgtgctgcaactgtcgagaattttgaacaggtagagaaatagaaagggaagaacgttaggcaacccatttatgctcttacttgatccttagaatatgcaatgattacgcaattttggtttgaacattcagctatttgttcacaggtgctggatgacattttgtttggcagagtggttcctgcaaaagtatcgagaatatcattgaagttaaattcagaaactcttctttcacatgcacttaatgacattttgatcgcacagccatgccctgctgcggtttcaaggttctctttcaagtaagagctcctactattaaaaaccatgcattcttttaaacctgattattttgtgtagacataatccctcgtttggtcagttggatagttgttataagcattgggtttggtttggtttggtttggataccgttttgtagaaactacacctagaattttgaatggtttatcaaaaaacaggttttattcgtttttccccttttcagattagtatggttacacctgcatgtttggatatggaataaaccatcagttcggttaaactgttggacatcccttttatatccaacagttatgaatcaatgttctttacaatgtgtgcaggattaagaacaaagatggtgcgagcagtccaaagacagtgaactgccgctcaagcggtctaagaatctgcacagctgctggttcaactgcagcaatgcagtcagcaggtgggttcgtgatgccaatgttgtctcgtgatctacagttcatggttagagagcc

SEQ ID NO: 11710 - DNA, 546 bp, Arabidopsis thaliana
gcttacaagaagaatagcccagccagtaggtaagaaagcgaggatggaggcaaagagatccgagatcgtgaggccgcagacgacaaataatacagtcatgactgacaagaaaccaaggaagagaagtgccttgagaatcctgaacataacctgaaaatctgtaccaaacttccgtctacccattgataccatctgtcaaatgattaaacgacacaatcataaatgtcaagagacaaacaaaaccttttcctaaaacctcaaagactatctaatagagttggctgaagattcttttctggttttgatgtgggtaaaagcttaaaacagattagtttcagggccttacctttagcacgagaagaactgacaacaagatagcccaagagagtccataaaccttagagaagaaaagggcaaagttgttaaaattttcaaagctatcgaagagggaagtatcatggcttatatgccgaaatactttaccagaaatgttgtgtggcggcgagcgatgttgaggtggtagacaattccatactggtaaaggag

SEQ ID NO: 11711 - DNA, 604 bp, Arabidopsis thaliana columbia
ctcctatcttgtctactatagacactcccatcatgttctcgcagacttgatgtagacttgactgatccgctgagcgagtttcggggcttgcagttctctgcatcaaacatcggatctgcctcacatattaatctctctgcttgtctcatggtttcatgagctgccattttgacataatgctgatctttttggtatttctccatctcttgatatataagctctaactcagaagaaatactcttgggattcagattcttcatcagaaagttgagcatctgtatagctaaaagccgtttctgagaatctccctcaacaacacctaaatccagaatcctcagacccgacttcacaaaaagccttgcatatgcctcgacagtaaaaggattgtgcttggaaagtgccataacaagtgccatatgagacttagcttcacttgaagtagcttcaagagcaacagctaagctttgacaaacattattaaccatttcactagaagcagatcgccaattatcgcaatccacaagtgacttcaagcaaagagcagatcccaaagcaagatgctgttgatgttgcgaatctataagagaatcagagagtggcttgc

SEQ ID NO: 11712 - DNA, 514 bp, Arabidopsis thaliana
ggtggtctaaacattttttctattttctcaaagacatatctagtaaacagtaataacagatgaaaaagaatggagatgaaagaaaaattggacaagaagaagaagaagagagcggtttgagcctcactacttggtggaaggtgtctctttgtctttctttccggcgagaatcatagagatctgcagaccgcgactgaaggcttgattaaacagtaatctagtttggaactcagacacaaatgggaaccacgataagacagcaatgggtgtgaatatcacaagccccattatatactcgtaagctctccctagctctttcaccgagtcccagaatcctaatcctttgaacacgctacgcagcgcttgcccgatcttcaaaacatagcaacggattacaaacttatttttctcatggaaagaacagattatttatgggcagttaagaaagttgtgtgggcttacaagaagaatagcccagcctagtaggtaagaaagcgaggatggaggcaaagag

SEQ ID NO: 11713 - DNA, 558 bp, Arabidopsis thaliana
tccccattccggtcatatgtttgatggtaataagcattttcatgatgattgagccaacactagctgctggtgggggtaaatttttaaatccaggagtgcttgatccgtgtttgcgtcctaatcctccaccagagtgtcaagccccaggatcagctgggaaacctagagagcgagttaatgaatataaagttggatgctccaaacttacccggtgcgaccgtgtcggataatcattatatattttattagttttatgagaaatctctcatatattgtaaacatgttcataacttctttcaactataacaataatttggtatatacaaaaaattatatgtagttaccagctttaataatatatcttcttgtaagactagatacctaattattctgctttgtaacaatgatttggcgtataatacaaagtatgtttgtaccagtaaactaatatagacgttatatggtcaatgatctattctaaatcgcctagttttcgaagcaaaactaatttacctctaatgtctattagtctaagaaaaaacggagaatggatcattt

SEQ ID NO: 11714 - DNA, 972 bp, Arabidopsis thaliana
agccagttattgttgatccagggctctatcttgtggagaaaaccgatatgtttttcgcttcgcagaaacgagagttgcctaaggctttcaagttattctcaggtatgcttagctacgttacattacgttttcattttcccttttctgttttctgcatttatctgtggatcattactaattgaccaccttgtttgctatttagcatattcagtgttgtgcaatcatttggattgatattattatggaagattactttttcctaattatgctgttttgtagaaacttaatccctttttcttttacatggttagcagtttcttggcaccatttcataatttggtaggtagatacgtgatagtgtagaagtggataagtttaggtgaaagctctatcagaatatagactacatgacgtcttgtttatcagtaatgctattagctgctttaagcagataagtgaggaaagggaagccagtgtctagaaattgcttacaatggttctcattactgttatattttgttggttgtttaacaacaaagttctcctattgaatagccttaattatatttagttcctactgaatatagcatattgaggaaaaagaaatctttggaggggattgagaaaaatatagcataattaggaaaaagaattgacacatctgaaaagaagggtttgagataccgtttatgtctttgatgatttaaactaaatgccattatctctatttggcaggtccatctttctccatcttaagccggaatttcatggagcactgtgtcttaggcactgacaacttccctcggactctactcatgtacttgtccaacacacctgattctctttccaactacttcccaactatcctctgcaacacggataccttcaaaaagaccatcatgaacaacaacttactctacctagcttcgtacgacacttctaaagatagatccatcagcttgatccaaagag

SEQ ID NO: 11715 - DNA, 1183 bp, Arabidopsis thaliana
gtatcgattatcgaattccagcttgtgaaggtagaggataagatcacgaatgagcttgacactaaaccatatggggattaaggcaaggatcgccggccaaatgaaccgctggacggttaagttgactgcactggaaaatccaagaattgggaacagagagtttaccaccacgtagggaacgcagagagtgaataaaagggacactatgatcgaaccaataacatctcgaatcagccacgtaaagggaagtcggttgattgtaacgcttctgattctttgaagcttttcccgccaggccacagttgcaaaacagttgatccgtgtgagcatagtctgcgagagaagaaagcagttacaataacgagttcttgattgaagcaataatgatggacagacgtttcatcttaccagaaagatccagatgtgtaggacgactacaccgatcaaccaatcgtggagcaagttatatactggggattcacctagcggaacttgtgatgggatgatgatcataaggtcgataaggagaccgagcactcccggtatgacagagatctgttcacagcaaaacatcatgattcaaaaattcataatattcagacgttttcagtgaaagagttttgggatttcttacccatatggagaataacaagacattccgtatgaacatcaggacatggttgagaagcaaatcggttcttcccgttatgaaatgatcatagacaaagcaagtgatgatatagattcctcgcaggatacagaatccaatccagaaagcacaaagatctaaaatgattggttttaaaattagaagcataatacaaaggagaaagacgtgtgaagcaagattaagaaagtacaaaccgtcgtgtttgagtccgaaacttagcatgaagaaagagatagagtggaaaaacgcccttcccactagaattggtaaagccatgaaggttgtactaacaagaaacatactcagagaagcaagaatcaacatcactccaatcctcaccataagcctgagacttcaacattatcagaatatagattttgcgaaggaagttatcgctactaaaagcatgttgacgtactaccttttatcgccctgctcgcgtgtaacctttccacaggtggaatcggcttgagatcgcatgctctctgacgcatagagcgttccgagacgttt

SEQ ID NO: 11716 - DNA, 627 bp, Arabidopsis thaliana
catacacaagtatgtagataaaaaccaaaaaaaggcttttctaagtgcttcttcatgtcaatctcctgcacttttctgaatttgtttttatcttggtttcttgtagctgagagacagtcatttgagtctcagcatcgcaggtcccttgacgatcagtcagattccttcaggtgcatatcactcttttttcttcatttgacacactcggagaatcatgaccatagactttagacgatgaaagttcttgattgaaacaggccaccctacaataaaagaggcttgactgggagatcatatggagaactatcaatcccggattctgaaatatccttcaacagctctggaagaccaagcatagagcgcaactctccttccttatatgacaattcggatccaaaccggactcctccaaggctatcaaatttctcagacgttgactattgtagcttcgagtcaatgacttcggaaggaggtcaatggatttgagctcaccaactgctttctcaactggctcatttgagaatgaaaggttttcatcggcttctcaaggaggggtaagactgatctgtgaatcttttttcgggttacatacttgtaactgctagatgcaagagtgggatcctctag

SEQ ID NO: 11717 - DNA, 772 bp, Arabidopsis thaliana
cttcaattatcaaagcttgaactagttccaggattcattatcaaagccaaaccaaatcttataccatggaagcataattgaatcggaagactcacttttctccgacagcaaaagcaaccaaacaggacatgtttcgtgtaaagaagtaacggccaccaggtttcagattccagtcttcgttttcactgaggagatcaaacccagcagccaaaagctgtctcttcgcctcagctgccagcaaagagaaaaagaccaatgagagtcgtcacttaaagttgaataccgaaaagaaaacaatatttcaatataccagtggcgtgaaactgtgtccaggattcattaagataatccagaagatccccaacaatcgacgcattagaatcactccccggcgatctcgaatcgcgatgggaggtgcagaggattggagagacggaggagaaggagcgaaagggagagcgatggagataagtaggaaaagagagagactgagagaggaaggatgaaggattgaagatggagggaagagaatgagttagtggaagacgagctatggccgccattaatttcgctccggactctaaagatgaggtcttcttctgttatctctaaagtctaaaccatccgccgacgattaccatccgccggagatttgaagaccacttcgacttcgagaaccggattttgtttcttactgtgtgtcccagtcttctaatcttgaggagctgagctgaggccatggccactgaggattatatgggctatggtgcac

SEQ ID NO: 11718 - DNA, 572 bp, Arabidopsis thaliana
tgttttgggtctcgatgaatcacggtttggaggtctcagcacccctctcatcgccgtggatcctttgcccactcttggtgaaatttattctcgagtagtgagagaagagcaacgattggcttctgtccaggttcgtgaacaacgacaagatgcagttggttttgtggctcgcaacgatcagagttccttcccatcctcacgacccgatatgcaaaacggaggccgtttagactcctctatcattaaatctcggtctgtgacttgctcacattgtggccgtgtgggtcatgaaaagaaggactgctggcagattgttggatttccagagtggtggactgatcgcaatggaggtggtcgtggatctggttcccgtggaagaggtggtcgtggatctggtcgaggaagagaccaatctgtgacagctcatgcaacaagctctaacccgaccagccttccagaattcacaccagctcagctgcaagctctcgcacaaatgattaaaggtcacctaacaacagcagctccgacaaattatctggtaagacaaatcttggcaatgtaattcgtgatac

SEQ ID NO: 11719 - DNA, 336 bp, Arabidopsis thaliana
cccagaggtagacagggaaaatccccatttcccagccaataatggagctcaaagcgctcaagtaggctccttggtggctaatcaccacaccttttgggtctgccgtggtacctgacgtgtagttcaaggagatagggtcatgctcgttgtggacacggaacatgcttgcggaggaggatggcgtaggttcctctttttcggatgagaccctcgtagtctaacttccttggagaaaggctttgtagtggaatcaatctcgttaattaatatgatccgcggatgcgttgtgactggtaagtgggtatgagacggaggacttcttggatcaaaggagca

SEQ ID NO: 11720 - DNA, 567 bp, Arabidopsis thaliana
ccatacatacaaaccagcttccacccgtcccacccaccggccacaacacgacctccaccacgaccctgagctcaagtccatatctagctccttcgccaacttctccatcccatgaccaatgaaactcgatagaaacacaaatacacccgccaaggccaaccctgttatcctcctccctttcatcagagcggttccttccttaatcgcatcaaaaccgtatctttcttccaatacagagacgacaaacccaagccctgttatagccattatgtatacctcaactccgagaaagaggatcgtgattagataacgcaatgtaggtgtataaccaacgagagctgatagaaacatggaaattggtgagtagaggaagagcagaccgtagacgatgatggaagttgctgttactcgcatccacgaagacttgactgaagcaaatgacgacttcagagatgggtttatgccttggtgtgagaaggaagttgatgtgatgacagttatggaggccatacaggagaggataaaggatgggacgaaatacaggaatttgagatgtaaaagcgagac

SEQ ID NO: 11721 - DNA, 746 bp, Arabidopsis thaliana columbia
gtgatttacgcactaaactaacactacaactagacattgacattcgacttaaacaaagtctcctctcttcataacattcgcaaacacatgtatatatataccagaaaccatagattcccttcctagcttttcaaaattctacaacaaataatggatgagctccacgaagccgcgattgcttattacaacaatggctccatggaacaacaaaatttgtcgtggcagttttaacgggcaatggatgtaaacggagacggccgtgtcagccttcaagaatacaccgacttcttgcgtcaaaccgctggtttagcttggatccatcccgagatgtttcgggagctcgaccgaaatggagatggtcagcttgacttttgggaggtcttgacgctttactacgtggctcggacccggaccattaactgccgcacatgcctccggattctcaatggtctatacttcacgtgtgtcacatgctttgaatcttcatgtggcaacacgtttgatctttgcgtcaagtgttatatgcgtcggacgtattgtcatccgcatcgtctctttttggatagttatgtcttattacgatcaagacgtatccaccatccttcggtatgttgactccatcaatcgtttttttctgtcttaagttttggatttaggcgtttccaatagctatagacataaatcgcgtttgttgacgtgtcccggttcattggtagtttaggccaaattgattagagttgacatag

SEQ ID NO: 11722 - DNA, 977 bp, Arabidopsis thaliana
tgagctgtccattcaccaaaaattactcaaaattatgttactttcttgagaagactctgacttctggtttacttgatattccttgatttcaggtgtttactctgtaaaagcagatgtagaacaggggagagttactgttacagggaacattgacccagctcttctggttaagaaacttagcaaatcaggcaaacatgccgagatcttaggcggtggtggaggaggaggcggcggaggtggaaaggggtttcctaatctgaatgggcaatttgcaaatctcaacatgggtggaaacaataagcctaaaggtggaaaagagagtaaccaagtcaagggtaaagctggtggtggcggtggaggaggtcagaatcatggacatggtcagccaatgcaattgaatcctcaacagattcaacagatgatgatgatgaaggctgctcacggtggtggtggtggtggtcagatgaagatgccgcctatggagctaaggatcagaagaagtcagttaagtttgctgatgatgaagacgatgagtttagtgaagatgattatgatgatgaggatttcagtgaagatgattatgatgatgatgagttcgatgatgatgaagatgatgatgatgagatgggtcatggtcatggacatggaggaggtgggggtaatcacatgcctcctaataagatgatgatgcctaacaagatgatgcctcagatgggtggtcatcatggtaatggtggtggacctaagggtcccaatgagataatgatgatgatgaatgggttcaaaggcggaggcggtggaggaaagaaaggcggtggtggcgggtttgagattccggtgcagatgaagggaatgggtgagggtaaaaatggaaaggatggtaaaaagggtaaaggaggagagaagggtaagaaagaagggaaagagaataaaggtggggcaaaaccggaaaaacagatgccaaaagtggtggtggt

SEQ ID NO: 11723 - DNA, 1201 bp, Arabidopsis thaliana
taatcaaagacactgttacccttttggcattctcccccaaatcgatttcgattccaaaccctaaaattctctctttgatttcgaaaccctagaattctctctttgattcgaaaccccaaatcgatttcgatgtgtgtcgtcgtttaactggttgcgttgtggtcggtaattgatttcaacgagtctgctaagtcacgatgaggtatgtaatcgaatcgattcttagggttagaattgggggaaatcgatttctttgttcgtcgggatcgatttctgggttgtcgggattgagaatgggaagatttctggatcgattactggatttgtcgggttagatttctgagtttagagtaacagtttctatgtttgtcgggttcgatttctaggttaagggttttgtcgggtttgatttctgggtttttagagttctaggtttgtgtcatttgaacttaatccccttattctttgttgtttttgcagtggtttcgattgtttgaagctgcatataaagtatggaggagatgtctcaattcgcgatgagtcgtttgcctacattggaggatttgagaagagggatatgctcattgatccagatctgatgacgtggtctatcttcgccgatttccagcagagaatggagtatctgctcccgtgaaaaaagtttggtacaagcttgcacacgaaagctttgaatcagtaagagctataggcgaggatagagatagtgggattaggcagctgtgcagtgaagcgttgattggtggagaagtagacgtttatattgagcaaggtgtgtctgaaccaacaccgtttcctatgtctcagcatggtgaagaggctgttgttgaagagatggaagagtctgatgcagaggttgaaggagataaaactggggaagaagacagaggtaaagatgatgatgttgatcctgtagcagaatgtgagggagatgatcctcggtttagggccttttatgaagagataaatgaagaggataataaccaccaagatgcaggggaagcagctggtcagggaattcctgaagctgatgaaggacatgtaacgggtcaagaggctggagttgatgaaggacatgtaacgggtcaagaggctggtcaagaggctggtcaagaggctggtcaagagggtattgatgaagaagagtttgaggatcaatgcatggatacagagcgacctgatg

SEQ ID NO: 11724 - DNA, 2580 bp, Arabidopsis thaliana
gtccattttcgacgcattctcttatgaagtggtaacgcctatgaatgtgcttgcttcagccatggaagaccggattcttggtaagggcgattgctgatttgttgtcgattcttatgagcaccttctcgcttggttctcctataacttcactaagcaagtcttgaagccaaattgcttgcctagctgcttctgttcctgccataaactctgcttcacatgaggacattgccattgtttcttgtttctgtgaacaccacgagatgggactctctccaaggtaggaaatgtgaccggctgtactcttgccatcatcaggatcaacattgtggttgctgtcactatagcctactagctttggtatcttttcacttgatcgtttaaataccaaaccgagtgtagtcgtacctttcaagtacctcaaacattgtctcattgcagcaccatgtgattcatttggatcttgcatgtatcgacttaacactcccacgcaaaaggacagatccggtcttgtatgaattaaatagcgaaggcaaccaacttttttcctgtatccggtagcatcaattccttcttcatgatgtgatttggacaattgcaaaccagattccattggtatgtgcatcaagttacagtccttcatcccagcgtcttctaaaatcttcattgcatatcggtgttgacttagtgtgattccttgctcttgttgacagacttctattccaagatagtacgtcaattttccaagatcactcatctcgaacttagaagccatctctctcttgaatccactaatacttctttcatctgttccggttatgaaaaggtcatctacgtacactaccacaagaagaaaaatattcccacttacagttttacgatatactgatggttctttggaacacttctcgaattgtagttctgtaagaatctgattcagcttatggttccatgctctcggtgcttgtcgtaatccatacaaagctttgtgaagcctatagactttcccttcctatcctctttcttcgaatccttctggttgtgtcacatacacggtttctcttagttctccaaggagaaatgctgtcttgacatcaagatggtgtatctcccaaccatttgatgctgcaaggttcacaagtagtcgtttggtttcaaggcgagctacgggagcgaacacttcttcaaagtccactccatagcgccaaaacgtaacctttcgcgaccaatcgagccttgtatttgttgatgctcccgtccgagttgcgtttgagtttaaaaacccactttagacctatacgtttaactccatgcggcagatcttcaagactccatgtcttattctttgttattgaaaacatctcttcttcacacgcaagtgtccactctctggactccttagctcactgaaactgctcggttcgttatcaatattagaagtagcctttctccttcttcttctacaagtaatgcatagtcttcaaggtactttggtcttatggtttgtctttgcgatcttcttagattaggttgttgactttctgttccaagatcagcagagacttcttcattttctgcaaaggtttcatgatcatgttgttcttcattcacgtgaataggctgtgtttgctctgtctcaccatattcgttgtcttcttcttgtagaccatgattcccgaattctccaagtgtgacactgaagcttccatcttgtttaggttcgttgtgattccaatcccatcctttttcttcatcgaatacaacatctctactcaccacaattttccgatttactgggtcaagtagacgatatgcctttgaacccggctcagtacctagatgaactagctttctcgacctgtcatctagtttcctcaagtgtggtgtctccacttctgcgtatccaatgcagccaaatactgtgagatgattcacgtttggtttcttttggtagaaagcttcatatggagtgttgtcattcaacgatcttgtagctatccggttcagcaggtaggtggcgtgtcatactgtttctccccataagtaactaggtatatgcatgtgtttcatgacactccttgtcatttccattagagttctgtttcttctttcaaatacaccattctgttgtggtgtatatggagcagtaagatgtcttttaatacccgattcttcacaaaacttagtgaactcatgtgatacaaactctcctcctctgtctattctgaaagtctgaattttgcttccagattcttgttcaactaagaccttgaagcgcttgaatttattgagagcatcacttttctccttaagtagagttgtccacatgtatctagaatgatcatcaataatgacaaagatgtacctgtttcctgcagctgtgcttggtgttataggaccacataagtctccatgaacgagttcaagtatcttggtggctctgtatgaggttgcttgcgggaaaaattgccttgattgcttccaaacaaacatgaatcacaaacttctttttcgatcttaacgtgtgggatcctcttactagctccttttgtatcattgacttgattgtgtcgagatttatgt

SEQ ID NO: 11725 - DNA, 550 bp, Arabidopsis thaliana
cattggtgcccccacgtgcagcgacggaccatgtgtgcgcccacccatttccatgaaacattggaagggtccagaggtagaccgggcacatgccatttcccagccaagaatctagctcaaagcggtcaagtaggctcctcggtgactaatcaccacaccttttggttcggacgtggtgccagaagtgtaattcaaagagatcgggtcatgctcattgtggacacggaacaaacttgctgacgaagagagcgtaagatctcctttacggatgagaccctcgtagtctaactccatggaggaacgcttcgtagtggaatcaatctcaatgatggatatgattagcgggtgaagttttgaagcgtcaaatggtaagagacggaggacttcttggatcaaaggagcaaacgtgtagtccacgaataaacactttggctgggcgtggcggaggatgatggctatggttttagcgtcaagacgcgtgttaataggattaagtacagctccggtcatgggaacagcaaaatgcatctcatacatggccggtatgttt

SEQ ID NO: 11726 - DNA, 988 bp, Arabidopsis thaliana
ctccaaatcacgcgctgatgaatgcgcgtgaattcaattaccatcgtataggcctcgtaagcgatacgaatagcccaccttgatcggactattgggccttgttcctcatttgaatatccgggacaatctcgttgttcagagtttcacgataaaatagtaactgacgatggctcactcagcctcatcactagactgacttttccagcatccgcaaaccgataagtggcgatgtggtcaaagccgaccctcgagtttactgcatatctaacatacgtcattctgcaagaacacaacatattcggtaaacgcaggaattggaataactttctagttacaaaacaaatgagactgaagcagaattattattatgcaaaagtgacaaaaaaatatatcctaccaaacaataaattattgtatgccgcctcatgttataacttactcaaattgcgagaatttaacagaacaaaacctccaaaccccaaactataaaattgtaagaaaagacaaaacaaaaacagagaaatcaatcattcgtcaccatcctcatgtcccccaattagtttcccaagccatccaagtagctctgtaaatcttttaaaccctccgccgagaagcttctgtgaactctcaacctcggcgctaccaagttcggtggtggctgtggctgaagacacacaaccactgccgtcacattatcagcactcttcctcttcaaagcttcctcaaccagctccttactacacatgaccgggtcattgtgctcctgtagtctccttctggcaaaatctacagcattctggctcatgaacacatcccaaaccccgtcacacccaattataaggaactcatcctcttctgttagttttgttgtcatgagctcaggctctgcaattagaggtccacaatcagaaccatctttcttcttcttcatgccttccatatgaaagtcacctagcgctcgagccacattaagttgtccatttagata

SEQ ID NO: 11727 - DNA, 787 bp, Arabidopsis thaliana
tatctttgacgcagttgtaatattggagaagatggtgtagcccttgctgaagcagttcacggttctgcacctgatatcgctggaaaggttggtccttcaaacaatatatcattccaatttcatcatttacgggctaaagagtatcatttatgcatccaatgttgaaagattaatatgtgtgatttttaaatttgttgttgtctttctgttttgggtgatgtagaacttggcgaacccaaccgcgttgcttctgagtggagtgatgatgttgcgtcacctgaagttcaacgaacaagcagaacaaatccacagtgcaatcatcaacaccatagcagagggcaaatacagaaccgcggatcttggaggtagttcgaccaccacggaattcacaaaggcaatctgtgatcatctctgaacatcgtaaaatccaattctttatcgaatcttcttttgggagccttttttatagcctcgaattcttcttgttttcttgttttacgattagaataaaagaaaaagcaaaaaaacggctcttcatgagttttgaagttattgtttctgccttaaaatttctctgcccgtagggcaagaagattcataacactggaaaaagtgatgttctttctgaatcgatcagaagaattttgttttgttgcttgaattgtttacatactcttataacttcaatcagtttatcaatttcatacatacatccaaacctttttttttcttttcactcgtagaataaaatgagtaaattactatgattatgaatgaaatgacaaaa

SEQ ID NO: 11728 - DNA, 629 bp, Arabidopsis thaliana columbia
tctgcaaagtaagatttaataaattcaccaagtgcagacacacttaccatctcctgaagctcctctaggattggatcccactcgctaactccacaaagagcatcaacagactgctccaggttgtactcgttatccctcaagatctccttgttcaaatctatctccttgaaacccatttcctcgagctccttgagcatggttatctccacgtcattcttttctatatcctcctgaagaggaactggcacgtcttttgtagtagatgaagaaccaccagacaagacctcaacagcaggcatgcttgggaagtcgaccatgttaaatgaagaagatgaagatgaaggagaatgaccgtgagggatagcaggatgagcttcaccaaccaaaaggttttctttttccacggcctgtgtttcaccaacttcgccctctagatcagtacctttcacggtcccaggattgacactggagctgccaggttgagctgactcataattcataatccctagaaattcgcttggaaaattctcatcaagggagggggaggcattaaggttcagtccatgaaactcattcacaacagaattcttcagagatgcatcaacctaacgatgcaaaaagaaaaaatg

SEQ ID NO: 11729 - DNA, 532 bp, Arabidopsis thaliana
gaggcctaagccgagctctttgagctgagacagaggaagattgcatatacttccaaggcaaacatatagcaccgacccttcttctttagaatcaagccatttaatacactcgtcttgatcaatgtccgccttgtttcccctctcagcttggtcttctcctaacttgttgcacaaggaaaccggtccgatgctccatatcttacccgctttaaccttcttgtagtctctaacataagctggctcgagctcttcaaacgtgttaacaatcacaccataagaagtgttatccccttctgtcattccgtcaaggaagtctttccaatctccagcaactaataccattggaagctgagattttgtgaactcaactctgtcagggaaattaggaatggggaagtattccttgtcagactctatagtttccaagaactcgtggttttggtgcattatgtgcgtacaaagaagattgaagcaacacatgccatgaaagatgatttttggtatacaagattcttggcaattctgtttgtat

SEQ ID NO: 11730 - DNA, 640 bp, Arabidopsis thaliana
cgaccaaataaacatatttctcctacactttgaaaaacagaataatctaatcataatgattatataaacattttcgcaagagatgactaaccttcacccattttgctgagaatttgatctgcacgcacaatagaagaggcatgtcaatgtaaacctccatgataaagtctgtgaaacgtaacagataagatgtcgaaagactctgtaacataagactcacatcgtggagtcaaagtatccccaacaacaaagacataatggccgtctttatcatctggtctccagggaggagagccctgacgaggaaggccattatagaacatgtttgggtaaacaaaattgggaactaaaccactcgcaaactccggaccatagtacaacggaggttgaaatacctgaaagaaaaaaacacatcagctgaaacttagctcaagcacacaaataaaaatcttaatttcttactagttaacacaattcgcagtatcttatgaaaacaacaaaagaacagtccattgataccaatacaatatgtggacaattcgttaccgtgggtggaggaggaggaggaagaagaggcggcgagcatcctaagtcaatctggggcgtttcctgggacgcttatcaacgatctgatgaggga

SEQ ID NO: 11731 - DNA, 616 bp, Arabidopsis thaliana
gatgatggacaatcagtttgagtttatgaagcaaactgattacatgttcgctttcttcaccgcttatatgaacaccgttcttgagggttttcttgaacgtattctatggatcgtgttcgcgagcataagtggcttgaaggaggggagaattctatgattgagtggcataattctgtgtccaaagattttgtggaggatcaagagttgctacctaagcttgaaatgcctcctcctacacctccacaaaagagaccagagttggatgagtcagcccttgttccacttgagccagaagaccagtttcttgcccaacatgagggtttgtctattttcagggtgatttgtgttcccgacggaggggaagtcattaagatcacagtgcagtcattgtctgaaaacgtagcaagtttgaaggagaaaatagctgaggtggttcaaattcaagcaaacaaacagacgttaagggggttaagagcggttttaaaggacaataataggtcacttgcttattacaatgtgaaagcaggagatattctaatactggacgtggtctgagacagagagatggacagggggacacaacaagttacttgctcattacaaggaaatgcttttg

SEQ ID NO: 11732 - DNA, 1082 bp, Arabidopsis thaliana
atctcacataaaatgagaataaatttttttataaattacaaaacaaaaaaagagacaaaacagcaaacgaccctaacaagatatacagcgttttgattgatgcttattcaaaagccattaagaattacgaaagcgatttcaaagttgaagaaaggacacaaaaaaaaaaaaaaaagttgcacatataatatctcattttcacatcactatctctggcttcaagatgtttgatttgatctccttgtgtggcaaaacaactcctccattgctatagatctcatcgctcacatgaacatcctcaccgaggatcgtcatgttctcgatcctggcccattgaccaaccgttgagtgccacccgatgatactgctcgagatacacgcatgcttcttgatgcggactccacgcatgaccgtgcatcgggagagtctgactcctgactcaacaatgcagcctggaccaatggcaacgtctggtccaatcaaacatccttccccaattgtagcggtttcgtcaacaagaacattcccaactatgtgtggcccactggttaatttggcaggagatttcttcctaagggagtctaagtagagtctcaaacccgttatgtagtcacggggttgcccaatgtccatccaaaaccctggtagcaccatagcatagagcccttgcgctgctgcaatcttagggaaagtctctttttcgattgaagtcggtcttagctcaatcttatcaagaacagatgggttcagaagataaatcccagcgttgatcttgttacctacatacagttttggcttttccacaaacttctccactcttccagtgctttcttccataacaaccactccatatttcgacggttcatccacctatataaccaatacatgcaagtccacattagatgaataacgtacttatctcgtaactggagagtattatgtttcgataatctcacctttgttaccattatggaggcttcccaccggtgagatttgtgaaactcaagcatttctttaagagggtatcactaatcacatcactgtttagaacaaagaagggctctcagatcatcaagcaattt

SEQ ID NO: 11733 - DNA, 1254 bp, Arabidopsis thaliana
taaaccgccttcaacaaaagcatagtgtgtttccgaaataacgacttggaagaatcttcttaagtctttgacaaaggatttttgaaataattttgtaccccacattacaaagactaatgggtcttaattccgtcattcgagtcggtcgttccgtttttgggatcaaacatatattagtcgtatttaactgtttatcgaaaactccatcttgtaaaacagagttaaccagaaaaagcatatccatttttatggtagcccatggtttttgaaagaataacgctgtcataccatcaggccctggtgctttttccgggtgcaccaaaaacaaagccgctctcacctcatcttctgtagcaggtgccgttaggaagtcatttatttgatccgttattaaagttttaacctatgataaagattccgcaatattctggggattcgacttattaaacaaagtctcaaaataagacatcgctatatgttggatatctttatcctctgtagaccattttccattttcatcatgaagtcccgtgatctgattcctagcccgtctctgttttgttagagcatggaaatattttgagttattatccccaaccttcatccataaactcctacttttctagtaccaatattgttcttcatctatataggcctctttcaaccgtattgttaaatccgttatctcctcacttgttctcgaatcatctttctgtgccgcatctaactcagatttcaattcctcgattgtttttctcccgtaaggaggtaagtctttccgccatttggaaatagcccgtctacaactaattattttttcaataatattaccctctcctgaaccattatcaaggttccaaccattggaaatagcctctagtaaaccttctttaccaatccatctcttatcaaaccgaaagttgtgcttcccacgtggtatcttatccacaatagtagctatcactgatgtatgatctgaagctaacatcggtaaatattcaatgaacaagttgcagaataattcatgccaatcttcattagctaaagctctatccaaccgacaccttattggttttttatcccaccatccccgccgagatagccaatccccgagatgaggaaattccaagagtccacaatcttctctcgttaacttaaaaggtatgagagcagatgcatgtcataattgaccaccacatatgtcattgtagtcctaataagtcagtaaaatcggctatcacataccatggagta

SEQ ID NO: 11734 - DNA, 569 bp, Arabidopsis thaliana
cttcctctccgttccccttcccgatgacttcctcttcaattcagttatcaaatcgacttctaagttgcgtttacctttgcattgcgttgcttattaccgtcgtatgttatcttcaaacgtctctccgagtaactacactttcacctctgttatcaagtcttgcgccgatctctctgccttgagaatcggaaaaggtgttcattgtcatgcagtggtttctgggtttggattggatacttacgttcaggctgctttggtgacgttttattcaaagtgtggcgatatggaaggtgcacgccaagtgttcgatagaatgcctgagaagtctattgtggcgtggaattcgttggtttctggatttgagcaaaatgggttggcggatgaagcaattcaggtgttttatcagatgcgagaatcagggtttgagccggattcagcgacgtttgtgagccttctctcggcttgtgcccaaactggtgcggtaagtttaggatcttgggtgcatcagtacattatcagtgagggtcttgacatgaatgttaaacttggtactgcgttgattacttgta

SEQ ID NO: 11735 - DNA, 750 bp, Arabidopsis thaliana
cataaacttcctacgtaagtatgcccaagccgtgtggagagccacgcatgttagcagaccggaatttttcaacccaaatctttcctttgaagcgaacgtcaagatacttatccaaattcataacgataagatgaatgatcctttaagaagacaactaccattgttgacactatggagaatatggaagagccgcaaccttttagtttatcaacgacgaagtagtacgtgggaacaagatgcacacaaggcaaccactgatgcttttgattggattccaagacaaaattctcggcgagatactcgaacacaattgaatcatggctgtcctgaggatggatagcgcaaaccagaatggggttacaagaaatgtaattatgatgcaagctacaaacaaaatggggtagaggtgaatgtaggctggatattgcgagatgaagaaggttactacaatgaagcttcccacaacaaagctcagacgtgcagtacaattctagaagctgaattacaagcattactcatggcgatgcaacacatgtggataaaagggcaccggaaaataatatttgaaagcgataacagtcaaatcccaaaacttctcaaaagtgagataaacaacttcggtcttcataatcttatacaggaaataagagtatggcaacagaagtacacgagcgtgaagatacaatggactgcgagatcaagcagtaaggcagcggattgtctagcgagaactcggagacccaatgatct

SEQ ID NO: 11736 - DNA, 608 bp, Arabidopsis thaliana
gtaacggccgccagtgtgctctaaagggcttagactattatttggattatcttttggatttgcaggaaaaagagtcgaaccgaactttcttcttatctctggtcggcatgtctccagaggaaacccatactattttgaaaaaagtccaagagagtgattttcgtggtctgactgagctaaatctttcctgtccaaatgttccaggtaaacctcagattgcctatgattttgagacaacagaccggattttggcagaagtgtttgcttacttcaccaaacctcttggaattaaattgccaccttattttgatattgttcactttgatcaagcggcacgtattttcaacaaatatccgctcaagtttgtcaactgcgttaactctagcggaaacggcctctatatagaagacgaatctgtcgttattcggcctaagaatggttttggtggaattggtggagaatacatcaaaccgactgctctagccaatgttcacgccttttatcaacgtttaaatcctcaaatccaaattatcggaacaggtggcgttctgactggtcgagatgcctttgaacacatcctctgtggagcaagtatggtgcaggtggga

SEQ ID NO: 11737 - DNA, 435 bp, Arabidopsis thaliana
agcttcaagtgttctagatcgtgaagcgaatctggaaaacacctgaccgtttctagaagcgcggctctggtttctaacgcctggatacacgagggttcaagagctagggttttattgcaatcggcgatcgcttccgcgattctaccggcggatctataagcggcggctcgatgcatgtagcattcggcgaggaatcttgaggcgcagggcgacggccatcgacgatcttggagaagtgacggatcgactcggagaacagtccagcgtcgagagcggcgattgcagcggcgcgacgacggagaagaagcttgatgtgagcgaggagatgggtgaagttctcgctctcgggtggtggagaagaagcagaggaggattcggagaggagaaggaagctatcgtcggaccagcaaatactccggcgacggaactcggcgg

SEQ ID NO: 11738 - DNA, 1005 bp, Arabidopsis thaliana
gaatatggtctaaaattgaatttaaattaacaaaactatctataaagtttgaaacgatcttacctaatcaaaacaaataattatctaagcaatctgttttgttttgttcggattatataggtccccaaaacgtcatacaataaaacttgcttaaatattttgtttttttggtacattaaaaaattagtatcttgttgtgtttttgtttggtttgaaaagctgaaaatgtgtgaaggagaagaaggaagctataaaaaagagtttaggtacaaaagtaaaaagttattatgtcggtgggttcattaaaagaaaccaaaaaacataaacaagtaattttgttttggcataacgaagcatcttcttcttcttccttgtatttattatccatttccagagattctcccttgtgagataacaacgaagaacgaaagagagagagagagagagagatatgatggacggcgttgaaggcggcacggcgatgtacggtggtctcgagacggtgcaatacgtacggacgcatcatcaacatctgtgcagagaaaaccagtgtacctctgctcttgtcaaacacatcaaagctcctcttcatctcgtaagcttctccaatctaccactaatttcacccttttcgtaccattttctccatgatccgtcaattttgatcccaaccatcgatttagggttttttcccccaaatctctgtttaacgattgattataattgattttttttaggtttggtcacttgtacggagatttgatcagccgcagaaatacaaaccgtttgtgagcagatgtacagtaatcggtgatcctgaaatcggcagtctgagagaagtcaatgttaaatctggtcttcctgcaacaacatctactgagagattagaacttcttgatgatgaagaacacatcctcggtatcaaaatcatcggtggtgatcacagacttaaggtacagcgagagaaatcaaatctcattgatgtttgtttatatgcagattctc

SEQ ID NO: 11739 - DNA, 509 bp, Arabidopsis thaliana
atcatcaagctgttccaatctctctgtactggtggttgctggaagaccagatttgacatttacttctctgagacaaccgatctcaggatcaccatttacagtgcatctgcttataaatggtttgtatttctgcggctgatcaaatctccgcaccagtgaccaaacctgaatcatatatgtatattcactatccttagctttaagactaagagagaccaacaagtaaactaaaaaaaaaacgagaatttgcaaacaaaaatagaaagatcgggaaccctaaatccggcgaaatttcattttcccggtgaatcagacagaattaacttcaacaaagtacataaagaaaacagagaaagaaaaacagaggatgagagaatagaagagcgtacaagatgaacaggagcttgaatgtatttgacgagaacagaggtacactggttctctctgcagtggtgaagatgacgcaaccttaaggactgtgccgtcactagagctccgtacatctctgt

SEQ ID NO: 11740 - DNA, 566 bp, Arabidopsis thaliana
ggtaccggcatgcaaaggttcgaatccttttactccagattatgaacacccgatcggatctgtcaagaacgagctgacgacggaagctctcattaattagttgatgaggggaagcgactgacagcagtccctgagctaagccttggaaatcttaatgccataatgcctttaaaatcctcctagccattatcctactgcaataattcttgctaagaagaacgcccatgttgtggcaattccacccattaatagtaatggaactctgtgcaaagtttcctccagtaatatgagttaccaccccttgatcacttatactacccctcacactgatcgtacttccggcaaacataactagttcttcgagtaagattgggttgatgctgctgggcaacgtcccctccagtcgcaactcctcctccagtggctacccaccacctgctgcaaccctgccccagccacgccaccacctgctgcaacccagctcctgccactactccaccgtcagttgctccttctcctgctgatgttcccacgctctccacagcacggaagtcccacgtgagcca

SEQ ID NO: 11741 - DNA, 751 bp, Arabidopsis thaliana
ataccgaatgcaattgggaagaccataaaattagcatcctgcatgctagcagttaaaagaacacctttgaacttgtgtttgattgctgtcccatcaatcagcacaactctccgcatatacttcattcctgccacgcaagctcctattgcaaataacagatacttaaactgtttgctgcctgcaaccgcttctgtgtactctaatttataccttgtccctggatttgcttgctgaagcgaatgcatatagacagctaatagtttgtaactatcctcgtcgctacctctacaccttattatcgcagcttccttcgcataccaagccttcatataggttactgaaactttcagctcagctagcacaatgtccggtatgtctacacctcgtcgtccaggcatcccgtttgcatacttcccctatagcactttcgcaatgaccttagatgttgcaagtttcccatactgcgagcgtgatgcaatattgcaagtgtgtgtcagagttaaggtcctgacttcaaagttcttcgattcatgacctgctgaaacagcataaaccctccaacgacaccgacggtcaacaaaaacaaatattaatctgccaggatcaaatctggtctgcttgaaatggaacaaccttttaatagcatatatcgataatgttgttcgcatatgctctttatctttgaacattctgccaatgtatatggcatcttcctcagatgaggctggagcacacccatctacaaaagtca

SEQ ID NO: 11742 - DNA, 1138 bp, Arabidopsis thaliana
ttcctccattaatagctactctcctatgcttcaagagtctcctcttagccttcgtgtaacacaagtatccgctgagtattctaatggagagatgatgatatttgcaactttagtcttgcctcctaacacaaccgtcgttaatcacttatggcaagacggtccgttgaaggaaggagatagacttggaatgcacgcaatgagtggtgataatctcaaatccatggcttctttggatttgctttccggacaagtcacaaccacaaaatcagttaacagaaacatgttgttggtaaaacaaatccatgcaatagtgaatgcattgagctggggattctcatgcccatcggagttatggctgcaagatatatgaagaattacgaggtattagatcccacatggttctatatacacgttgtttgtcaaaccacgggttatttttccggtttgatcggaggattaggaacagcaatctacatggcgagacataccgggatgaggactacactgcataccgtgataggattacttctgtttgctttagggtttttgcagatactttcgctcaaagcaagaccgaacaaggatcataaatacagaaaatactggaactggtatcatcatactatgggatacatagtgattgtactaagcatatacaatatctacaaaggcttgtctattttacaacccggaagcatctggaaaatcgcctatactaccataatctgttgcattgcagcgtttgcggttgtgatggaaattttacagtttaagaagagatgggctagattgttcttcaagaaatccaaagacgtagaagctgatcaacccactgtttccgttgatgtggtctagttttttttttgttacttttacttttgggagattttaaggtcgtcttagcattcgtatgtcctttccttcagtaaaatgcagtcattcttaatttttacttgttaaagatgaattactttttgattaataaaagttcttttattcaataattcaacaagaaaaaattatttctaatagaccaaattctaagcatataaagtgttttggtccacatttgctttcaaaattggaagtacttgagcttgtcctgtgggccgcccaagttaactgctgctaataataa

SEQ ID NO: 11743 - DNA, 911 bp, Arabidopsis thaliana
cacacttgtcaccaaatactcgaacaaactacaaaacacggcaacaaaacagagactgcaaccaccatttgtctgaatgcttcattggttgacgaaggcgaacgacagggggaatcaatggcagttatgtttccagtgatattacccgccattgtttctgttgaatctgcaaaagtaacaacaacaacatcagcaagtaagattcgtttttccagttcgatagattcaagattgagtaatcagagagagaagtcacccgtcggtagccggagcaatcatgtacaaacagttaccataacctgcaatttcgagagctcaaatgagactactatggcttcacattactcttaatggatgtgttttggaaagtgtatgtatacaaatacttacttggatccttgtcaacttcaacgctggctccattaaagctgcaatctatgctgcttgctccgctctgttggtaataagtgttgaatgcataagatgcgtgtgagagaacagtatctggttcaaagcaaggttggtctggttgaacagctgaacaatcaacatttccaggaccacaagcccagtccaatgcagtctgcagttccgttaccgaagcttgtgaagaagcaatacaccatttcttggttcctcctcctccgtctcctccgatggttactgtcgagttaccgttgataattggacttgaacttggacttggactggtacctgtggttgaatttgttggagaaacaggcgtagtgttttcccagtgaagtctaaagcgtaaacattagttccgttcgcgtagaacattccccagtttctctcggattctatccaggcttccggttctcattgaacaacgagaataagtcacatctatctcttctccaggctttgcaggagtactaaccaatagaaac

SEQ ID NO: 11744 - DNA, 1084 bp, Arabidopsis thaliana
cagctttactcagagaactcgcgtaactagacaactgagccccagccacacaacacgtgagtataaaaccagcgtagaaggtcctcggcatcccaaatgcattagcaactaaaaccccgagaagcggtttcaaaacgtactgagcaacaaacccaacagataacggcactggtctgcaaccaaacaatgttctcacaaacgttagaaaaccagcttaactaaactgatcataaaacttataagagaatgctccaagtaccttttgaatgcaagagcaaaatcgtcaactgaaagctgaattccaatagataacataatccctccaagagcaggagcatagaggtctttagataccctgaaaacatttcatctgataatcatcttaaaaccccattcaaaatcttagtttctctaaacagaagatgacaaaacagagtcaactaagtaaaagccatagactttatcgttgattctcctgataagattcatatatatacaccaattttgtaaagatataaactttggcattacagagatagatagagagagtttgtgtgcaaaccaagtgaaactaggtgggtaagagagagcagcaacggcagtgagagcaacaacaaatggaagcaaagcagaccaaaactgagacgaatcagctttctctgtaacatcagttccaccacaatacgataacagagacatattcccatctctccaatgtaatccaactctgcccataaacggcgtcgttgaacacgccaccactggaaccaatccgctgtttctccgccttagtctaaaatctagaaagttactatgcgatgtagaatggagagaagataaaggtgaactagaagaccggaattgacaattgtaggattgagatttagcgggaagattatgatattcagatagtgagtgtctttgtatagctggttgtgggagagacagagaagcgattaaagtcatttctatattggtctggattttgttaagattggatgtttaggagagtaggtgacggttagagtgtgaacccaccgtgaaatgatgccgtggtccgtcgaaggagggaaattgagagggt

SEQ ID NO: 11745 - DNA, 655 bp, Arabidopsis thaliana columbia
  unsure (1)..(655): unsure at all n locations
acctgtttacgtagtggcaatcttcactggttgagaaacgactggagcatcatagcgttcaatcccgagacagagcaagcacgactgattccttgtagcttccatccaacaccggatacgaaggtgcttttcgcagcaaacgatgagaccaatctcctgacattgatatcagggacgaaaaaagcaatctcagtttacacactactcgggtatcacaagtggacactcgcaagccagttcaagaacgtatcaatggaggaatcagatcttgaatgttggaacgtggttgcatatgacggcaagtgtctagtggtgagggagaaaatgatacgttctagtgacattgagcttcatgtgtacgacatggaagctgacagttggggagtttttgagacggccaaatgttggtcccaagacttctacaagtttaagccctcctttttctctattgaggatgacgagcagacaaaggtgcttgtaccttctgatgaccaacgcctttcctatctaactacaattatggaaatgatacaaccaggtaaactatctcattgtttgattattttgagtcaatttattattcttaatcatcctactcccttgctcatctctttctaactgattccttgaaccagtanaagagaccacaaagatg

SEQ ID NO: 11746 - DNA, 997 bp, Arabidopsis thaliana
cctaaagaatcgtttatcaagtttggtgactcttaattggttatgactactaggatgcaattgaaaatcacagaagagaaaaagattgtagagttgtagctgagaagcttcaggtttctctcagagaagagcttgacaaagttaaagaggaaaaaatggctgcgacgaaaaggtacttaagatttgcttttcgctaatgtgttgtttacttgtttcattctctgttaactcctcttagctcttggctcaatcttttagttgttgtgttaactggaatgttttctttctttctaggtgacgtctctagaagatatgtacaagaggctgcaagagtacaacacaagtttgcaacaatataacaccaaactccagactgatcttgaagtagctagagaggctcacactcgtgctgaaaaagaaaagtcaagtatactggagaatcttactacactaagaggtcacagtaaatcactacaagatcaattagcatcgagccgggtaaatatccctggtctacaaacgtgattcttgtatttcttaatttgtgattgatttttcattgcatcttacttcgtttatcttccccttttgtgatcaaggtttcacaagatgaagcggtaaaacaaaaggattcattgctgatggaagttaataaccttcaaagcgagctgcaacaagtccgtgatgatcgtgatcgccatgttgtacagtcacaaaagctggctggtgagatactgatgtataaggagagtgttggaaagtcatctcatgagttggacattcttatagccaaatcaggatctttagaggttagtcaaagtcgacgtttcacatccttgccttatattttcaatattctgacaatgtcaatcttatgctgcaggaaacatgttcgttgcaaaaagagcgtattaaaatgttggagcaggaattagcttttgctaaggacaagcttaaggtgatatgcgatcaagtacctttggaattttgattggtg

SEQ ID NO: 11747 - DNA, 578 bp, Arabidopsis thaliana
tggaaagtctatatgcactaagcaaggcattgaaggacaacactgacctcttgcagtctctgtttggcatttcttcgaacaccttctgtgcattttcaaacatgccggcttttccatacagagaaatgatcctcgccgcgaatccctcttttgacatgtcgcggtacttcttctgctcctccaaaatctcttcgacatagtgtaatctctttgcggctacgagacggcgcacggttctatcgtacacggctatgttggtccggaaccgctccgactcacatgccttcttgaatttctccacgatccgtttggggtttcgttcgccattcacgagactggttagtgacttttgaggaggcgagattgcggcagtgactgcggtgggttcggagactacggtggcggcggaggaaaaacggcggatcgggcaagtgttgaaggtgccacggagaacgcgagatagagacgacatcgttttgggagtgagagcaaagggtttcagccttcaggagacgagtttaagaacaaatcaaatgaaggacgcatctgataatttaaaaatgttagtccttattttt

SEQ ID NO: 11748 - DNA, 1204 bp, Arabidopsis thaliana
ctgtttgtatttttctttcttcctcattattttcatgcaccttagtcgctacctcacccacgtggtttatcctcctgcctgctaaacaatctatggtttgatgtccccattttgaacatgtatgacacctcggtggcagccaaggatatacaaattcaactatcgtgtcccctcctttctctgacttgaaagaaaatttctttggtagatcctttgtcaaatccacttccacaaatacctttccttcgtcaaaagatttacacgcctctgtgtccgaatgtaatttatttggtgttccaagtggactagtgatcgcactcaagaccttccaggagaaatatttcggtggcacattttttactatcaccaaagaggaatagtcttgatttcttcttgttctgtgtcaactatggcgctccacttagttaaaaccacagggacgccacatagattccacattcctcttctaaggactcgccctcttgtacgttcgtcattgatacgaaatctcactgttgttttatctaccacatacacatcaatcttcactactctatctcctagagtccaaatcttgttgactagcgcatgaattcctcccacaaacggagcttttgcgaggaatctgccaacaagaaaattttcccacaatggatgtgcttcctcaaaaacattgttcggtatccttgctgttggaatgccatcaacttcttctaccactaactccaccttctccaattccttttcgtttttgaccatggatacccatgaactgtggaactttgatttttcctccttttggctcacgacttccaccgaaccaatctttggcagcatttcctttggatccatctcacacaaactctgtgaatcctggccccgatcttgttcctcacaactttccacaccaatcataccatctatactaacctcacttactttcgtagcatcaccttgaaaaacctcttcgctaacaaagatctcaccaacctctgttagttccctcgtatctgacctgctctgactcaaaaccccatctaccaacggcggcgtggccactggcggcatcagaacttgcgtgaaaagcaaaaaaccctaaatcgcacttattttcgcctccagagcaaaacgcaccgttttgttattaactcacccaacttccataatcatacttaacatatatatacttataatatcactacat

SEQ ID NO: 11749 - DNA, 789 bp, Arabidopsis thaliana
aggatccccatactatcatgatcagcaccagtaatgatatcaacttccaccgccggaaaagtcctcttcatgttgccagagcaatgtgaaggaacgatttggtcacagtcgccttgcatcaagtgaatcttaacgccagactttattagggtttcaagatgttcatcagcgactttggagccaccacatatcacattgtgcatactatgccatgcagagtgatgtgtgtgccttgttatgtccttgatcttccaatgaatctccctaaacaaaatcgaaaaacctttattgaaaaatatttgatagctttaaaaactgaaacaatcacccaaaccggttcaaatgtttttaccttttacctatacatagcttgattagccactcccatatcttatgatgcttgcagattatgaaacatacgcatctaccaatatgttcataccaagacatcaccgctgtcccaaacgcaagcggtggccacaaccgctttctagcgattcggttcaagaccgatccttctaccgatgaaggaaaataaggctgcattgataaagaaaaaaaacacaacaacataagttcataatcgaatctctttaaaattagattgatgattagaaagcaaactaatctctcaccggtgcaacaagagtaacggatttaacaatgttggaatgtttagcagccaaagcaagagcaattaagcaacccattgaatgtgcaaccacatgaaaagaatctaattggtatggcttaatgacagatctctctatcgtatccacatgatctttc

SEQ ID NO: 11750 - DNA, 688 bp, Arabidopsis thaliana columbia
aatgttgtttttagtacataaatatccctacagaaaatccacataatttgaaaagaaatgaaaaaaataaaaaacgaacccggaagtttggaccttggaggcggagccatttataaacaacactcgagaaaacgcttgagaagacgtattcaacgttgggttggttccatggatcctcccacccaaagccataactcggtccgtactgttccaggctcgaatcatagccacaccgatttgattatctcatcgttcctttcgtttccagattcctctccgatctccattagcaattccttcgatcgagtccttgatagagctctcgcctccgcttccgctgatgaatccgttcaggatcgtctcgtcgatcgtactctcgaactcgcgtcgcttcttctcgattccactaggcgttgcttccgtaagcgagcttctgttcacaattccaattcctggtccctccctccagaacttaccattaaggtaacaaccaaatcggaaaatttctcgaaactttattgaatctagaggcgatgatgttgatgattctcaaattatgctttgttcgtgaaaacttgacacatttgcgttgttgaatcattgtgatttgtgttcaattttaggaagagttggaattttaggatatgtcatctttagtggtttccatgtactctgtttaatttgatta

SEQ ID NO: 11751 - DNA, 701 bp, Arabidopsis thaliana
ctaaagcgcccaaatcaggcaatccaccgtttcactgcgaccatcttccagctccagcgtcaggctaccatcggtatttttcactaccgctttcgggatggcgttggtgtgcagctgcgggccttcggcgttcatcacttcgaccagcgtttcggaaatcatcgggtcgaagctgcgcacggcgtcatgtttacgcacaaacagatgcgttttcgcgccgaggccgttaatcacgcccgccagctcaacggcgatgtaacccgcgccaacaaccgccacgcgctctggcaaagcaggaagggcgaagaagccatcagaatcaataccgtattccacgcccggaatatccgggtggctcggacgaccgcctgtggcgatcagaatatgatcggccgtgatggtttcgccgtttacctccagcgttttggcatcaacgaagcgggcaaagcctttgattacatcaacgttatttttaccgagcacgttttcataggaagtatgaatacggtcgatataggcggtacggctggcgatcaacgtttcccagttgaatttattgatagtggtatcaaaaccataatccgggccgtacatatggatcgcttcacggatttgcgccgcgtgccacatcacttttttcggcacacagccaacatttacgcaggtgccgcccagctctttggcttcaatcagcgcacttt

SEQ ID NO: 11752 - DNA, 650 bp, Arabidopsis thaliana
ggctgctatggcatcttaaaaggcgataacctaatcaccatgggtaaaaactttaaatgaagattataacaggaaataaacatctaactggtcaaagtgcatttaagtctgtacctctttggaattttctttatgatttgagaaatatggcaccaaaataataattggtatagatcctaagatcgctgtttgtgaaatgctttagtcatttggtaatgttctctacttgtttcctctttgtcgcaggttatggtttctggtaaagaagagcccgaatcatctctaccaccttctatggatggccttcttagagtccacatgcggatagttgatggtttggatggtgaagcttctcaagcccctccgccttcaaaggtgtcaacaagattactagtcccagcatctcaggctggaagtttgattggaaaacagggaggaacagttaaagctattcaagaagcatccgcttgtatagtcagagttcttggatcaggttccttctcttcacaatttacatgctgaaaaaattctttcttgctttgtgtttttggttcagttgtgctatggactattccctatttccccatatttgtagagataaaggcactataagtttctatgttatcttcatctgcaagatttgctgaacc

SEQ ID NO: 11753 - DNA, 397 bp, Arabidopsis thaliana
  unsure (1)..(397): unsure at all n locations
tagtaacaccngaatggccatcggagaggtccaacgtaatttattcgagacctttgcacggatcgcgtcttatggaagtcttgaagatgttgcctgaatttggaggaactgtgctaaaagaaccacctactgagctgcaaagggaatcattgctgagacattctgttgttgcagagagatcaccaaaacataaagtccaagaagaggggccaagctcaatgtttaacaaaaaattaggtaagaggataatggcatcaacagattcagagagtgagactagggtcaagtcagtgcgtaccggtcgaaagcctattgggaacccagaggacgagcaagagacttccaagccgagtgacgatgaattcttaagaggaaagagagttcttgtggtcgatga

SEQ ID NO: 11754 - DNA, 619 bp, Arabidopsis thaliana
gattttatttaaatcaaaaactctagaattagtggtgaaagagagctaagagactgccaaaaaatcgagttaatacttggccattttattgcctttaggagtgtggaaaccgttgatcaaaaccgcggtactcgttccacttggatatgtcagcttgtagtctatgatcatgatctggttaaccaaaaaaagaagcataatgaacacttagcaatgtagacccaaaccagccaacaggggattaatagtccaaacttggccaatattaatctccgtcctatgttggctatagcgggtttggccaggcccatatcacacttatatgggccggactgacccgcaaactttggcctaccgcaacatctctaactacaaattcaatgagacagaatcttaaataatctctacctttcttagaggaaccaatgctaaaagaccaacaaagcaagtaaagaacaagaaagcggtcatccaaccgattccaggctctttcgtgccttccggataatcccatcagtgtgagttctcctgactgttcataagtaattgtgttcaaaccaagaaggtatgaaccaaacccacctgcaaatcgcacaaacacatagctcaaaacaatgat

SEQ ID NO: 11755 - DNA, 528 bp, Arabidopsis thaliana
cctgagtcctagattcaacaactgtctcagctcaagtccaaagcaagaaggttctagagtggttcttctattgaaaaatgaagaacgcagaagagttacagagaaatacataaagaatcttgggattaaagttacagtggtggagaaatgggagcatttgagttatgctttggagagactttttggattttcacctcagagttccatgggaagagcagagtgtagtttgtcatgtccgagctcaagggagttacctttcattggcatggacggtattgattcaagaagccaacttcctaaaaggagaagcatcagtttctctgcagttgtccttttggtgattgatgcaaaaactggaccattttttgagctgtgcgatattgtcaacagtttcgtagaggcttgcccatggaatatcctgtaaagttgtttggcttaacgaatcgagcactcgtgtaagtgagagaggggacattagttgttcgagacatttgcacggatcgcgtcttatggaagtcttgaagatgt

SEQ ID NO: 11756 - DNA, 845 bp, Arabidopsis thaliana
ccgtcctcgattgcctgaagcggtcactgcggcgattgccgccgccagagacgcaatggacacggcggaatgcagatgagctttctccacgcgaactctatctctcttctttacggcggagaccttcccgccgacgaattctcggtggtggaacattttccgatcgttcccgttctccgcgcgtgaaccgcactcgctagctttcccgtctgttgaagaaagaaacaatttaaacattttgggctttttacagattgggtcttaatattattattttggttctataaatatattcttggcccataaacttaaaacacctaacaaattgttagcataaagtaataatttcgttacacatgagaatataatgaaaattactttacactaaaaaaaaaaaagtatttacaacattattggaaaataacgtctaactgtttcacttattgtatctttgtggcaactactgaaaacgacaacttattgtatgcaaatttataaacgtgaaaattcaactattaaaatcaattacaagtgtataatattttgatcccaaaaaaaaaaaagacttcatttgcatgcatccaagatctttagtgagtttctaatagtactatcaaaattaatttcctttatttgatggtaacgtacgatcatatcaaccatacgaacttaatatacaataaagagaagatgaaagcaagagacggcttacttgtagcggcggtggtggtgctaccggagccagagaagtgacatcggccaactgagaaatattagggtttttgttgagttgtttatcagatttctgagatgataaagctaaagagatctcagaagtagaaaga

SEQ ID NO: 11757 - DNA, 615 bp, Arabidopsis thaliana
atccttatcatacatagtatatgcgatggaaaactgaaactaactctgtttccaaacgttagggttccttgaaattgcctaccaattgttcccgctccaaccgtcataatccacggcgctccgttaatcaaactccagtaatatggcccgtcgttaccgccggaagtaaccacgaaaacgcctttttgaatcgctgcaaaagatgcgactgcgattggatcattttctagaccgaaaccatcattgtcgtcatcatcctcaaaactcaatcctagcgacagagatatcacatggactccatctcgaatcgcttgatcaatcgctgcgattacatctgatgagtaaatcccttcttcccacgcgggctttgtagattgctagatgcgcgtgtggtgcgattcctgaggcggttccttgggcgtaagagaagtaagacgcgttcttaacatgattcccagctgcaatggctgcaacatgagtgccgtgtccgattgtatcgtacggtgaagagtattggccaatctaggtttctctcaaatgagggttgttggcgaacaaaccattgttgaatacttagcactgattagtgtcttgttgcacaaggaagaagaattg

SEQ ID NO: 11758 - DNA, 684 bp, Arabidopsis thaliana
gagaaatcatgtctatattcttaactgcttacacaacaattaaaattcctagtgcatatatcaggtgctttaacacctaatcagctgtttaaaccacctaagttggacattaagaccacttaagacactccaatctaccctagcagcctagggaaaattgcactggaaggtattggctaaatggttacttataccgactaatttaagactaccaaggagttcattcagaagaacaagggtaggcaaataaaacataccaacaatgtcgcaccaagtcctttatatagacccaaaattccctcttctctgcaaatggtacggaaggcatgcccaacaccctgataatagattgaatttctctggaaaggatcaaagataatgtatttaggcaaaggggagactaaaaaccctttcttcttaatagttaaaattaacgttgataatacaattacctgtgcagaaagccgtgtccttacaagatcgagagggtaggtagctgaagcagctgttagtccagccaagccaccacttacaaagtgcacagaaatgtccacacccgcatttcctttataactctgcaagactggattcgagtgcaagaactgcaaacaaaaagcaaggcaaggcttagcatgaactactacagaccacactctaaaagagacttgaatgcaacttacagtc

SEQ ID NO: 11759 - DNA, 568 bp, Arabidopsis thaliana columbia
atactaacctaagtaaaatatgtattgctgtttttgataagaaaagcaagtaaaagaaaagtaaatactgtaacaatagagggtaagaacagtgagaacagaggattcaccttgcattttggatagatgtttcttcactttgccttgacagcctctgcagtgacagtggagagacactctaagaacaactacctgcagtccaaaaaatacaacacaaatcaccctccaagctctctttattaacattcatgccatccgtacacagtaaaagtaaaacgacaactttactttacttgcctggtctgaacctgaaccagaagacttcttcttctcttctacgggaccagaagagcctctttttggcgcagaagcttcactttcctccgttgcaaccgtatcctgacccgtagacccggctaaagaaacagggtcggatcccagaagatacctagttgaaccaggaggagttttgggtgttgcaacaacacagccaaaactcttcctcgctaagctgacgtcatagctaatcagcttcatcaacgaccctgaattgcttctcgtcctttat

SEQ ID NO: 11760 - DNA, 982 bp, Arabidopsis thaliana
aacacattcatagcttcatttctcataatcttgccgttttaagcttcagccattcaacgacagagttacttctccaaatgtacctcaggggttaagaagcagccctgcaagtggcggcggattcgcggggcggtttgtgaatttggagttgagatcatacctcaagttcttgcattggatgcctgaagctcttaagatgcctgagcgtgagctgattgatcatgctggtttagactctgttgtctatctccggatttactggctcgggtatgaaaaaacttgagtcttattgagtcaaccaattagtttaatgtctcataaagctgaaccattttttgaatgtagattatagagtagagtttgttggtcaagattagataaaaaaattatattttgaggctaattttgtcatcaagaagaggaaattacgttgactaagtctttagagagaagaagcaattctcatgtctgtccattagatttgagtcatttagtagtgaagattttttcctttgttttcttatgttgcaggcttaagatttttgctccaatagcaatgcttgcttgggcagttcttgtaccggttaattggacaaacaacgagttggagttggctaagcattttaagaatgtgacttcaagtgatattgacaaactaacaatttcgaatatcccagaaggttcaaataggtttgttccaccaatctcgagtgtgtgtgtgtgtgctttcaggtgctttaaaatgttggtttgaggtataaaatccccagttacattgtattgatttttccaggttttgggctcatatcataatggcttatgcctttacaatctggacttgttatatgctgatgaaggagtatgagacagttgctaacatgaggcttcagtttcttgcctcagaaggccgtcgacctgaccagttcactgtaagattcgtttcttatcccttgcttttaaactcataacacagctggtactg

SEQ ID NO: 11761 - DNA, 610 bp, Arabidopsis thaliana
ctagtaacgtgcgccagtgtgctgtaaagctcgcccgtctggctgaaaagcgcggctatcatcgctactggctggcagaacaccacaatatgactggcattgcagtgctgccacgtcggtattgatcggctatctggcggcgaataccaccacgctgcatctggggtctggcggcgtgatgttgcctaaccactcaccgttggtcattgcagaacagttcggcacgcttaatacactctatccggggcgaatcgatttggggctgggtcgtgctccgggtagtgaccaacggacaatgatggcgctacgtcgtcatatgagcggcgatattgataatttcccccgcgatgtggcggacgtggtggactggtttgacgcccgcgatcccaatccgcatgtgcgcccggtaccaggctatggcgagaaaatccccgtgtggttgttaggctccagcctttacagcgcgcaactggcggcgcacttggtctgccgtttgcgtttgcctcacacttcgcgccggatatgctgttccaggcgctgcatctttatcgcagcaacttcaaaccgtcagcacggctggaaaaaccatacgcgatggtgtgcacaatat

SEQ ID NO: 11762 - DNA, 456 bp, Arabidopsis thaliana
tctagtaacgtcgccagtgtgctctaaagtatacattgccgaacaatgtggtctttagtttcataagtcgttccctcaggaagaatcgatgattggcatttttcacagcattctaacaatcacgtttcatcgtcagcccttgtcgtgtaaggtggttgcctaaacacgcccgttattcatcacgccgaacgcgccggaatacatgatcggggttatccagtcgttaaatcaaggtatccggttttgagcaagacaccactcacagcaaaggccatagacgccgcacagccgcaggacaagccctataaactcaccgattcactgacgccggggctgtttttgctggtgcatcccaacggttcgaaatactggcgattcaggtattggctgaataaacgagagtttttgcaggccattggagtttaccgctaatcacactcaaagaagcacgcaggc

SEQ ID NO: 11763 - DNA, 954 bp, Arabidopsis thaliana
aaaatgctctaccagttcacttacagattcatctgcgtccggggtacattcctaacaaggacctatcacaaatcccgacgtattagatcgttggccacagctgttcagtctttaaagtttaaaccaaggggaagaaaggagtcttacagtgaactggtcaggtcgacgagcttctgatgcaacaaactggagcctcatgttagcaattgtctcatattctttcatcagcacataacaagtccagatggtaaaggcataagccattactatatgagtccaaaacctggcaaaacataaaatgtagctcaaatctttacctgctacaccatttgtgacagatggaaacataaaagactcaagatggtaaggtctaacacacctcattgaatactctggaatatttgaaacagagagtttgtcaatgtcgctcgaagttacattccttaactgcttagccatctccaatgtgttattagtccagttgactggcacaagaactgcccaagcaagcactgctattggagtaaagatcttaagcctgcgcatacaaagacaacaaaagagatatgtttatcaaaatcaataaggagacaacaaaaagtggccctgagctaaacttatgttgacccttcctacttccaaaaatagcaaataacatactgacccttttgtttttttgtcaattagattcaactaagactaaatcaaccaatacacacacaaacccataaaccaaataatctacaaagttcaaaactttaccccagccagtaaatccggagataaacaactgaatccaaaccagcatgatcaataagctcaggctcaggcatcttcagagcctctggcatccaattcaagaacttcatataagacctgaagtccaggttcacaaacctctgcgcaaaggcgcaccacgagcaggggtgcttcttaacccttgagatacatttt

SEQ ID NO: 11764 - DNA, 577 bp, Arabidopsis thaliana
tagtaacgtccgccagtgtgctctaaagaaccaccaccatatcgtcggcggtcatcacgtcgtactcgacgccggaaggtttgattaccatccattgccgcgtttcgtctaccgcgctgacattgccccaggtgaacgtcaccagatggtgagcgggaagcgccagattcgccgccagcacgtcggctttcagttgctctaacatataaatccagcctcctgcatacgcgcttcaatccaacgccgcgcctgaataatctccagcaccggctctttggctttttcggtccacatctcaatcaggaaagaaccgcgatagttcagtttatgcagcgttttgaagatgccaacgaaatcgacgcagccttcgccaaacggcacgtcgcggaactgtccgggactttgcccggtgactggctgggtgtctttcaggtggatcgcggcgatacggtcaatgcccagtttcagttcggcgggaacatcattgccccaggcgctgaggttgccgacgtccggggtagacggtgaaccacggtgaggcgagcatctcgtcccattttttccatttgctgatgga

SEQ ID NO: 11765 - DNA, 1885 bp, Arabidopsis thaliana
gcttctccgtcctttatctacctgaacactctttccatcgccggaggaggaggtactctcgtaattttcgaaagctgacggtagggagcaacgtagtcgtctccggaggaacacggtgccgtgaaagatctacgaccatctttgataatcgggttatgacggtcgatggctcgagcggtgacggtacgttcgccgttagccgtagcggtcgatgcttgcgatgcacaataaaacataccggctttcatgtatttttggcaaaacaagagcttattaatatatacaaacaaaaagcaagtcacatatatatttacgttacatatataccaatatatatacgtgtaaattgataaatatgcgtcagtgtgtcacatgagtgtgttagtgtgtgtaaggtcagagagtaacagagagttgagtagaaacgctcttgtattgtccacataaaacgtattagaagttgagatgtcactattgggatatttatgtactacattacattattctcttggatatattcaaatgttgtgtattgaattcgaccgatcagtttctgtttcagaaagtcgaattaatggaaaatgggtaaaggaaaagactttaattacacgtttttgttttaaactgtaggtagaagaaatggaatgaatatagaaatttattataaagtgaatgattccttatatctcaagttctaacagactgaattgctctatccaacggaacccgaagcggaaacaccgaaacagagatcccacaactaatttttcagctgccatttgcataaatgcctcgatttattcaaaaagtattcaatgcaaatttttatttttgaaagtttttgtaaattgtaaatgcaaacaacaaacatagagagctttcttttcgtttaagatactaacctattttggaaacattgaatcaattatactgataaatacaaacgaaaacaaacaacctagacatattaaacacaagaatggtccatcggatgtcgtttcaaaattattcaaaaagctattttgtgtataaaccgagggagtatactaatgcatatttaaagttttaaacaaatataatgtgttaacattaaaaccaaaaaaatatgtaaatgtgaagagtacaaagggtaaccttttgtatgaaccgagcgaaattttatatcaatacctttccactaatattgagcctagtggtgaatggcccaatgacaaaatcccaagtcaaaaacattagctaatataagtagtaatctgtgtcttggagatagaaccaaaaagaaaaaacagagagaacaaaaagacttagcagagctcttgaaaaagagactatacatatatcaaatcaaagcagaagaaggattatactctatatctctgtgtgactgacttagagacctttaccttcgtcttcgtttaagattcggttacggaagtcactaaccatgcgaggcagtccctccctcagagatatctttggttcccagttcaactgttcctttgctttgcttatgtctggtttcctcttgtgaggatcgtctgctgtgtttggtttgaactctatggtcgcgcttgggtcgatcacctccttaaccacctgcacacaaagttcccatttcatacacggaattggcgtttctttatgagacatcttaaacgttgatgcagatttctaaggatgtatataacaaccatatcaaactgaatttcttcaaactaaaaccgacccaaactttctttagatgaaaagataaaaacaattcgaagtttggacagactcttcacaaaagctaaaccagaccggagaactgaatgaccaggccttaactttaccatttgggtttcaaatctcttttgcaggaagtaacacgaagatgggtaaagta

SEQ ID NO: 11766 - DNA, 449 bp, Arabidopsis thaliana
tctagtaacgttcgccagtgtgctttaaaggtaagatctccggttcactttgcgccgcggcggttctgcttgttctttggcgattaaatgcaggctgatacccggctccagacgcccggcgcgcccggcacgctgcgtcatggatgcctggctaacgcgttgagtaatcagtcgcgtaagcccgtgcgcggatcaaaacgcgccacacgctcctgggcacaatccaccaccagacgaataccttcaatggttaaactggtttcagcaatattggtcgccagcaccactttgcgcatcccttgcggtgccgggaggatcgcttttcgctgatcgttcagcgacaacgcgccatacagcgggcagagcaatacatcactgccgatgcgcgaacgcagttgttcctgcacacgctgaatttctccgacgccaggtaaaaataacagtaatga

SEQ ID NO: 11767 - DNA, 550 bp, Arabidopsis thaliana
tagtaacgtccgccagtgtgctttaaagtgattgggctggtgaaaaagcattgtgagatctgggccggtgactaagccgggaattgccttacagaagaatatccctgacaatggtgttttaacttacatttaacaatgttatgaaacaccctttagaaaccttgaccaccgcagcaggcattttgctgatggctttcctctcttgcctgctgctgcccgcccccgcactggggctggcgctggcacaaaaactggtgaccatgttccatctgatggatcttagtcagctttacactttattgttttgtctgtggttttaagtgctgggcgctattgagtattttgttctgcgctttatctggcgacgctggttctcgctggcggattaaacgtcgattatagccgtacttcgcggcatactttgcttattctccttcgcctaaaggaacgtttatggataagcaatcactgcacgaaacggcgaaacgcatggcccttgagttaccctttgtcgagctttgctggccttttggcccggagttcgatgttt

SEQ ID NO: 11768 - DNA, 890 bp, Arabidopsis thaliana columbia
caacaaaaacctcataccatctcaaatatataacgcatatgtacaagagattcatatccatgaattaggtacgatccacctacgtttagttaaaaatttacacctcgaggcactgagagaagcctgagttcataggcagcttcaaatatgatccactataagtctataaccattatcctatgtaaactccgaaactgattgaaattttgtaagtaacgatgcttgaccccttctttcagaactgaagagggttaggtaaggtcactgacaaattaagcagaggggattgggtttagagctataaatatccgggtaacacactttatttggacaaaaagggtgttattgggaggtgaagaaggataagtgttcatttccgctcaatggcttccgctggcaagtttaaatctagtaaggtggtttggctgtttctgtaactttcgtctattctagcacgcttcccggaagagcaacttgtgtcttccgacttccctgactccaaagcttgatcgagcctggacgtccatcctgtattaaagagtttgctttgtaagattaccggtaagtctccaacctaatgatgtgaagtttcaagatttactgcttgtaccacaatccgaagactgaccaacagcttccttggaattctgggaactataaaaatcagatgctcgttctatgccgtttgatctgtatggagtaatgttgtggatgccaagttgcagagaacccaacaagtcattctcaatgcattcatacctgcaaaaagcttgacatgtcagtttcaatataggttgttagcactctctgatgtcttttagattattaactaacatattttcgcagagtgtatcgaccgcaactgacaaattgatgacttgaatccttat

SEQ ID NO: 11769 - DNA, 583 bp, Arabidopsis thaliana
ctgatccccgattccgtgatctgagaccaaagtatttgagatgtcaaggtcattgactgagtagcagttcttggctactgcgacaaggcttgcgtttgtgatgttcttgcagccgtcaaggttaagagactccaatgtgcgtccgtggcaaacagaaattgcagagactgtgttgtctgaaacattgatacattcgctcaggttcaccttcactagaccaacattgttgctctgtagcaactcgcgcacacctgcatctgtcactccgtttagtccacagagttcaacatcctgaagctgatgacagaactttcccaagaaagcgagacttgcatccccaaacccagggcagcatcggattgacagagaacgtaaagagctgcaactgggtgatggcagagaggattctgagttgaagtcactgatgcccagacagtttgccaaagagaaagctttcaactttgagccacagttcatgagaaaacccataagaccaaactggttgatcctgtggcattcttcaagtttcaaactttcaagtgacaatgcagatttggcaaaacgacaagtcctttaccagaac

SEQ ID NO: 11770 - DNA, 552 bp, Arabidopsis thaliana
  unsure (1)..(552): unsure at all n locations
taacgtccgccagtgtgctctaaagatggtgctcatgggttagtcctcagtatcctacgcagggctgcaagaatctgcccgcggattgttatgttcatgtcacaccatcccgttcgacatggtacagttgtacttggccagcagcagctggatcggcgtcggcccttgctcggcaactggtgcggcaatagcccggcgtaccggcggcactggcttaccctcggtgacgcgcctttcccacatgtccagcagatcgcctgcctcgcgtgccagttcaccatgcgttaactggcgctcggtgctgcggtggcgcaattctacgcaaatgtggtacatgaccggctgcgaccatggaaattgctcgctggagatgaattcgaacgaacgattacgccattcccagtactcggcgatcacctggtcaacgttgacgcccagcgcgccgccgctctgcttgcaccaggcgacgaactggcccggcgacggcaggaatgggcgctcctggcggcgggcaatgcgcatcgccggcatcgacatgagccatgntgtgga

SEQ ID NO: 11771 - DNA, 493 bp, Arabidopsis thaliana
tacagtaatttttttgactctcttcttcttcttcttcttcttcttcttcttcttcttcttcttcttcttcttcatattttccctatgatttggatctctaaaatcttcaatccccatgttctaatttaaaaaatcacaacactctctttatcatataccctattataaaccaaactttgatcctcgaatatattttattaaaaagataatattcgtgtttctcatgttggagtcataataaagaaacctttgtgttttaatttaatcccctccaagaaacctgaagattctaagaagctgccattaaaactaatacaggaagagagtccaaagaagaagaagaagaagagaaaatgtcacgtcttgacgacataccttcaagcccaggcaaattcaagatggagaaatcttcctacttgcatcgtctcagattccaatcttctctcacaaagtttgcatttatctccttcttcctcctctgtctcatctctct

SEQ ID NO: 11772 - DNA, 578 bp, Arabidopsis thaliana
tctagagtctagtaacggtccgccagtgtgctctaaaggctaatagcggcataattgatgatgatggctcgctctatatggcgggtttaccggcgaagggaacaataagcgtgcgctggggcgaactcccgatcaaatttgtcatatcaattacgagcttaccgaacaacaaattaactctgcgattacgcgaatggatgccatatgcagataatctttggagaaaaatgcgtgtcattactacgactattttttgccgccgtcttaatgttatggtgcgctcaaaccgctgcttatagcgggcagtgtcatactactcaggggaatccgtatattggcgtcaattttggcgttaaaaccctggaggaagaagcaaatacggcaggggtagttaaagacaaattttatcagtggaacgaatcgaatgattattatgtttcctgtgattgcgataaagacaatgtcagaagtggccgatgggcattcgccgcggattcaccgttagtctatttaggcgacaactggtacaaaattaatgactatcttgccgccaaagttttattgcaggttaaaggcag

SEQ ID NO: 11773 - DNA, 719 bp, Arabidopsis thaliana
gctattttcgaaaccctgagtccaaatcattgccatatgtggtccagctttgacctggagttttatgaactctgttcttgttcattaatccttgaagagctgcagaatcatcccactgtctcaaagaactatatgtgttgcttagcagcacatatgctgctgagctctgaggatccagacgcattagtttttctgcaactcgtctagccaagctcacatctccatggactctacatgaacttagtagaatctcccatagaacagagctacttttgtatggtgtagcttctgcaagcttctctgcatcttcaagccggccagctcttccaagacaatcaactatacagatgtaatgatccagctccggctcaattccatgaattctctgcatcgaactaagtatctcaagcccggtttccaccagtcctgagtggctacaagcagtcaagacagaaacgaaggttatcccatcaggcttctctcctgatgaaatcatctttctgtagagaccaacagcttcatcacctcgtccattatgaccatacccatgtatcatctcattccaaataaccgtgtttttcctcaaaacagcatcgaagaactgtcgagctgaatctatttccccacacttgcagtacatgtcggtaagagcggtttcaacaaaggaatcacttacatatccactcttcactaccagtccatgaaactgtcttccatgg

SEQ ID NO: 11774 - DNA, 553 bp, Arabidopsis thaliana
gtaacgtccgccagtgtgctctaaagctttagacagacgatatccgcgatgagggttatacgtacatcatgccgaagaacattctcaagcggttcatcatgattgccgatcttcgcgtgcaggtagccggatttctctatggtagctcgcctccagacaacgaccaagtgaaggaaattcggaccatcgtcatggtcccgcaggtgggtaacactcgcgaggttcaacttcctcagcagctaccgcaacacgattatctcaacagcctagagcccctcggagtaatccacaccatctccggcaatgagccgccatacatgactgcacaggacgtgactcagcattctcgcctgatgaatgcccattcatcctgggacaagaagacagtgacgatgaccgtatcgttcacaccgggttcggtctcccttgcagcatggggtcttactccccagggttacaagtggggagccgagaaccgggatacaacttccgatcagccgcagggattctcgaccagcatgggcgagaagtgccagttgttgttgagtgacaa

SEQ ID NO: 11775 - DNA, 678 bp, Arabidopsis thaliana
tgatacatgaaaaccaaaattgcagaaaaaaacaagattataaagtgttgcacaaaatttgagtagagaaggttcggtgagtgatataacaatttggcaagtaatagtttgcctaagctcaaagttttgaagacagtcttcttcttcatgactatcttcctctcccacgtttacctccacctcctcttcctcctcctctcttaccacctctgctactagtgctagcaccaccacgacgaccaccaaaatccctaccgccacttcttccacctctatcgctgctactgccaaaatcccttcctccaccaccaaaatccctgctgccaccacggcctcccctggccccaccaccacggcctcccctggccccacctcttccacctcttccgcctctcttgctctgcagataagaaactttgtttgccttttgctgtctctccttacgcacctggtccagatctttgatctctgaacgaacatgtgcgttaggcactgatccttgccgtctcttcccatctcggcctcctctacctgccaagttttctctttagacctattgacaactcaaaggtggcaaaacgctgaacttgtgttaaaaaaacgctgtccaacattaattacctgacattcgtgtggtttcgtctgcatcaccgctgtctcgggatactttcttgtgag

SEQ ID NO: 11776 - DNA, 333 bp, Arabidopsis thaliana
ccctatttttagtagagacagggttttgacatgttggccaggctggtcttgaactcccaacctcgggtgatccacccgcctcggcctcccaaagtgctgagattacaggcgtgacgaccatgtccgaccttggtaaattcttttacccctcaccactggccaagatactcgtggcttactatgacacatatcatgtcagagttatggtttccacatcatatcttccaatcggaccaccagttcaggaagggcctcatctcaggcatcccggggggtgtaccacacagtgttgttcaagaaacacgttagaatgctaagaaaaacactcacaca

SEQ ID NO: 11777 - DNA, 980 bp, Arabidopsis thaliana
tgacaaaactagttaattttagttgaagttatatcatcttagatataccaaaattaataacaatttcttatcagaatccactacatcatataactcacacaaaacatcaaattctatagaaacaatatctgcaatattacatatggcacctagatattgtgtccggcctaataaaaagctgcatgaaatttgtatattaatgtatcccatttttatgcgccagagatgaatcgtcaaaaagtcaacagaatcactagattcgagaacttgacttgacgataagcccaaaaatactcaaaagcttcgagccaccttctcgtacaagtcacgaggccagttccggtgcgtgttgcttgcaagaaacccagcaatctgcgcaaagcagtcagaggctcaagtttcatgacttttttaatagattcattcaaccaaactttatgtttttgttcattcatgtaccttggatctcatggcacggatcgacccatcagtgtcaggtacattgtccagacacgttagagcaactttgagcaggtccgggacacaagtctggaagtaaggagatgcgctctggaacacatcagcggttgcatcgggcattcttggatcaagatgaagaaatggaagttttgcaatttctctcaaagcatccagatgattgcctaatctacccaacttgtggatcgatagtattgcctcaagctctcttagtatggtttcttgttccatcactcgctctctttcctggagactgtcagtggcagagtaaaagcaaacaccttgagtacattttcaacttaaggcgaagtacatttctagcatgcaataatatacctaacttcagggtaatatttgtaagtctcaagaatatcgttccctgcgagaataagccctgatgttctactttcaccatccaaccttccacgggcaagagaacagatggcttcggatagacacttgtttatagtctccaaggcagc

SEQ ID NO: 11778 - DNA, 616 bp, Arabidopsis thaliana
aaaagggaataggtcaaaggataaaaagcagctggttaaaactagcagttacttaatccacttttcggttttaattacttatttatttccccttgaattggtgtagtcgtatgctagtattactattagatctcattacttatagggaacaaatataaactcgatagtttgatttgatttgaatttatttagattagattataccgtaatgaaaaaacacagtagtatttaaataagaaaaaaaagcacaaaaataacaagcgagcgagttagacaagaagaaagcaacaatacaaatttaaatacagaatacattatatcgaaagaggttaacaatccctaaaactgcgagcgtttttgtttgtgagagagaagaagagagagacgagtctgtatggcaaaaggatgaggaaggaagaagaagaagaagcaggatcttataacatgaacgtcgacgatactaagaacgataacaactatatctgcactgataatgattacatcgaagaagatgaagataatagcaacactaagaggagccaaacgcaagcatggggcacgtgggaagagctgttattagcatgcgccgttaaacgacacggatttggtgattggg

SEQ ID NO: 11779 - DNA, 607 bp, Arabidopsis thaliana
  unsure (1)..(607): unsure at all n locations
gtcgctcagaactctatagattccttccaaagatccgataacgtgtctaccatatcatcacgaacaacatgctagatccaactgctgccacagcgacgagtgtatatgcagcatacttcacggcctcatattttgttgtttcgaactcagctttcaactcattaaaaccctgaaatacacaaaacatatatatatatatatatatatatatatatatatatattattagttcttctgatttccgatttaaggagtaacctcaaatcacgagtgtaattaaaatgaatggttagaggaagagaaaagctataccatctcaactttgtttacgtggatatcatgatcacacctgttttaagtgaataggtcttagtttaattaatgggacaaaactaacagtagtctgagtgagtgagtgagnagcaccanccnctcgnctacnctgtcgnaacatccgctcgcgccttattcatatcggctcgcatttttcgacctcttctgcaacactagttgattgatattcctcacaaaaatacaaagaagcacactaattaggttggagagacaaatcttctacattttttataagtgagaaactgagtcattg

SEQ ID NO: 11780 - DNA, 334 bp, Arabidopsis thaliana
cggaccgagtcgactcagtatgcaacacatcctcctccaacctctgcaccttacccaaccaaacctggtcttgggacttgaacccacacgtttcaatcatttccgagtgggggctacaatgcgccggctcgttcctcaagggatttcctgcaagctcattcttcctcggctgtctaatcggcggcttagctctctctacactcgccgactcatcgctcggtcgtaagaacatgctcttgttgtcgtgtctcataatgtctctctcttccatgttaacagctttctcaacgagcatttgggtttatgcgtttgtgagattcttgaacgggtgtgg

SEQ ID NO: 11781 - DNA, 510 bp, Arabidopsis thaliana
caaccaatcactgatctctaggagaaaaagtgaggacccatagtttaagcgacactctttggttaaagaataaagattagatcggtccaatttatatatttacatgttccgccattatcatcttctaatttgaaaactcttcatcattccctaccaccggattcaatggcggcgaaaattcccggagtgatcgctttgttcgacgtcgacggtactctcacagctccaaggaaggaagctactccagaattgctcgattttatccgagaattgcgaaaggtatctcattgatccatcgttgctaagttccgtttctgttggttgtgtttatgcctacttagtgtttgatataatgtatgtgagagtttcaggtcgtcactattggagtcgtcggtggatctgatctaagtaagatatctgagcagcttggcaaaacaggtacgactgtgatcggatcggaaaaactataacctgctgtagaattttcgatttggtatctaagaaaggata

SEQ ID NO: 11782 - DNA, 486 bp, Arabidopsis thaliana
tgagtaaattcaaacaatagccataacttagataataatacatgagggtggattcaagttaatagcgagaagacacgagggcatttaagtcatttactgtttgtagacgtatggtcaatcccgctttggtgttacgtgaagtgttggctcctatataacctcgtcttctccaacttgttcttccccataaatctgataatcaatatatatcaaatactcaaaacaaaagagaaagaaattaaagagagagatgggaaacagcctaaggtgttgtctggcttgtgttcttccatgtggagcactagatttgatcaggatcgttcatctaaacggctacgttgaggagatcacacggtcaataaccgccggagagatcctccaagcaaaccctaaccatgtcctaagcaaaccatgttctcaaggagttgtccgcaaaatcttgatcttgtctcctgaatccgagctcaaacgaggaagcatctattt

SEQ ID NO: 11783 - DNA, 768 bp, Arabidopsis thaliana
cccaaacccgattaccctatcttctctctcgctcttggcttttgttccttgcgtgcaaagcaaccctttttctctctaactagaactcgaattccttctaggtttttttggggttctattttgtcaagagatttgatcataatggcgaaacctggttttaatcgaaacaaaaagatggtgaaacatgatgatcttattgtttcactgatgagtcgtatttcagaggatacgttgctagaaattgtcggacagagggtagagaacatgtatgccaaccacacagaatctcaaacgacgagtcctggaaaacaccaaactgttgatcctaatatctctggggatgcagtgccaataaagaagagaggtccttgtcaccgatcatcttcttctcccacgaagacaacaacatgtacgcgtgcgctcgaacaacaaagatcaatcacttccgtggaaccagtactacacaaaaccctaatcgaggtttagaaccgtctccttcttcttatgttactcgtcggtccaaagaaaaacgtcccattaatgtggaaaagagaagtcacaagaaacgcaaaatcatttgtcctttagaggaggaacccattcaaacaactccaccggagtggctcttgaacgtcatgaggagagaagagaacggttacaatccgaagttgatctcaacgaggcaactgtataagaccgatctcaaaaaaactgaagcacgtctctcagttccttttaagcaggtgaaaactccggactttttgacag

SEQ ID NO: 11784 - DNA, 588 bp, Arabidopsis thaliana
  unsure (1)..(588): unsure at all n locations
nnnnnnnnnnnnnnnnnnnnnnnctaaaggttatcgccttcgtgatggtaatcagatatatctaaataaaactcgcaaatgataatgattgttaatcatgataaatgcaagcgatttgtagaactgatatgtctatagtctgataagacgaaccgcctcttctcaggcatcattactcaacgccggatgcggcgtgaacgccttatccggcctacgtgtgagatgagtccacgtttaaaaatcatttttacacttgcaagaacgctcatatcagatataaattagatatatctaattaagcaaaaggaggctgatatgagccatcatcacgaagggtgttgtaaacatgaaggccagccacgccatgagggctgctgcaaaggtgagaagtcagaacacgagcactgcggacacggtcaccagcatgaacacggtcaatgctgcggtggtcgcacggtcgcggcggcggtcgtcggcaacgtttctttggtcaaggtgaattacgtctggtgattctggatattctctcgcgcgatgacagccacggttacgaattgattaaagcgattgagaatctacccaggggaa

SEQ ID NO: 11785 - DNA, 1249 bp, Arabidopsis thaliana
gggtacgagctcgaattgaactacgagggttgatttcttggtcactcttgagctttgtttgattggacaagcttagccattgtgttgttgtttcaggaggcgagacgcttttgggaagaattgagtatcagaaaggaaatatagaggcggcattgcgagtctttgaagggatagatatcaatggtatcacagtaaagatgaaaaccgctctaaccgttagagaagaccggaaacatagaagacggtctaaaggcggcttttctactgctccttcacctgccatgtctaaacatgctgttagtttacttttcgaagctatttttctcaaagccaagtctctccagcgtcttggaaggttccaaggtagtaacagtcatttctcttaatccgtgtttggttttgtttttggctaaacagaaatatcatgtgcttcttcttgcagaagctgcggagtcttgcagagttattcttgatatagtcgagacttctttagcagaaggtgcgtcggataatgtgactggagatattaagttgcaggagacactgacaaaagcggttgagctgcttcctgagttgtggaagcttgctgattcacctcgtgatgctattttgtcgtatagaagagcgcttctcaatcactggaaactcgatccagaaaccacggcgaggatacagaaagagtacgcagtgtttctcctctattccggggaagaagcagtgccgccaaacctacgttctcagactgagggctcattcattccgaggaacaatgtggaagaagctattcttcttctgatgttacttctcaggaaagttaatctgaaaagaatctcatgggatgcggcaatcttggaccatctctcgttcgctcttacaatcgcaggcgatctaaccgctctggctaagcagtttgaagagcttagtcctgagctcttggatcagagggaactttatcatacattgtctttgtgttaccaaggtgcaggagaaggtcttgttgcgttaggtttactgaggaagctattttcagaacgagaggatccaaacaggacttcgggtttgctgatggcttccaaaatatgcggtgagaggtctggtcttgctgaggaagggttagattatgcccggaaagctatcggaaacttggggaaggaatgcagtcaattagatggagcagcgcgtttcgttttagggatccgctcacggaaagctctagaatggctgttacagagactgagaggatagctag

SEQ ID NO: 11786 - DNA, 592 bp, Arabidopsis thaliana
tccccaacagggcttttccaagctttacttcacaacaaaactctccaatggtagctcccagtaatctgttacttctcgagggtaacccgcagtcatcatctttaccctcaaacccgggtttttctcctcatttcgagatcagcaagcgtctagaacattggtcaaacgctgcattgtcaaccaacattccacagagtgatgttcattcaaaacctgacaccttggaatggaatgcgttctgcgactcagctagtccgctagtaaacccaaacctggatacaaatccggcatctctctgcagaaacacgggttttggatccacaaatgctgcacaaacagacttcttttatccattacagatgaatcagcagcctgcaaacaactcaggtccagtgacagaagctcaactgtttagaagtagcaatccaaacgaaggtttactcatgggacaacagaagcttcagagtggtttgatggcttctgatgctggttccttagatgatatagtcaattccgtaatgacacaggtattggatacaatgaaaaccatttactttttgcacgttattcttttggagattctgaagatttg

SEQ ID NO: 11787 - DNA, 494 bp, Arabidopsis thaliana columbia
cgtgtgttcgtttaatcaaagtgatgcagaaagcatttgggagtttcatctataagatgttagccttttacgagtatatgacgaggggacttaacagatttcatctgttgcttgtaaggcttccgtttggaaagcagggtcatttccatttttttatcaaaattgtacaatttcttttattttattcgtatttgagtggtttcatgtatcatgtattatataatatttttataatataatataattttttcggtgttaaaaaaaacaaaacatattaaacggaaattgcgaacgttaatggaaaagaatatattttattattattataaatgctgtttggtacaggtggcttacaaaaatccaaagtgccgtaacttattagcttctctttcatttcaagtcaaaaagtccaaacctctgcagattttattcctaaacccgaccatggaagaatcatcaaaccaacaaatcctcaactccgagacccgacccga

SEQ ID NO: 11788 - DNA, 1135 bp, Arabidopsis thaliana
gctgggaaacaagttatgcttaaagcggtgttggcttcgatgccactctatgccatgacctgctttaaattgcccatctcgttgtgtaagaaaattcagtccctgctaacacgtttctggtgggatgataagcctgacaaaagaaaaacatcttgggtggcttggaccaagctatcgacgcctaaaaatgctgggggtttgggctttcgtgatattgagagatgcaatgactccctgctagccaagctggggtggcgcatcatccaaaatccggattccttgttagctcgcatgttgactagcaaatactgcagagactcctcctttatggagtgtaagattacttctagaccttctcatggttggcgtacattatagcaggcagagcgatattaaaacaagggctgggatggctaatcgttaatggagataaagtcaacctctggcaggatccctggctatccatctcgaaaccgctgactcctgttggacctgcagctagagaacatcaagaactgaaagtgtccacctgattaaccaggttacaaagcaatgggactgggaacgtatctctcagattctccctgggtatgaacccctcatatcacaactgcctggaccagcttgcagaggagaggacaaattggtctggttaccggttaaatccggttgttatacttcacgctcaggatatggactgacctcggtggagtttgtgccaccagctcttacgcgcttcaattggcaaaggcaactttggaaactgcctactatgcccaaaataaaaaccttcctgtggaaagcggcgagagacgctcttccagtggggctgcagctagtgagaaggcatattacgcctcaaggagagtgtcatagatgtggggctttggagtcaaccacacacatgctatttcattgtgaatttgcggtgcaggtctggaacttggctcctattcagatggaaaatatcccttgggggtcttcagtcacggatgctctgagtctactcaagaggtctcgcaaccttcctccgtcaggattacataaagcgtgtctgtttgcgtggatcagctggcacatgtggaaggcaagaaccatctgatttttaatacacctattactctgcgatagagat

SEQ ID NO: 11789 - DNA, 559 bp, Arabidopsis thaliana
gtaacgtccgccagtgtgctttaaaggctgaaggtccacggcgtgatttctgtcaaaagcagctgttctcccagttcttcgcgaatttcgcggcgtagtgcctcttcaattcgttcgccaggctccacgccgccacccgaaatcgcccattgaccggggaaaacgccgcgatcgtcggccattttacacagcaaataagcaccatcattttgaatcaaagggcatacaatagtccgttgtcgcacagggatattccttataaataaaaagaaaccatgagaatacggtaactcacaaatatgtgaaagtgacagtaatctcttttgcgatgataactgtacttattattatttttgtgtgtatcgataaagtgtgtttattttttcggcatttaattatttaagaagtatttagttacaataagtgactagatcctttttttcgctcattgaatcctctgtgccaggcagtacaatcccgcagctttgggaattttgattaattgcttgtgggaaaggggataatgaaaaaaattgcgctacgaggtctggccggaatg

SEQ ID NO: 11790 - DNA, 597 bp, Arabidopsis thaliana columbia
cccatctcgtcatagataaccaccgaggacacagtagatctagatggggagaattttagttttagcaaagatcaagctaacaaggagcttgagcagccactcatactacagcaacaataggcaagatacaaaacggtagaggaaggttttgatgtttaaaaagcacaagcttattcagtcaaaaaacagatgtagagattttcatgggcttatgaagaccttaagcatccagctaaaggcatctgaatctcgtgctgtggatctcgtcttctgagcgtaacgttcaaagcaataaacttcttcatctacgctctcgctggacactgtatcgtgtgctagctctacagctgctacttgggagacctggaaattctctgcagtctgttgcaacttctgtgcagactccatttcaccaagtgttaccagacatatcaacaacgacttcagctctcgctttcctccatcggtcatacgcatacctttcaaatgatcaacaagagccatctcctcacccgcactgcatttttccccaaattcatttacatttttgctcatcattggtactatcaatttgcataagagatgtctatatatata

SEQ ID NO: 11791 - DNA, 477 bp, Arabidopsis thaliana
tcgccaaatcctggtagaggtgtacaaaatggtgaagcgccatcgagtggtagcgcctttcggcaggccaatgatagctccagcagtaacagaaagactacctatgcatggaaagtgagcgactctctaatctggaagcacttggtcgaggaatgaaattgcagacagaccagaattcaacggaaatgagggcacaatataccccaacctatgggatactatgatagcaatgctaggagtatcgtacatagcactaagtaccttcatgacgaaattgacgagttatcctactaattatttaaaagatagacctaaaagctgtagggggataaaagaagcagacggacccaagaggagtagacaggaggtcgtaatcggcctcaggactgaaaacgatcgattcaatacatagagatcggtacaaagaatctagccgatcaagagctgattctttgaggaactcaagtgatagacaaa

SEQ ID NO: 11792 - DNA, 1181 bp, Arabidopsis thaliana
gctagtgtattattaataaaaatcatgtgatagatgtgattccatgttatccggatcgttgacttgacttagtacccataacgtttattatataattcatatagcattttatgattgtcaaatttatatttatacatatgatagactattatgtcaaaaagacaggtaaagccactttgtttacttattctttcttaactcaaaactccaaagggtaaaatcaaggtgaccattactctttcagtttcaaaagattgtattattgtaacaaggtgaccattactcttaaaatttattcaaaaataaccaaatctaaactaaaacgtaactaaaatttgatattattcatgaaattctaagaacaaatccaacatgatcccttaataatttccctttagtagtctagccttcttagtcggtcactaataataaagagtaaagagaccaaaagagagaagtcttagataacggtgacagagttaaaaaagaactcactaaaatagacggaggaaaaagtcatcaattcaacttgacggctaagttaacggcgattatcttcgttcacacaagcaacacaaaagagaaaacatgaatcatctctctctccctctctccggttccacagtaaagaattgattcctcaatctcacgcggaacaaaatccaaattctaaaattctaagaaaccactctaatcacatcgctctatcgatcaaaatcgaaacccttattcaaaaatctcttattttttccatttttctctcaatcatctgaatcggttttgagatgagctccgattcaccggcggctggagacggtggcgaacaagccgctgcgggaacaagcgtgccttcaccttcatacgacaaacaaaaggagaaggcacgtgtgagtagaacatctctgatactatggcacgcgcaccaaaacgacgcagctgcagttcggaaactcttggaggaagatccgactttggttcacgctagagactatgacaaacgaacgcctctccacgtggcgtcgcttcatggatggatcgatgttgttaaatgtctgcttgagtttggtgctgatgtcaatgctcaggataggtggaagaacacggtaaagcctcttcctttttattttgaattttgggttgcttcttctaagtttcttaactttgggctctagagagagtcg

SEQ ID NO: 11793 - DNA, 992 bp, Arabidopsis thaliana
cccattagtaatttctatttaggttgtacattgtaactatccaaaactctaaataaagaaaattacaaaacatagaggggacaaacacacactgacaccgcatacattacacattatataatgtgcatgaatacaacctacactttctagtaaagaaatgaaaatgaatataacctacaaattttaatatttaaagacacgttctaaagaataagatcgccggtttaaaacaattacctggtcatcattttggattaaactcattaggcattcattatataattgcaccaaacaagaaggggatcaagaaaatcacgaatcaccggagcaaaaaaatggcgggaggaggaacgaccttagagtacacaccaacttgggtggttgctctcgtctgctccgtcattgtctctatctcttttgccgtcgagcgtctcattcaccgtgccggaaaggttatatattacatattggctccttgtgtttattttatatgtatgcataattcatttagacgttgtagactaaatgactattatggatctatgcatgaggaatatagcactttaagaacaacgatcagaagcagctttttggggcattacaaaagatcaaagaaggtgacttcatgtttttgttgataaaaaaaaagatccatcatgtgatgatatcatttgttctaataggattcttaaaatttggaaacagaactcatgctagtagggttcatatcgttgctattatcggtcggccagtctaaaatcgcaaagatttgcatatcaaaggagttaagtgaaaagtttctcccttgtacgaaacctgcaggggctgagaagtcccttaaagactcctcccatttccagttcagcttcaccggccgtcatctcctcgccggagatgcccccgccggtgactactgctccctaaaggtattcttatctttgcaaatctttttttgacttacacgttttatttgaagacgtgcgtagaattaa

SEQ ID NO: 11794 - DNA, 606 bp, Arabidopsis thaliana
gccagtgtgctctaaagcatgatttggtgaaattccaaagccgacagtatatccgacgttgtgtaacaaaacgttcacatctatcagccaagattgttgtcttctttaagtgacgagcgtttttcagaatataaaccgcaatatctctatcttctggtctcccaaggtactgtggccacttgaaaatttgtagactcgacaacaagcattcaggaacagaacttggttgattccaaccatccaaactaatacccacatcatccacatgatcctaagaccaggcagaaaaataagattaaaaccatattgggcatcagacaaacaaaaaatagtttatatcgaagaaacttacttccattacagagatttctaatattcgtaagttaggagaatccttgagtaactggccaaggagactcggcgaatcccctctacacacacatagggtcagatgttcaagctggttgaaacaaaaccatcaccatacccatcctggccacaataccaaaattattaacaaagagttctataatttagattgcaacctgcagttgatagaaatggaacctttgaacatattgtaagatgcttgacagatgtgattga

SEQ ID NO: 11795 - DNA, 657 bp, Arabidopsis thaliana
aagaagcaacgaaatccgcccaacaggagacaaaggtgggcggtgtgagagatacctagccggagcctcagcttcaagaggacctgaaaatgacttcaaattctcgttttgaatcgatgacatcgctcctccataagctttcttctctacacgtgaagtgttgggttccacggtggtctttattaacggatttcgtccctcgttaaccgctatacaaatggagaatgcttgcaagagtgagagcgatgtattgtactcaaccgcgtaaacaccttctctgtatgtagtgaaactcaagtatggttggttgttattctcctgtactcctccctgcaacaaaactcacattagtgagattcataatttaagccaaaggttggtcttagtattcagagttttgagatgttatataacaaacctgaaagaaaagcttgaaggcatctgaagtggttggagaagggtttatgggtttattatgctgatttgtgaggattctaaggttacatcccgtgtcccagcctccacagtcacatgatccatctgatttccatcgttggatcagtgatgacggccctcctttgtgcgggagactgtgaactccacttggaagtacactgttgcgttaactctgcaaagtaatctccaagagtggttgag

SEQ ID NO: 11796 - DNA, 534 bp, Arabidopsis thaliana
tctagtaacttccgccagtgtgctttaaaggttatcagcgacctaccgctgtcgcctgctggcagaataaaagccgtgacatccattacattattcgccatctgacggaaacgctggggacagacaacctcgcggaaagtcatttacaggtggcgaacgaactgttttaccgcaataaagccgcctggctggtaggcaaactgatcacaccttccggcacattgccatttttgctgccgatccaccagacggacgacggcgagttatttattgatacctgcctgacgacgaccgccgaagcgagcattgtttttggctttgcgcgttcttattttatggtttatgcgccgctgcccgcagcgctggtcgagtggctacgggaaattctgccaggtaaaaccaccgctgaattgtatatggctatcggctgccagaagcacgccaaaaccgaaagctaccgcgaatatctcgtttatctacagggctgtaatgagcagttcattgaagcgccgggtattcgtggaatggtgatgt

SEQ ID NO: 11797 - DNA, 1455 bp, Arabidopsis thaliana
ggaagactgccaatatatgtctgcaaatgatgccagagaactcaaacatctggcaactgcaatttgctctcatctccaaaacgttgaacttaacgaaatgagccttgtgagcctctccatatttcgcaacctggtaggtaacaagatccccatcatcgtcagctttggatgccatgaaaagtcagggttccaactagttcttcctgaaatctcataaacaacttccttgtgtaaagttcagacgcctgcttctccattggagatggagtcttcagaacaggaggtgagttcattgtgtcataatctgctttaacttctttctcgagacgactctccaaagctttttcatacagcttaaagaactggcttagattggttgaagcgtttatataaccatcaaaatatgaattgatactatcactacgatgagttaaggacatgtcggcaaaaaaggtatcacggagatatactgggacccactgccggcgatcggagtatattgcttgtagccactcatgatctcttagctcatacttgtcaagaagtgaaaaccagcatctctcaaaatcctcaaccgactctgtcagattgacacatttgtggaaatctgactcaaacgaaggatgcttgaggaagacatgcgacacttctcctgacatttctttaaaatatgccatttgcaaaagcgatggcgggcaccaggaaaaacgtgcatgatggctgcacgtataacagcatcatgatcggtggtgattgagacaggagggtgggcggacattgcggctagccacgtattgaaaagccatacaaatgaagcctcagtttcattgatgataaaggcacagccgaaaagaatgggtttggcatggtgatttacaccagtgaagggtgcgaaaggcaaacggtacctgttggacctgtaggttgtatcaaatgtaacggtgtctccaaagtgagtgaaatccattatagctttaggatcagcccagaagacattaccaacagactgatcttcgcttccctgaacagaataaaagaagtttgggttgtcagcattcatctgcctcaagtagtcaagaagaagctgaatctctccttctatgctcttctggcggttgttcctcatataattcctacagtccacttcggtgaaaccaaccttgctgatgccaccatactctttgatgagggcggacatgattctgcggggacccattcctgcagcttgaagtgtgtcaatcaaagtcttggcagggccagagatttgcctgtgggaacgcagacagtgaacttggtcgggaggaacaagctcatggttgtggtctttgacaaagccagagacaagccatttaccggaatcctgcatcttaacagagagggaggctttgcaaccgactcgagtgatggtcctgggacgcttgatcctcctgtccttggtgcgcttttcattcatat

SEQ ID NO: 11798 - DNA, 1037 bp, Arabidopsis thaliana
aatatctgtcccccatatcttcaaggttagatcatcactgcaaatacacattcaggcaagcttgctactgtaagaacaatatcccaagagacagattacattgcttctagaatgcctatgggagacaaggagagaagattcactaacctacaagtgaccatcttgtcccctgcagcgttaaatgagatggaccataccgttgaagagtgaccgctgtttgaagaagaaaggcatatattaatctactacttcaaaagtaagagcctaataagaaaaaaatcgatagcatataagaaaaagtagaagatatacttgttagattcacctaaggtttggacacattgatactcaccatcatcatcttcagaccaccaaacctgtgagtagcacgccactagcgttattcaattatataattttagtgtttttgtgtaataaatttcaagttctgcattactaaaacctaattagagtattcgcattaccttgatggtgttatcataactgcaagaaaataaaacatccatggtgggatgccactgaaccatcttcacatcttgtgtatgcccagttaataccgcagcacagtcatattcattcccttcaagcacttcccaaatccaaacagacttatctctactacatgttgcaaggcatgaaccagatgcattccatgatacacttttagacttcgttttcatgtccctacacacattttttttaataagattctactagccaaaaacgtgcgatacaaagcataaagacagtacaagaaaaccaccaaaagctttgagcataattaaatatgaactatgaagtgaacactgaaaaactccatgagagtttgagcttagcattaaagatcaagaaagaacaaagtcaaaagagcaaacaggagctgtgaaaagttatgctttcaggttcaaagaactaattctggataagaatttgacaatttgtggatggttcaaggattgggctagaaagtacctccaaagtggaaatacactcaaactcagaaccgtaattcttcc

SEQ ID NO: 11799 - DNA, 1392 bp, Arabidopsis thaliana
taaaaaaaaatgtaatgttgatatttttatgatgaaaaaatagtaatgtttaatttctttcttctaaatattagatgtaaaatatgtttaaaatattatttattgatgtcacgttgctttaagcaaataatttgattctttattgtgttttgttttaaaataggtctatcatgcgcctcgtctatggtacgtccgtgtgaacgtgatcgaagcacaagacttgattccgacagacaaaactaggttccctgatgtttacgtcaaggcgcagctaggaaaccaagtcatgaagaccagaccatgccaagctcgaacccttggtgccgtatggaacgaagactttttgtttgttgttgcggagccatttgaagaccatttagttctcaccgtcgaggaccgggttgctccaggaaaggacgagatagttggtcgtacttacattcctttgaacacggtagagaagcgagctgatgatcatatgatacatgcgcgatggtactgcttctacttatgatactagattcataatatataaaacttaaaggttttgatagaaatgtgttttgataggtataatctggagagaccggttattgtagatgtggatcagctcaagagagaaaaattctctatgaggattcatctgcgagtttgtcttgaaggaggataccatgttttggatgagtcaactcattacagcagcgatctccgcccatccgctagaccactctggagacaaccgatcggagttcttgagctcgggatcttaaacgctgttggacttcacccaatgaaaactagagaaggcagaggaacctctgacactttttgcgttgggaaatatggacaaaagtgggttagaacaaggacaatggtggataacttgtgtcccaagtataacgagcagtatacatgggaagtctttgacccagcgacggttttaaccgttggtgtgtttgataacggacagctaggtgaaaaaggaaatagagatgtgaagattgggaagattcgtataaggttatctactttagagactggacggatctacacacattcttacccgctacttgttcttcaccctactggggtgaagaaaatgggcgagctacatatggccgtgaggttcacatgcatctcgttcgcaaacatgctttaccaatactcaaaaccacttttgcctaaaatgcattatgttagaccgttttcagtaatgcagcaggacatgcttcgacatcaagcggtgaatatagtggctgcgcggttaggtagagcagacctcccctgaggaaagagatcattgagtttatgtcggacacggattcgcatttgtggagtatgcgtaagagcaaagctgatttcttccggatgatgacagttttctccggtgtt

SEQ ID NO: 11800 - DNA, 580 bp, Arabidopsis thaliana
gatatatcaaccaagacaattcacattctcaggctctatcctacagagtaagttcccctaacgcaatacaactttctgtttggtaaagtcatcttgtgatcttcaaactgacattctccagagatctcaatacgtatcttaatctcatctttttcttcttcttcttcttcttcttgttcgttttcggtcttaactactatagagtgtccagtagaatgtgacctccaaaaccgcaaattcgatgctttcattcgtctttcatagctttcgatttcatctgtatgctctaaactaccaatagtagtactaggatgctcctcgtgaacgatgattgtcactgtgtcacggggcaaaggctcgtcgtggatttcagatctaactagatcgatttcaggaacttctagcggcttttctagcgatgtccggtcttctacatcaagctcacgcctgcatacagggcaagtcttgtgtccttcaaaccaaagatcaatgcaaatcgtgtggaaggagtgattacaagtagaaatgagcctaatagtgtcatcatccataaactctgttaaacaaatggaacattgat

SEQ ID NO: 11801 - DNA, 740 bp, Arabidopsis thaliana
gccaatcattaaatcgtttctggtaaatgtaacggaccatactctgaagattggtttgcgatgggctggcaaagggacaacaggcattccgattagaggggtatatggtcctatgatttcagctatatctgtggaacccagtaagtttttgtttttactcaaaagtgtttgctcttttatataaatcatttgtaacctctttgtcagattgatgaccgtattttcttgtggcagatttcaaacctccggtatattatgacacaaaggatatcatactaaaagtgggggtacctgtcgctgcagcaacacttcttttgtttatcatagtgggtgtattctggaaaaaaaggcgtgacaaaaatgatattgacaaaggtataaggtttagttttcttatgatgttgtaatgtttttgaatcttatgtaacttcttatgtattctggtgcctaaatgtcaaattttttatgaatgaacagagctaaggggtctagatcttcaaactggaacttttactctacggcagataaaagcagccactgataatttcgatgtaacaagaaagattggtgaaggtggatttggctctgtttacaaggtaattcacttgaattctgcgacattgttagctctatacgaaattgtttacagaagatgtgtacacattttggaagaatattgagaaagtggtccttctcttggtgcagggtgaattatctgaggggaaattaattgcagttaa

SEQ ID NO: 11802 - DNA, 546 bp, Arabidopsis thaliana columbia
ccgtttaacttcattccaacttttttcataaaaacgcagcaatggattgatcttgcgcgctctacgggtctgcaaactcagaaaagtgtcacaacttccaaccaaatccccgaggttgcgagccaatccacagtggaatacagtacaactgaagaggcaagtatggatgatcttaagaatcaatgagatttatgcggctatgtgactaggtaccaattgtatatgtttataaaagcttttgatcgtattggagggaaagatatattcatttgagttgtatttttgtatcttagcttacgggaaacaatgattcgtgaataaaatttcttcaattagtcatgttggtttgccatatttgcacatggtggtggatgcacgagttttttttttctgttattgcccttcccaaatatgacatcatttatcatgtactgtacagtcatgaattgcttatagttgtagcttatcaattcgaaaattgttgagaataatgggaaatggtttcagatggcatacataagggtttttttgtttttgtttaacaag

SEQ ID NO: 11803 - DNA, 547 bp, Arabidopsis thaliana columbia
ctatgtgatatttaaatatttttgttttcttggtcaaaatttcttagggcagaggcttcagtgtgaaaattcactatgtcgaggagcctgtatcagattatatccgatcagttgtttcaacgatactgttgattaatgaacgggtactttaagttgatgttcttataaccattcaatgtgttcaaacttagtatattattttccaggtatgttcttgtatttaaattgtctcttcttatgttcaggagccacctggggatgttcttgtatttcttactggtcaagaggatattgaaactgctattaaacttcttgaagaagaagctcatagcaatcaaaagaattcttcaggtataatatatacacataaataagatcatgtcgatcaactttagcatttgccttcagtttttaagcaccataatgcaattcatatctttttcaggactgctacctcttccattatattcaggactttctcgatcagaacaggttaattttgttgcaaggctctagacaatctaaaccatacttttgagagtatttg

SEQ ID NO: 11804 - DNA, 526 bp, Arabidopsis thaliana columbia
acatcacggagacaggagcttgctagctttcttacctggatttaatagaagaagatcgtcaaagtctgatgcagaccaaatcatcaacacaggtaaatttgtaatttacctttccgtctgaatgagttacaaaattcagtaagatgttgtaggaatcagagccttcgttcaccataatggactcaaccgttgtgagaaggtgaaccaaacacttcaatcccgaaatcaagcactcaggcgtggctgatttcagacgcagaacattgaggacgagacgcaaagccaacccatccctcttcagtactcctgctgagactttagggaacacaagggaaaggatgacaatatgtggctggacgacatctacaggtggttcagcatgtgctgaaaagaggctgtctagcgacctgcatgtgcaggcaaagtaagcaacaggtgtccgacgatgattatcttcagccagagtttttgataactcctcgatgacagcgcatagatgttcatggtctggtcttttggactgcga

SEQ ID NO: 11805 - DNA, 557 bp, Arabidopsis thaliana
tagtaacgtgcgccagtgtgctctaaaggcaaccactttcaacggcaggttatttttcgctaccatattgtcgataaaatagctgataagcagcggcccactgacttctgccgccgccgcaacccacatcatcaggaccgcaatccccagcggtttacgccacggcgaaccgtacgctaacaggcgcttgaaagtcggccacagttggctaaaactacgcatcgacggcctcctcgcgattttccggagcgtcgtcgagcgccgcctccagttgttgatagcgatacatatcgcgataccagccgctttgttgtgccagcacatcatgattgccacgctgggcgatatgtccgtgctgcatcacaataatttcactggcttccgtcagtgcagaaaggcgatgggcactgatgattaccgttcttccctgcccccactgacgcaggttatgcaggatctggtgctcagtgcgtccgtccaccgccgaaagcgcatcatcaaggatgaggatttccgcgttgactaataacgcacgagcaatggagatcgctgttttt

SEQ ID NO: 11806 - DNA, 511 bp, Arabidopsis thaliana
cgcatatcctcattccttccgcgtgtacctcatgcaaaagattggtcagctcctcgacttgcaccatcagaggccgtgagtcctaaattttgtagtctagaaacttcgccattgcatatttctgtgatccagcatcttccgttccatatttcttatccagagagttgcaaaactccttagaccatccgcattgcacaataaaatgtgtgtcttctaattaaaatataattcttaatattaattaaaaaaaatattgatgaaactgggaaggctcgtgtctctggcgagacacaaaagacatgctgaagaaaatctaagacatcctacgtgtcaggagcagattggttagagttactgtttatttttggcaaaaagttgatctgagagaattatgatcttgatcatgcttttatatgtttttatcatgggtaatatgactatctatacccagaagaattgataattaactgacagaccaaagcattagtacgttaaatgatacattagtacg

SEQ ID NO: 11807 - DNA, 446 bp, Arabidopsis thaliana
atcatgagcagttggcttaaattggcctacaataagaaacagtataatgtaatttcaagactgtatgacctaatcagtatctaaagccactcgatcaaaacactgatttgtcggatatctgtgtgaagaccatacaaggattcatgtgggatgaggaaacggtgaatagggagctaaagacctacatgactcgcgggttcaaagacttgtcagaaatgtgtcagacgcactcatgtgatctccgtatgggagctttcaccctcggtattaatcgtgtcgctcaagctaccactatcagaggctggggttcttgatacccccccatgggaagctaaagaacaagaattcagaaaatctttctatgttgttgatttgctttgtgatttgagtcaattctagagtaataaaaactatgtgctaattgcagtttaaccttctcaaatttt

SEQ ID NO: 11808 - DNA, 514 bp, Arabidopsis thaliana columbia
aggatctacgtgtgtcccaggaaccccctcagctcagttatgttctttggttgaggccagttcaccatagcttcaattttagctggatccgcagacacacctttccctgttaccatgtgacccaagtaagagattctggtgcttccaaagtgacatttcttttcattggcatataacttattctgaagtagaatttggagaaccgcttctagatgtttaaggtgggtctcttcgtctgagctataaaccagaatgtcgtcaaagaacactagaacaaattgacgcaggtaggttcgaaacaactcattcattactgactgaaaggtggccggtgcattggtcaaatcaaacggcatgaccaagaactcgtaatgaccctcatgagtacagaaagctgtcttctccacatctgcagccttcattcgtatctgatggtacccgatttaaggtccaatttggagaacacagtggctctgtgtagctcaccagcagttcgcgatcactgggattggat

SEQ ID NO: 11809 - DNA, 620 bp, Arabidopsis thaliana
  unsure (1)..(620): unsure at all n locations
gtaacgtccgccagtgtgctctaaagtatacctaaagatggacaagcatatgaatgtataacatctgctgcagaaattacaaatcttgtgtgagttaattctggaataattactctattatcaacctctaacattctaaattgaccttcttctaaatcactttctggtactatatatgaatcaaattctataaactcattatcttcatttgtaaaatcaggatattggtaacttcaatatcattggtgaccttctgcataaacaactaaagaaggatccattacttcatccattaaatataataatttgaaagaagggaatgctattagtattaaaataaatgctggtgttattgttcaaattaactctattaatgtaccgtgattcatatatttatgagctattggtgattttttagctacaaaatttcttataattgttatcatcattcaagtaactgtaaataaaattattgctaaataaaacattatattattatgtaattcctctattccttccatttgtggtgaggcactatcttggaaaaatataccgcatggtgttggtgcatcattagaatgtgtcttttaatatttctnaaacatttatattatatatta

SEQ ID NO: 11810 - DNA, 476 bp, Arabidopsis thaliana columbia
  unsure (1)..(476): unsure at all n locations
gcagtatgacattgaaggtagcagatacatgaatagcattgacttggaaagagaagacgaatgcgggatttgcttagagccttgcaccaaaatggtgttgccaaactgttgtcatgccatgtgcatcaaatgttaccgtaactggaacacaaagtcggagtcatgcccgttttgtcgtggcagcatcaagagagtgaactcagaggatctgtgggtgctaacttgcgatgaagatgtggtggatccagagacggtcaccaaagaggatcttcttcggttctacctccacatcaatagccttcctaaggattatccagaagcggccttcttagtctacaacgagtacttgatatgattttatccgaaacataaatacgggtgtacagagggagagagtgatccagacctttgattaagtgtacataagaatctggtgaccattaatgttcttcgtnttagattatgatgtatgaaga

SEQ ID NO: 11811 - DNA, 597 bp, Arabidopsis thaliana
tgttgatactgatgaaaacatggtgaatgagtctcgggacgaaattgttcattcagaggaagttgtaaagcttgatcaagagactggaattgaacagagaagaggaagggaagagtttcctgaaatcgagccacaggagattctgaatctggactatcgtattgttcatgatgaagaagttacagacaaaggaaaagccgataaggcgatctccaactctaaaccttgttcgcaagagtcaaatgcaaatcaagacactggtcttggagtttataaagaagagaaggagaaaagagaagcgagtctaagacgcatgtatcgatgtagatcactcccagtgagccagaatagtagagttattggagattcgcttgttcaacatttggtttcagaggttgcgtttccttcaagaaacaagatgggtttagagaaagctaacacgtctgcagctctgcttgtaccttgcgtaggaagcaacaaaacgcaagagactattgaagcgataattgaaagcagtaaagaagctagatttgagatgcagctcctagctttgatcatggcctaagaatcgaagaaagacgcgatgaatcggtagag

SEQ ID NO: 11812 - DNA, 498 bp, Arabidopsis thaliana columbia
ggtagaaaagaatagacaacatatgccctttcgaaggcccagtttcttctgtcagcccaaatacaaaaaccaggtagtaatcgaaatcaaagcagtagtaaaagtgaccttaccaactgtttttcaatgaaagcggtcaagagaggaccacaaaatggttttccagagtcagaatcacaaatattgaattatatactaatttttattttatttttttatttggtaaaatatgaaatatttatacaattttcgaaatttcgattgaagttacaaagagtactagtagcaaaaaaataacaaaatgtacagaaaaacagacaatgacaaaacagcaaaggagaaaaacatatgtatataacggaaataaaagaagaaacaccgattccgagatgccaaatttagaaatttacgtaatttccacaactctaaggagctgaaatctcatcctagttgccacgaacaaacccaactagaggcccgccacaaaacctcagtatc

SEQ ID NO: 11813 - DNA, 503 bp, Arabidopsis thaliana
tagtaacggccgccagtccgccagtgtgctctaaagactcctgaacgagcatctatcaaaaacatgacaagatagttttcagagcgaatgtattcgaggcttaggcggcagagcagcccatttggccgcaagactgctagccaactgcttcacagacgcgctttgcatgatgtcgaaaatggacacctctattgccagctggacgacaagccagttacgcaactccactgccaccagcgaatcaactccatatctagcgagagattcgcccacttgaatggtttcgtcgtcgacgaagaacatcgcggctagcttacgcacaatggcagtctgaagcacaaccaatcgatcgtctgggagtggcacattcgccagctgttcgcggaggtccatcgcatcatgaacccggtttgatcgtgttttcgacttgatgcccgttgcgcgtaggacgcgcccagtatcgggtccttggccagaatacattcgtgttaccggcccgggat

SEQ ID NO: 11814 - DNA, 830 bp, Arabidopsis thaliana
ggggttgaaactttcaacaagctatggttgtatcgtttctctataccaagactgtgttaatacaatatgcatatgtagttcagtgatttagagagatctatatcagttatctacatattctgcaaccaattgacaagaccagaggttttcaagttacagaatacacaaacaaatcaacctgtcaacatgattactcataccaaagagaatataaactagagaatacagacttggagcctgcagtatcagtgatcatagagaacttacaacggaattcacattaatgattcggctaggagagcctcggatcagagacggcaaaagaagtactgaaagcagcgctggagctaaatgattcacttgcatgtgctgctcatatccttcctctgagaatttttgcgcctctgcacaaatcagagaacagagcattttaaggttacttttcctcaacacatactgcagaaaatgtagcatctgacaaccaatcatttaaaaaggagacccattggacagagttgctatgaaagaacatgccagttctcaccaattgggtccatcaagttggaatgttgatgatgatgatgattggttcacaagtatgactttgagatcataacaaagagatgatgaaaatagatacaggaaacaacagaaggggaaactcaatgcttatagctaaaacggcaataaaaccaacctcccatagcaaacatcccagcattgttaatcagaacatgcaaaggtcctaaccgagcgttgaaagcctcagcaaatctcgcgacagaatcctagtgagagtagatcaatctccattgcctttacaaaataaa

SEQ ID NO: 11815 - DNA, 425 bp, Arabidopsis thaliana columbia
agtgaaattactattcaacttagctccttgctgaagccacaccttaattaaatactcatagtagctatcaccacgagatcccaacctgatattctcaccaacaaagtcacctgtttgagggctgcaccaggtagaaacaacaagtcagatcaaaagagcccgggaaagcaagggaaagcaaattactagcatggtatttatagttgaaagagcaaacacgaattacctgatatagattggaacaagaccttctgtctttggaagggttttaaaatggcctagaacctctaagggctccggaccaaaacttgggtccccggaataggaccgaggtagttaaattcaagcctgtcagaggcaacttctgctgtacatgctcgctcctcctggagctggatgagcagtcgattcatgcgatatgacat

SEQ ID NO: 11816 - DNA, 540 bp, Arabidopsis thaliana
agtaacgtccgccagtgtgctctaaagctcttgcttcctgcctcgtcattcacggttcgacagcgacggtctcaccgatggtttcactctcttttctcgcgggaacactctcccttgtcattgcttgtttcgtcaatgtcgtggctgccgattttggttatgtcactgtcgaacggctccagagagccccagatggctggattagaggtcctgtggcgccgcctttcaagatgataaagtttcatatagctctccgtcaggaaaaagctgccgagttggaacaagtcactctggatatgtcgactcctggccatcataattatcggcgccatttgaaacgtgacgatgttagggcttttgtacgcccttctggtgaaaccatgaaccgagttctggcctggctcgaatcagctgaaataccggcagaatctgtcaggacccatggaaactggatggaggttatactacgtgtgtctcgagcggagtcgttgatgaagacaaaattccatatctatactcatcgagatactcacagacgcg

SEQ ID NO: 11817 - DNA, 1016 bp, Arabidopsis thaliana
gctatacaaacacaaactcccatgacttcgtaagcggatctttttcgatactccataaacttccacgtgaacaaacccgccatagcacctatccatagagccatcacccacactctcttccaattatcaaacaaaaaatacttcatccctctgcaaaaacgcgccccgagattcctactctgcggaaccatgagattctgacttagcatcttgcttagcttcttaccctctccatctctcacatcctgcatcggcgcttgcaatagaagtatctcgagattctctatctgtttggcattgtagcaagtgcctccaaacacatcaaaaaacactcacaaaccaaacttttctaactaaaaaaatgattaaatcaaaacaaacctcattcacaaaacttcacataccatgatgtacccataatgataaggatctagttcttccataattaaagcagcatattcatcagcttgtctccgaatgttatccagctcgtttgcagaagcacttaaagttataatctatacacatatagaaaatatacttatgatgaagaacacaaagagctgcaagattgttaatactaatcactacaaaaatcaagattctacctctcttacttcggcttcattcaaccgcccatccgaatccttatcgaccctaaatttcataccacacttcaatataaaactcaaagttcatgtcaaatatatagagaaatcgaaagaaacatttacatggcgaagaaagttcgtagccttgaatcaaaatcttgatcagtgatctgcttccagaactctttaagctcattaatgtttattgaatctccgcttacgttttccctcctcgctaaagcatcgaacaatgccaacgcaaactctgtcgatttcatccctgcagcaaaatttatgtaatcaatcattgaaatttcaaaacagaaaatattgaaccctctcactagtcgcttcttctaacctatacattcaccgaatctagatcggtgtaataatccgttagta

SEQ ID NO: 11818 - DNA, 1904 bp, Arabidopsis thaliana
tagaaagagagaggctcaggagtcgggtcgcagctttttctattaataatcgtgtttgttttcagagtgctgatttgtaagatgcttattggttgacttaattaatcacattctatacgtttttattattttagtaatttttttctgcttcgctttaatcggaaacctacacgctcgagtatgtgattaggataaactcgctcctcttgtaagacacgtgtcactttagaaggacataatcggtaatttgatttcaccgttaacttgaggaaactaaaaatcgagtaggtatgggactcgctagtcgttacgtacgaatcgtggtggagtaaaccacgttagcgttttccgttttttgtataacgtatgcgttttgagcagtaatatgggttaatgttcatattcatagacccaaaaaagcccatgataatgtcaaatgcaggcctagtctatcctttttattttgtttttctgatgaaccttgagaacaaatataaaagtattgacacatgtatgatctttaggttcccaacacttgattgatactataattcaactgtttaaaaataagttataagtatgagactaacttattagatctctataatacatttgacttagcttttatgcttgcttaggcgaccaaaaataaataacaatcaccaactgtaagaagaataatttcggaggaaaactatatgccaagtcagcctattttacccatatgaagactgtcggtggtcgccggtgccgacagttgactttgcggtcccgccggagatccaaatcccaacatgtccgctggttgttgttgcacggtctgcatctaatttaaaacatgacacgtcagatattaaataaatatatttgtctttcttcaaaacgatgccgtctgcaactgacctgatttcccgccggcggcatctggggaatcccgcccatgtacctagcgagctgctccgataagatttggttctgtgcttggagctgcaactgtaccgggttttgacatactaaaccgggatggttctgcggagcggaccggttcataaccgggaattgagacaattgcatctgactttgcatagccatctgattaatgtatggagatgattgtaccccgggaaacatcatcggacttgctgctgctgctgccgccgccgccattccacttcccatccacatcacttggagttgcatttgaagtgattttaagtaatcaattgcttcatccaatatcgaagctttatctgtctacacaaaaaaagaagaagacaaaaccatatttaaacacaccaatcaattacagcttaattaactcagtttttttgtgatgaaaaaacttactctgctgcagtgaggtatgagttcttgaagagctttcattctttcattgatccgatctctcctcctctgtaattaatagacaaagatcacatcagaattattattactgaatggttgatcaactagtcagaaatagtatatgtataccctttctgagagattatgaacttcagctgcacggcttcttcgagtagatcctgaccgttggctcgatttattacccatggtttgatcatcggttgaggtcaaacctatatctgattgagacacagattcttgatcagcatccataacatgttttcttgtacggtcaatggttacacttgttccactaacggtttctttgttgttccttccatagctgcaaccggagagccacctgacgaagtgtcaagtctttcttcgacgttcttgcttctatcactcatagaaaccggaagtgtagtggcctgatgaatatttgttgactggttgctgccgcaatgactcggtccgactgttataacgaggatctaaacttaggaggagcatggcttgagctcatgcttaactgtctc

SEQ ID NO: 11819 - DNA, 650 bp, Arabidopsis thaliana
  unsure (1)..(650): unsure at all n locations
cttgtagtagcttgattcaatgtgattcaatgttaagctttatacatctctgtctcgaatcgttagaccaagttcatgtgttagatattgttggagtttttattcaaaagtgattgaatgtttaagtttgttatacacagaggaaagagctatgcaagcttagagtgaggttggagcaacagaagaagagtttacttgaaagtaatgcggagaggaacaagtttctgtcaagtcttccagtgcatctcaaatctctaaagaaagcatctttgccagtacagagccagttgagtttgcagaatcagaagaagctgaagtatcataatctagctgagcttcttcctccgccgctttatgttatatattcgcagttcatggcactgaaggaagctttcgaagagaatatcgatgttgaggtatctgggagtcttaaggatgctcaaacttatgcgcggcacgaagcagaacagaactcaggttagcaattctcacacctttagttaaaataagaattgaaaatggaatagttatgtgctcgttaaaatgccatgtatgttcaataatacagagagtctaagattagaggttggtgttgatgaaganaggcanaggaaacgantccangaaagtgggttctgatgagggaggag

SEQ ID NO: 11820 - DNA, 545 bp, Arabidopsis thaliana
gcattcctttcggatatgaaaattatttgcttaccattttcatatgcttcaaaaccttttaaccaattgcgggtgcatattagtgcttgaacatgtttcggtagaagacgacttctatacttgttcaaaactctagctccaatactaaaagaggattcagaggctactgttgtgattggaatactaaggatgtcacaagccatggacgccaatgcaccatagcgttgagtgttatctttccaatagttcaaaatatcccaactctcaaaattgtttgtgtccaatggtggttcatctagatacatatccaaagaagactttccactactaacaacagtttctttgcggaaggcaaaaaaatcctacgagattatacatcaatttcagccaaaaaaacactaaagaaacaattactaaaaccacactaaaaattggaataaatgtttgattacgtactttataattgcaaaacacttcttttgttctgcattcttctcactttgctgattggttcacgtgtctctgtagacgatgacgtgaaaatg

SEQ ID NO: 11821 - DNA, 586 bp, Arabidopsis thaliana columbia
tctgattgtgacgcgtgaataagcttgccacggtcggcctaaataggtcttgtaagctcggatcacaggcttcaaatcagaagctgcaattatccttgagctatggattgttattcctgtgttctgaaaagggtcaccacgaccttgagctgttatgatgttggcttggcatgaagagggcgccggacgagaatcatgcagttctggaagacaacagctgcatttccgaagatgaagtcgatggtgcctgagatataacattccctaaagaactggcgttgtgaatggatgtagagggtgtcttggaatccatggataccgacacggtagaaaacagagaggtcagaggatgatcgaaccgcaacagcttgcccacgtaatggcccggccgtgttgatgaatgtcatgtcttttgctacaaacctttggcctccaaagccttcaaaagagttgggaaaaaagacttattagtacatcagaagtcttaaagttggatttagcaagatttaagatagagttttaacgctggttgcagagttataggtggtgtagcatgctggacgcttcggcacttgtgatgatcgtt

SEQ ID NO: 11822 - DNA, 492 bp, Arabidopsis thaliana columbia
aatagtacaagtccaaaagcccagtaaaccgagagaaaagacttactcagacttgaaagatgcaagacgccgagtaagatcatcttcacgactttcaacttctttcaactttctctctgcaattcggtgataccggttagcttctgcttgtaaagcctctgctgcgcgcatttttgcttcagcatctgcaagtttcttcagcgcatcctcgatcataacatgtgcttccgacatagtactcccagcagaaacttttgtttcggcacattctgcgcgcatctcatgcagagtcttctccaactgagagaaaaagaacaaaacaaaatcaataaacagactggaaacaacatgcttttgctagctctcaaagttaagaacttacactagaaatgcactccttcgcaatccctacatccttcttcaaactctcttctcgtttctttgcttcagctagagccgagacatatgctgatttctctcgcatatgtgtta

SEQ ID NO: 11823 - DNA, 485 bp, Arabidopsis thaliana
tagttagttttaagattgatttggatttccaaatgttgctctaatgttagagttctactctacatcatatttagaggcagcaatgtcggcaacttcaaagctaatgataataaaaaatgaaaatcagaatcttgaggtattttggttcaggacattttgaccacttgattggttttgattctgtgaaggccaaagaatttagtaatgagggtgttctcatatgtcttcacatgatgatggtaatctggaagcatcctcagaagaacctacacagtaaatctggaagctcaatgggcagacggacaaagagtctacgcaaagacatggagaaaactaagaagataatgtgaaaacagagatggtggatatgtaagtagtcagaaaccttgacttcagatttcctgagtgttttgatcatgaaccgatcatcctgcgacaggaagaagacgctgccgctcttccctggagaagaaagttctcttaaa

SEQ ID NO: 11824 - DNA, 492 bp, Arabidopsis thaliana
caacaaattagatccaaaaaaggcttacaaaagtcggaggaatgttaaaaagctgacggatgttcaagaatcaactaaatgtgttcactgacaacaccattacattaaatatacctcatctagatcctcgaaggtgtcctctccaattgtcagggtcttcccaatacactgtaggcttgtaatgtccttgttttctttcccaccttcagctatctccttgtgagcgtaaactccatcataaatcttgagggtcaaagttaaaaagttgagtcctcgagaacttggacgaacaatgctttctccaaagtctttgtcagacaaatactgtacacagcaccaacaaggaaactcagagacagagacttctttgaatatataacaaatgcattcaaaactcaatataagtaccaaagaagagtaaatgtttggcatacctctgttgcttggtcagctgtgatattctgaaagcggggatggacaatcatccgagac

SEQ ID NO: 11825 - DNA, 539 bp, Arabidopsis thaliana columbia
gctctaaagtcgtcatccggtgtgatggtgatatccaccagcgggaaaggactgttatagacgcgtcgcgccactccggcgagtaaaacatatcaaaccagcacattgatagcggataaggtgtggcctcgccctgataaaacagtatcggcaccaccagcggcactctatcgtggtcagcctccagatgccggtgcatggcggctatagaataacgcatcatgcgaaaggccattttcttatccggcttgctttggtgttcaatcacaacatgcagataaccgggattgccctgcatttgcacggaatagagcacgtccgtgctgtgtcctttcaggctctcttcaatgaaactccccgactctaaatgaagcgtgttgaggtcacaaagttcgcgtaattccactggcaaatgtatctccagaaagtcgcgagccgtctccgcatgcattaaaaattgtttaaataccgcgtcatgcgctgtggtactcggtgcatccatcttccctgtcttccgtgtggctttgcgtgaaggcagt

SEQ ID NO: 11826 - DNA, 441 bp, Arabidopsis thaliana
agtaacgtccgccagtgtgctttaaagtaattacttatctttatttatacaaagatgaatctcttgtaagtaaacattacataaactatatggcaataccagaaaatgatggagtttttacatggctcccagatttttttccgcacgtagcggtggatatatcaatatacacaaatgtagaagatgattatttttttcttatttttccctaacaaatgatgatgggggtaggtttaagaaaacattgacagtgagggccagggaacaagtggcgaaaatcgtatcaaagaatgatccagatacaaaaaaagtgtggtgtaaatatggtaagataccagggcaaggggatggtgtaaccttttttttgttggtgaaattaatgttacgcattattttataacaaatattggagctggattgcctgatgcttgtgcagagtaa

SEQ ID NO: 11827 - DNA, 371 bp, Arabidopsis thaliana
  unsure (1)..(371): unsure at all n locations
gaacccgtaagaataattcatcaagaaaggccatgactttaaaaactaaaaaaatggaatataataagcccactatgatcacagattatattaagtacgcccagcggtgtaaacattgccaacttcatgcacctctaatccaccagcctacaaagttattttcctccatctccgccccgtacccgtttataaggtggtcgctggatatcattggaccattgcactgatcaactcgaggtgtacagtatctctttgtcttaactggttacttttcgaggtgggttgtggccgaggcctttgtccgcatccagggctcgacgatctnagctttcctttggaccatatcctatgccggcatggtgttccctctg

SEQ ID NO: 11828 - DNA, 437 bp, Arabidopsis thaliana
gcttcaccgttcttcttcgtctccttcttcttcttcttcttcttcttctcttctctgtttcttctctcctctgctttaaactctgatggagttctcttactgagtttcaaatactctgttcttcttgatcctctctctgtattacaatcatggaactacgaccacgacaatccttgttcatggcgaggtgtgttgtgtaataacgattcaagagttgttactttatctctcccaaactctaacctcgttggttcgattccttccgatctgggtttcctccaaaacctccaaagtcttaatctttccaataattcactcaatgggtcattaccggttgagtatttcgccgccgataagctccggtttcgtgatttatcaaataacttgatctccggcgagatccctgtatcaatcggaggtttacacaacctccagac

SEQ ID NO: 11829 - DNA, 336 bp, Arabidopsis thaliana columbia
cgagctcgaattcgtaatcagtagaaaatattgcacaaagcaatagggcggtaatcagccactttacgtggtcccaaacctttgggaataaggcagatatgggtctcattcatacgtcgtgggaaagatctagtgctaaagaaaagctgaacctcgcggatcacctcgggtgcaataatctgccagtaagagtggtagaagcccgctgtaaacccatcgggtcctggggctttggttgcgttaatattaaacactgccaccttaatctcttcagcgtctggtattctagttagcctgacattgtcttcttgggaaaccataggttcaattgcctca

SEQ ID NO: 11830 - DNA, 615 bp, Arabidopsis thaliana
caaagtaacaagacagaagttgaaatacacccaagagtaattaatgcctaagctctcgtcatctctaggaattatatcatcgcgtcccagaagacacgtattaatttatgacttgttagtagaatcaaacttacatttcttgaaaaaaaaaagttgcggagacagggttttgaacccgtgacctcaaggttatgagccttgcgagctaccaaactgctctaccccgcgctgaaacaaaaaaacttggattaaactctaataaacaaagaataattgaaggagcccctcttccatatctgtacaaatagaatagcctatttagacagaatggtaaaggggcctcatcgatcatagaaaaaaatagaaaaattaagggatacttaaatccttaccagcttgatcttgttgcccctggcaacaaacatgcctgaaccatttcccgaaggatgtgtccagatagtccaaagtctcgatagttagctctcggtcttccggtcgaaaagcaacgtcgatgaagacgtgtaggtgcactattacgcggtggggattgtaattttcgatgaattttccatttctcacttagcgacggaatcttacttatttccttttttgagg

SEQ ID NO: 11831 - DNA, 509 bp, Arabidopsis thaliana columbia
agagatataataggagacttacagataagaagagattcattccactgagcagtgattgaggacaatttgcagtacaatcaatggatggttgtccttcatacacaatgacccggtctgccaaataggtcgccattataaagtcatgctcgactacaaatgcagttttctttgcgtggagaataaatcgctttatgactttagaagcaacaatacgttgctcagaatcgagatatgcacttggctcatcgatcaggtatatatccgcaggctgtaagaattcacattgtggatgcatgagatcactgagagaaagaaagcaactacgtcatatagacgtctgaaacaaaataattacctttccgaggcacagagttaatgcaaccctttgcaattctcctcctgagagattgacaacttcttgatccatcaactgctcaatctgaagtggtttcacacatccgacataaattgtggatgcatgtaagaatctcgaatcttttgatgtagca

SEQ ID NO: 11832 - DNA, 624 bp, Arabidopsis thaliana columbia
  unsure (1)..(624): unsure at all n locations
gttggctgaggtgaagaccttgtgggactcgttttgcttcaatacccagaaaataatgtagatcctcatgttctttgacagaaaaacgctgagacaatgcatcgagagtatgttttaacaagaccgtgtcattccctgtgatcaatatgtcgtcaacatagacaagcatatagataattgatcgacctcgttgcaacacaaaaagtgacgtatctgagatggaattcacaaaacccaccgttagtaaataagtccgaagttcaacataccatgctctaggagcttgtttcagcccgtaaatagctttcctgaggcggcagacataatcaggacgatctttatcaacaaaacccggtggttgcgacatgtatacttcgtcggtaagtgtacctgtagaaatgcattattgacatccaattgacggataggccaagatcgatcaacagccacacccaagacgatacgaatggaagttgatttgattacaggactanaggttccgcataatcaagacccggtctttgattgtacctttggcgacaagcttgccttataccgatttagtgagcatccgaattgaattcttagtgatatccacgcaccacgatcgtacagatggtgtgg

SEQ ID NO: 11833 - DNA, 433 bp, Arabidopsis thaliana columbia
ttagtagagatcaatatattgtacctgaaggaagcgagaaaaaaatgggaaagcagaaacaatgaataggaaagtattgaagacttgtgaatctttacaagtgttttttctttgtttgaaatctccccaaccatagtaacatatgtagaactcgatgcttcgaagagtttgcgcttggctacataactgatctgccaagaagaaatcgggtaatgtcacctgcatgaagaaagcaatagtaatatgtttgtaaaaatatttcatgttcatttacgattcaattgagttttgacgatttaccttgtaaagaggagcagcaagcatatgaaataaggtagtgaggaagaagaagcgactcgatcgatagaagatgttgaatggtacgactagaactacgaacatagcctaattatttacatcacaaagttatgat

SEQ ID NO: 11834 - DNA, 1856 bp, Arabidopsis thaliana
gcacgtcgcgttgctggaggttgattttggtacggcttattatggtttactaaatggagaccaacatattgtggtgaaacgtctcggtatgactaaatgtccggcgcttgttacccggttctccactgaactacttaacctaggccggcttcgacaccgtaacctagtaatgctccgtggttggtgcaccgaacacgagaaatgcttgtagtgtacgattattccgcgaatcgtaagctaagtcatcttcttttccataatcatatacctggaaactctgttttgcgatggaaaagtcggtacaacgtgatcaaatcgcttgcttgcgctgtacgttatctccacgaggaatgggacgaacaagtcattcaccgaaacattacttcttcaactatatttcttgatagagatatgaatccgcggctttgcggattcgcattggcagagtttttgtctagaaacgacaaggctcatcaagctgcaaaaaagaaaggatctgctcaagggatttttggttatatggcaccagaatacatggaatccggcgaggctacaaccatggcggatgtatacagctttggcgtggtagtgctcgagatggttacggggcagccagcagtggattacaagaggaaaaaagaagatgctcttatggtgttgcgaatccgcgaagtagttggtaaccgaaaaaaactcttggaggagattgcagatattcatttggatgatgaatacgagaatcgagaattggcaaggctattacggttagggttagtttgcacgagaaccgatccgaagttaaggcctagcattagccaagtggtgagtatattggatggaagcgagaggttcttcgaagaggaaggaggaaaggaaggtgacgttagccgcaagcaaatgtatgattcgtctatgttgatgattagacaaatgcaagcgcttgggatccattgagtaatgataaaggaaatattaggaatgttcatgtaatttatctttgttgattatgttataaagattttgggtctgttaattggttccaggtaaagcaaggataaacataaatattatttgcatttaaaaccactgagatctaaatcattacatacggtaagaaaccttagagatggttttgagtctgttaattggttccaggtagagtttggatacaccaatgaacaagagcaaacacaattgttcagagttcagactttgaaatataaaggtcaaagaaagcttgtgatgggacatacacttctttaatcaatatcaatggtctcttgtttcttagagaaacagctgttcatcgttctgagccgcttcctggtgtctaaaaactgaggtcactcatgttttgagacggggaacatcgtgacataaccgctaaagtctttaaagttccgctacatgggtcactgataaaagcagtatttgatacctcgatgaagcagctgttgcgtcctttacaagcctgcagaagagagcaaagaactgttcagatagtccacaaaatttatagtacgcaattgctacgaacctgttttagagctatatgtcaacaatttgccccaaaatatttctactagcttgcttaggaaattaagatcatcataagttctactttggattataattggagttatgtttccagcaccggtttttagattccttcgtatgattgaatcagttgccagtgttgcaggcaatataattttacctcagagacgattgataatgagttggatgcatgacatttcccgatagaaaacccgtcgcagctacctcttggagtcccatagctagcaaattctatggaggatatggcatgtccatcttcacaatgcagatgcacgtct

SEQ ID NO: 11835 - DNA, 812 bp, Arabidopsis thaliana columbia
cttcattcactttattcttagtttgtcagcataatctttcgtctctctttcatatcgaagctttgtccttagttcctcttttgtcttgtgggtttccctttacctgcttctgcgtattctcctgattcttctctccattttttcgaatcatatgccaagtcggccctcgagtctctcgctttctctactggatcatatcttccctgaaaatcaacaaccattgatatctcttcacacatattgacctaataccagcttattgaattaacaagtgtcacaaaccgttaaagagtcttgtaaaaatcttatatcaaaaacaaatatcatactcattgatcatttttcaaagttcagattccacttgatttcttgtcaaacacgttagcttaataccatattgctaaattcaccatccaaattatcacacggaaaaaaactccacatattataaatagatacaaactttttatttttaaaaataaagatcccacttcacatatacacaaaacaatttccttctttttttatataattaaataaaatagttttgaatatcaagatcatttgtgaatcaactagttaatttacacacaagcataaaaaccggttatgcatcaatctgtattgatgaccatatattaattaccttagaatggttaaccgacgatgcaaaaaagacacgagagcttttccgaccaatcgctaccgcaagagttctaggagcttggcttttagggaaagccttcgagatcccgaagaaaaccgttctcgttaactgcatagccgccatattaatcaatcacaaaaacaat

SEQ ID NO: 11836 - DNA, 841 bp, Arabidopsis thaliana
cactttatggattgtcctagtcgaaactcacagctcacacaacagtatcgtaaaggatgaatcctttaacttatcgcaaatttacatatcttcgataaagaaacctaagtgtagagtgtaaagatacatatctgaactgaaccacactctagaacagacatggctgagtttatagacatggaaacgatgatgtatggatccattcacaaaatgtagttgactagagtctccatccaagtggggggagatgactacttatccgaggatgaagatgatgagagacgagcttttcgagctttatcagctttttccaagtaatcttggtgagaacgatgctttgatcctgaaacaaaccagatttaccaaacaacaaaagccaataagagaaacaattagcctatataatgaacaaaacaaggagaatattaccaaatgtcacatatagcaaataagatatttaaccattgagattatgcaattgaatcgatgtgtgatcatcaggggaaaaagcaaacaaacttggtaaaaaatgtgatcatgcaagtctattatgatccaaacagaataaacattgtgactcatcattatcatataatcaaactctatttgatcgaccacttgattgcatttgccaagaaatataaagttagaaactttagattctaaatctttcagctattgatatcatcatcctcttccatttcggaatctacagagaaacatctatttatatatttcaatctaaatcgcccagagaaacgaacttgattcattagataccaagggatccgagatgagggaaatcgatcagcaaacgtgctctctcccactgtagacatag

SEQ ID NO: 11837 - DNA, 1130 bp, Arabidopsis thaliana
tcaagacttgtgttggaagattgataaattcagagacttgttcccaactatcttcaagcaaaagctcaggttcgtagttccatctgaacctctgataaatctttgacgtgtcgaacaagtaatcatcatcctcttctacttcttcttttgtctttctcaaaccagcaaactcgcagataaaagttccggctcggattggatcccaagaacgtaaaccccaaccacagtttcttgtcttgaacacttccaaatggagtttcaaaccggtttgaaccaaccgggttgggcaatggtcggggcaaggacaagatccaccgcactcgtaaatcaatggtttacgacaaaccaaaatgttgttatggtacggtagcaggtcaccgtttctctgcacgcaggtgcagttttgatgcatgcatggctgatgtcgacaattctggcatccaagtgattgacgatcaaaatgaaattcatgcgtcatcataccagagtgacactgagaggggatgtaatcaaaatcttcgggaatcgttttgtcatcttcatcaacttcattaacgagcggaactcgtaaaagctcagctccaaaagaaagatcttcaagtataaaaccttgccttgaatcaatcaagtcatggttcctcagattttcaactgttttccagattgcataagcaggaggttggtttggtttcctcaccaatttgaatctgaactccttgaagccggattttcctgtcactgtccagaactttgaaaccagatacatcccatcgtagatatatatcttctgattgttctcatgaggatgtatcactcctctcacgactctaacgtcattccctttgcttacacttgcttctagtgcaagattcccgcccttcatctcttgatcacgagcgttaccgtacacgtccgttccgccctgtccgctgtagatcaacgtgtcaagcccctcggtttcaccatcgtattgtcctgctgttaccacacacatagcagcatggccttccactgcactctctgcagccgtaaaaaaatcaataccaccataatttgatttgtgaagcccactaagcacatttcacccagtaatagaatatatctcgacgtgtattcaggaactgcaccaa

SEQ ID NO: 11838 - DNA, 629 bp, Arabidopsis thaliana
aggatcacaggatcccatatctatgatggactttatctggtctctgattgctggcaagtgacaggaaaatccggtttcaaggagtataggttcaaactgctgaggaaaccaggccaacctcctggttatgcaatctggaaattagttgaaaatttgaggaatcatgaattgattgatccaagacaaggttttatacttggagatctttcttttggagaagagggtttacgagttccgctcgttaatgaagtcgatgaagaagacaaaacgattcctgacgattttgactacattagatctcagtgttactcaggtatgacgaatgatgttaatgttgatagtcaatcacttgttcagtcatacattcatcaaaactgcacatgcattctaaaaaactgtggtcagttaccataccatgacaacattttggtttgtcgtaaaccattgatttacgagtgtggtggatcttgtccaacccgaatggttgaaaccggtttgaagctccacttggaagtgtttaagacatcaaactgtggttggggtttacgttcttgggatcaatccgagctggaacttttatctgcgagtttactggtgtgacaagacgaaagaagaagtagaagaagatg

SEQ ID NO: 11839 - DNA, 545 bp, Arabidopsis thaliana
tagtaacgtccgccagtgtgctctaaagaagacttattgctgaatggttaaaggtaaatagtgattattatcttgataccataacatatgaagatttaggattaagtgcattcaaaggaaagcatgcacaatcaggagctttttcggaatttttagatgctatagagcatggttatatattgccaggaactacattgttagttgaaagtctggacagactttcaagagaaaaagtcggtgaagcgattgaacgtctgaaattgattttgaatcacggtattgatgttataactctttgcgacaatacagtctataatattgactctttgaatgagccatattcattaataaaagccatacttatagcacaaagggcaaatgaagaaagcgagataaagtcaagtcgggttaaattatcatggaagaaaaaacggcaggatgcactggaatcaggtacgattatgacggcgtcttgtccgagatggctctccttagatgacaaaagaacggcttttgttccagacccgacaggtgaaaactattga

SEQ ID NO: 11840 - DNA, 1256 bp, Arabidopsis thaliana
tcgcagtacctgcatcaagcgccgcagagaggatgtaattgtgcctcgcccaccaagttttgaacctcctgaagatgtagtagttgaacacaaccccaacgatggcccaggaccagtaatgcacagccttagcttgtggcatggcgcttactgcagagaagatcaagggaacatggatctgttttagccatttcttctctgggaacttcttcgataggtaccagaagggaactggagcgaggagaccgataaggaagaaccagttcatcccgggatagataccttctttggtaaacattctccctggaccaatcactccccatatgattgatgcattgtagaacacttcatctccaggacaagtccatggactacccaccgggagcaaatcgacattacatatgttctcgacggatgtaatgagccaccaggttgttccgaagcagacagttgatgcaaccacagttgcaacaagctggacgatgaacattgatcttggaggaatcttcatgtagtgaccaagcttgaagtctcctacaaagtacaaggcttgagacatactgatgtatccgtatgtcttgaaagcgacattggctagtggctttcctgggtataagtacccgatgatcagttctgttataacgttaagacccatttgctggttagtagttgcttggataactccgataggtaatgtgaagaacaaagcgatggcgcaagcgagtataagtccccaccatgggagctgaagctgtttgtcaaagccctcgcaagcatagagtgcgaaagcaaaggaaataactagaactgcgatgaaccaccattgaggtactgattgataattcttcttcatcaatctcgaatgcacgtcaccgtacttgtcctttgttgctgtctttgccttcttccacattccccatataaaccttaagatacaaacacaaaagaagcttagagagagtcatcatagaaaataagctattcaaaagatgttggaaggtccttactttccatcatagagggcaacatgagagatggtagcgcaaagagaaccaaagctgagtccatagagcaacgcgaacatcacactcaaatagagcttgctgtaaccgttgtaagcgtctagattgatatcgaaattcttctcattgaggatacgggtaatgttataggtgtgccagtctgatcaaaggtgtgtgaagtatagaacggaaacttctgagcatcataagcattagtccagtagaagataggta

SEQ ID NO: 11841 - DNA, 336 bp, Arabidopsis thaliana
tagtaacgtccgccagtgtgctctaaagctttctgaacaacaggagtaatggcatgggaaccaccaccactgggggttaagctggacgacgcgacgcgtgagctattaagtctgccgcgacacgtatcgatcgcacaccacactggttaattaagcaggcgattttttcttatctcggacaactggagaacagcgatactctgccggagctacctgcgctgctttctggcgcggccaatgagagcgatgaagcaccgactccggcagatgaaccacgccagccattcctcggctttgacgtgcaaatattgccccagtcgggttcccgtgccgcga

SEQ ID NO: 11842 - DNA, 519 bp, Arabidopsis thaliana
gggttcgatctttgaggaaaggaaaccctcaaggagtccggagagcatgttcagttcaccatagtcccatacagggaataaaactggcggacagatgactccggatgcaactgatcccagaactcaaccaaatgtcgtggaagtacaacctgatggtgaagaacaactcgggagtctcgtgagcaagaaaactatgagcagtttgaacctatgaagaaggttagccgtaaactgaaagagataaaatcaaagttccatcaggccaccagttcggaactagacatcgatcgagtcatcgaagcaacaaggtggacgcatttcacccctcatattgcgagcataagaatcaagattcccggaagctcaaccgcgagccctataatgggctagaagatcctaaaagctatctcgtggctttcctgatagccgtcgggcgagtcgatttggacgaagctaaacaggatgcaggatactgcaagctttaatacgagaacctggctagacaagcctagatatggt

SEQ ID NO: 11843 - DNA, 660 bp, Arabidopsis thaliana
ccatccccaggcctttttcattgtaagcccacaattaggcccacgtatgtaatttgaagatagaacacatcgtttttcattcattgtgatcgatcaagtcgaagagctcatcgccgataccgaatccgagcatcctggccatgtcgctcgtcttcaacctgggctttgggacgccgtgccgtttcagccacggataaaccacaaacactttgttcattacgaaaagctccaacgcctccggattgaaaacgacacccattctcaagctcatctggtgcggcactaacatggctgcgtatcgagcaagttctccagctcgccagtccagcagcagaggcagccaagggtacatcgcgtcgagcctcacgaaccatagtcttacgtccgggtactctgacagctcccgcggatccccggggtcttctctcttgtaattgatggtgaatccgatggttcgatccaaataccgttttggttcagctacaccaaaatcatcaggcgaggttatgccgatggctctctgaaacggggataggtcaagccgcccaattgagtcgttgtcgatcactacttcgtaccggccggtcgttggaggcatcggaggttccactttatctgaatctgctacgcctttcacataattaattagtagcagcctgg

SEQ ID NO: 11844 - DNA, 550 bp, Arabidopsis thaliana columbia
cgactctagatctataatattctaactccatctcaagatcttgtatctccttctccctatcagccaagacatcgtttgctctctcaagtgcatccatgtcgtgctctgcttgctcatccatcattctcaggtattgtaaagcttccatatggagagctgctttctccgtctgcaaacggcgtaatcatcgccattgcttggttggtagcaatggctgaggcatttctttcttcctcgaattctttattcaaatctcttagggatttcctgccatgctctagttgttgcttcaatacttcaacaagactttcgccctctatgtcactgctaatgcttacaaaagattctacagaagcagagtgctttagttctggtgatccatttgaagtattacgagtctctgttatcttcaaggagtctttatcactgtgttctaatgaaggttcttctctggaaatgttcagtgacgtcagaggctcagtctcttcatgatctccatgctcttctttagctgagtgttctctttgcgacaccagtcacattgtttgat

SEQ ID NO: 11845 - DNA, 603 bp, Arabidopsis thaliana
gtcgtaattatcaatcacgatgataggaccagaggaattgacaacaacggaagatatcgaattcgattccgccatttcaatcgaagctttcgcaataacatctctacgactcttccacaaaaccgaaactcctatcacagaggaaacaaaaaacacagataaaaatcgaaacttttgattcgaataacgcttccagagaagacttacttgttgggttcgtaagagagttaacgagagactggtttaggcggcgagtggtgaagccatacttcggttgaagaagacaggaattgtacaatgtagtagccgccattgttttggctcgaagttgtcgtttggagaactgagaaactgaagaactcgtaacgttgtcgttttagcatagaaaattccaaaaacttaaaaataaatgggccactcggttaatatttgtttagacccgttagtaatcgggtttaaatgggtacccgttcaaacattacaaatagcccgtttagacccgtgggcctaaggtccattttaacaacacgacatataacaaacaaccgacccaagtcagaactatgggcagctttattataaaacatggcagtgtgtgtgtag

SEQ ID NO: 11846 - DNA, 520 bp, Arabidopsis thaliana columbia
gccggccacggtgtagtctcagtcatgggacgacagagagctatgacaaccgccgtttccaccgtcgtcgacgagattccgtcttatgacattttcggaatcttcgacggtcttaggctcgctaaattctttgaggacaggctgcgtcggctcgtgaaagaggaggtgaaagcatgccacggccgtggggtggctgcggactggaataaagttatgaaatcctgtttttccgaggcggtagggacggtgggaaccaccacttccgcggtggttacgatagtcggaaaagaggaagtgattgtgttgtgccgtggcggcgcaagaggtggttttatactctcacgacggagttgctttgcctctctgtcatatccatcatcacaaggtaaccttttgttattttagttatatctattttggggtcaattaatgataataaaatgatgctataatgttttttctaatttgcaactaaaaaattataagcctagtgtgtgttggccatgtttatagtttagta

SEQ ID NO: 11847 - DNA, 584 bp, Arabidopsis thaliana
tactcagctcattaaggaaatccagctcattgtaagggcccgtcttgatccactttctaggaggatgggtcagggtcttgtgggtgactcgcttctgatgacttggtttgctgtgttccaaagttgattagtcaccgcttctctgttttggttcttcttcttcgttctctgtttcaggtgctttttcttcggtctcaagccatccgctgctttctgttctaggcttcctcctttctttgtttttgggcctgtgtgctttgttggcctttgggcttgtaagttttctttccttttttatttttctttttcttttgtgcatgtgtgccttgttgggctgttgcatgtaactttttaatggaaatttaaaattaaaaaaaaataaataagaaaaaatacaaaaagatgctaccaaaggccaagaaagagaaggcacagagagtggacgttgcactatcactcctgatcagaccactgctgaaagattaggcatgactaactacacgccgactagaatcactctcgtcttcgcggattgtccaaacaaaccctgaaggaactttgaggatgttctgttacgttggtaa

SEQ ID NO: 11848 - DNA, 595 bp, Arabidopsis thaliana
  unsure (1)..(595): unsure at all n locations
cagtgtgctctatgctctaaagtagccccatcgatctctgctgcttcatagctagtatcaagttaccaagataagcgccaatatcgaaacccatcggtccatagaacgaaaactctggatctataacttgcgttgaatcttgagtaaccatgacagaaccagtatgaagatcaccatgtattaaagcttgagctctttcacagaacctaacaacataatacacaatggtggttcagagatactagcaaatcctagcggaaattaccgggaaatgagaaaacacatacatcgattttagctctgcgatttcgagcttcaaggcactgtcttcgcgcacagccttagcatcatcatcaagataaggtgaagtccaacgattaaatgtggaaactctatatgggtccgaaaacacaacttgctccgttaatcggcataactccacattaccacaaaattcggttactacacaaacacaaaagacactcactacaagcaacacgataacattgactagtaaatanaatagatgtgagggttttgacatgctcttctgtgctctgtggtatcgtgatagaggagagaagtgaagaagaga

SEQ ID NO: 11849 - DNA, 539 bp, Arabidopsis thaliana columbia
gcataagaaattaggaataaactaaccatagacatcgcttcatcatcccatacaagatagacctcattaggctgattgctaggagctttgtttgcaattacaggaggtggaccaattgaaggaccgctagtgtttgggccagaggataagaatgagcattagtcccacctacggcaacaaaacatgaaaaagatattacaatttgatacaaaacagctaaaccaaatgtaagtcaatgattctacgaacttgggattgaacctggaatagaattgttaggcggataagcatctgctgatcctaaagcatctgcatgagatggttgctgagccccaccaacaggcagaggagcagaaaatggtggagcttgagaaggaatgctgttattcacaacagggaacagaggttgaggaactggcattgcaggtgatgatgtaggaattccaggaggagttacccagtgactggtgatggttgtatggcaggagctgaggttggagttggagtcatcccatattttgacaggaaaaagtggttgt

SEQ ID NO: 11850 - DNA, 516 bp, Arabidopsis thaliana columbia
gcgcagacctggcaggaactctggcagcggcggaacacagttcatattgcctgccaccgctcgacgataatacaggcaatctcttgcgggtattgctcaaatgcggcgcgtacagaagccagatcattataagtacaggttaaggtatatttggcgaaatctgccggaacgcccggcgagtttggctggcctaacgtgagtgcgccagaaccggccttcaccagcaggcagtcagcgtgaccaaggtaacaaccctccaaattaaataattttgtcgcgaccggtaaaaccacgggccaggcggatggcgctcatggtcgcttcagtgccggagttcaccatgcgcaccatatccatggtcgggaccagttcggtcaccagttgcgccattttcacttccatttcggttggtgcccaaagcttaaaccacgctcggcggcttcaatcacggcattgcggattgccggatggttatggcccagcacatcggccccaggaaccgacataatcgatata

SEQ ID NO: 11851 - DNA, 1312 bp, Arabidopsis thaliana
ataaaaatgataagtcgcaatgcaaacttcacagacgtttgcggatattaccaaaaaaagaaaggaagtttgttcgaaaaactaaagagctccttaagctgagagacttgtaccactaccaccaacagagttgttatccatcttaatcttcttagttggaggttcggattcttcttcttcttcttcagaaatggatgcatcagcctcttcctcactcttcttaaaattctctattatctccatcatctctctgttcacctgttttattatacatttgtgattagccaaagttaatcacaacaaaactgggaagaactagaatataagaagaagagttggtttctgtttattacctgcgggttttggagaaactcggagagatccgtcgtgcagcaagggcaggtcatgatgttcttctttgcacgtagtttacgtccgccattgcttctctctctcagttgagttatcccagcaaacttcgcttctaagcatgctttgcagaagttgtgtgcacaaggcgtcgtcactggaagactcagcacttcccgacagatttggcaactgaattctgtgtcaaataaaacaaaaaaaaaacagttataaattgtgctatatacagtaataacacaagtgataatggacgtttacctttcagaagtctggccttcatagcattatttcctttttttgctctcttattcttcttcctctcctcagtatccaaagccattctgctaacaggtggagacttcatccacttccaacgaccctcagcttcctgatgagggaaaagttacaaaataatgaaccaaccgaagaatattcgatatctgctctggtcatataaaagagagactttactaacatcgaaaccccatgatggactctcctttctcacaaacaggtcagtagcattctccagctctggaacatcaggcaaaggtcttggacgatcgccatgctcatcactgcaatatataattaaaaaaattcatgagccatcaaatagcaaatacatataagacactttccgggaaaaaacaaagatcaaacctggtccatggagctggctcattgtcacatctaacaaacaggtaacgacacatcttatgcaaaccctacagaaacagaagagtgtacgtcaggaacaaaacaatccagctctgcacaaaagaaacaaaataggaatgttagctatatattcaaacctgtacgccaacattactccagcacttttcaattctgtagaccccatcgtatctcactccttccgcaggggcatatgcagaacgcttctccttccaagacctga

SEQ ID NO: 11852 - DNA, 884 bp, Arabidopsis thaliana
  unsure (1)..(884): unsure at all n locations
atagagtttaatccacaaaacagtttgggttaaatcatttgcatatataaatcagtttctcataaagtattgaaatacaacacttttccttaaagaagcaacattatatagaaatgttattgataagacataaaaataaaatatctatccaaacacatgttttgaacagatataaaaatgaagaataattccatcttcacttatactgaccataatggtcaaaagccggcattccgttaatggaagacgaagagccaccaccaacactggattcatcttgacccgacgacccgttttggtagtaccgaccacctcccataaccatggattggtccaacataccataaccataaggacccggaggaggtaggccatgagatgggccgtgaaacccaataccatttcctccataggtttgtctcaacgacggtggctcacctctaagtgcagaaccacgatcggtctctatctcacggtaccggttaatgaacacggtgagggggtccacgtagttatcgaacccaagcttgctcatagcccaaaggatatcttcagcagttatggtcttacgttgctcacgttggcaacgctcgttggcttcaccggtcacgaagctgatgtactcggagacacattcttgaatcgtttctttggcgtcgtcagagattttggcgtgagacggtaaggttttacgcatgattcttatgacgtttgcgattggcatgtattggtcttgctcacgagccacacatggtggttgctgctggaccacgataccattgttcttgtcaccggcgccggctactacgactgagctggtcattggggttgggttgttgctgtgctggtccaagttcaatctgttcataganaatcagagagaa

SEQ ID NO: 11853 - DNA, 560 bp, Arabidopsis thaliana
caaggtccgtgaacatcatcggggtgttctctcaagtttgagatttgattcggaaactttcgacccgagtagtaaagacgggtcagtggagcttcacaagtcagctaaggaagcttggcagctaggtcgcaagctatggaaggagcttgaatctggaaggcttgagaaactagtggagaagccagagaagaacaaaccggattcatgtccacattctgtttcgctaaccgggtctgagtttatgaaccgggagaacaaattgatggagctgccgtgtggtttgacattgggttcacacataactttggtggggaggccgaggaaagctcatcccaaggaaggagattggtctaagttggtgtctcagtttgtgatagagcttcaaggtttgaagactgttgaaggagaggatcctcctaggattctgcatttcaatccgaggcttaagggagattggagcaaaaaaccggtgattgagcagaatagttgctataggatgcaatggggactgcacaacgttgcgaaggatggaagtcaagagatgatgaagagactggtga

SEQ ID NO: 11854 - DNA, 617 bp, Arabidopsis thaliana
gagggcagtgatatttccggtgtccttgtgccgtggctgtatattgggatgtgcttttcttctttctgctgggtaagattgatctctgtgaattgcataatttattttgcaggttaaagcatgtacttagttgggatctcttccttttactgaaatcaagcgtacctcatacaaaaacttacaactacaaccggatgtgctttgttttttgtatacctattcacaaatagtagataaatgtgattaaatttctgtgctacatatttacaatgataatttttccattattcctaaagctacgctaggattattattgattcaatttcccacaaaagtattagttagtgtcttcatattatacagttttcttacaccagtggatgcaattttcattacttcacatcttatttcgttttatattttccacttctgacattccttttgttctgctttttttttgtttttgtttacctgaaatagcatgttgaagatcccacttgtattcgttgaattatatgcactggggtgaccgaaattgtggtatggtgttggggggaaggatgctgttaaactcgaggaggcaatgaggaagcatttgcgtgacctttttgaagggg

SEQ ID NO: 11855 - DNA, 756 bp, Arabidopsis thaliana
  unsure (1)..(756): unsure at all n locations
tcgttaaaagatcaatccaaatacataaaacggttttatagaaaaggcgcctatcatatgactggttttggatttcttttttttctttcaagtttgataccttgcgataatttgtttttagagtatcaacaacaaatatgaaatttcattttcattgtatctatatagttgtaaatatgagagtgcgggaaagtgttaactactacaacttatatctagttttttatttgaaaagaaaagaatctcaccgagctagagctagatgaacttccagaccgacgaagatgctcttcaagcgacccatggtgttgctgccctgtggtggttgctccagtaccagcagagactcctgtcgcagtggcagcggtggcagcaccagcaccagctggagcagctgccggatgtgtttctccaacggtgctagtagggtgctctgcaatgtcgctggtagtactctccttatgctgaggagtggagctaacaacaccggttaggtacatggggttaccgtgctcatcagtcaggtcgacaattgggttccctgtgtgtcagttagatggatcggattacctttttcgtccctcaaatccgccattatattattaccttttagcttctgatctgttttgtgtgtgagatatatacctttcaaatacagctttgaagaaaacttggtttgggattgattccagtaggcatgcatatatattagacatgntaatctgcatggatatgatacgtggggtatttaatgtg

SEQ ID NO: 11856 - DNA, 593 bp, Arabidopsis thaliana columbia
ggtgaagatttcatcttgaggtttagtagtacaaccaagttttgattaaccaaaaaaaaaaaaatcaaataccaaagctcaccttctctccctgtgaaaataaataaacaagccaattccgaaaagaatatttactttttcacttttctatgttgaaaacaattaaacaaatccatcctttctcctctggaagagccttcgcttccactggagagactgtactttgttgaaaaacccctgctaactccaacttttaacagtcgtttagagaaagcaaaaggctttcaacgaaatcaacaacacacatgttaatataacaagagtcttctggttcaggctgtgcaatgtgtcaaatgaaattcacccggatgagctcgacttactaccttctttctctggatcttcaatctgcgtcggtagtagattcaaaaagcttccttggtgggttgttgcccaccagatgtttcgtcttctgttaatttagttccacagtttggttagagagaatcaaacatggatcgtaatcatcttgattttacaaatagcatacaaacagatgatttccaaagagagatttaatagacggccttttt

SEQ ID NO: 11857 - DNA, 561 bp, Arabidopsis thaliana columbia
ccatggctaggtgagataaggtgcattggactggcgtgtcgttttaggacttgctgatcatcccgcgggacagctttcttcgcctcgacctgcaacaaagaaataaaaaaagatctttcattcttttctcattgatctaacactaacattgccacttcaacacaaagcaacaacacattctcacaactcacaacagtaacagcaaatccagaagctaatgacaacagaagatttcgaaaagagcatgattacagaaagatctaaacgttgctgcttaaaactcattaatggatgacaccaaacagatctctaagagagcatgaatacagaaagatcgagattatagaacaatccgttgctcattaacgagcagcgagaccaataagacctctaagacagaatcattacagaaagatcgagactttagaacactcgattactcaagactgataattagatgaattgtcaagcaatggatccaagaatactaaccgtgcggccatcaatgatgtgtttgtccatgatgactctctcggcaacagaaggatctgccaaaacgat

SEQ ID NO: 11858 - DNA, 534 bp, Arabidopsis thaliana columbia
taatccaatatctaattcttttttcttaaaaccaccgttgtcgaaaaatccaaatcagcaaaatcagtgattaaccggaccggaccaaaccgaacatcgttttctgtaaatagcagtaactggtttcacacatcccatcatctctaaccaccgacctcataagtcattaagacaaaaacagagacactcctctcactctcattatttcattttctttccataaaaagcacgaatcttcaagaacaaagagagagagagagagaaaatttaatggcgttacggaataacttaacggcgatactcaacttactagcgttactctgttccataccaataacggcgtcaggtatatggctagcttcaaagccagacaacgagtgtgtcaatctcctccgttggcccgttgtcgtcctcggcgttctcatcctcgtcgtctccgccacaggcttcatcggcgcctacaagtaagaatcacagaacttcaagactttgaaaacatagacacaaattgaatcataaagatgtaaactttga

SEQ ID NO: 11859 - DNA, 494 bp, Arabidopsis thaliana
cttcccttacctgtcgcagcttctcaaatgactgcgcattgttttctctctgctgcatctgaagtgaggtcaactattgttagtaagttatggtgcattttccatactcacacatgtaagataaggaaattgataaaccacagacaacaagacagcctactcttcttgcgtgtagtctatgagctttctcccgtggcctaaacacattgtacggattggtatcattgaccggtggtggaggctgttccaaacaaaaaacacaagagtagctaattttcagtacatttcagaataaattcatttcttccacatgtaagattgagaccagtccaaatgatatacctgtaaacgccgcaagataggcttctgccatatttcacgctaaaagaatacaaaagtcgaagttacttaaagtattaaacctatgcccaaagaaccattaaaaactttacattaaaaaaaaaaacatcccttatcatatctaacaaaaatac

SEQ ID NO: 11860 - DNA, 2072 bp, Arabidopsis thaliana
tccagagaaaattatttttactgttttgttttcttctaaattagatggttttggtcttttggagaataacaatcaaagcaaaagataaaagagaagatgtactctttttttaccttctttaaataaattacgagcataattcactttttgacttggaagctaaaaaaaagttcatccacaaccacaagatgctctctgtctgtcggttcaacaagggatgatcacatacattgcgttacacgctaaacctagtgtgctcaattatgaattcctaaacaaaacgtactcaagattagaagttgtatacaaagtctgtttttccattgtaacaacttccaccgacaataaaacagtaacagtttattgaagaaaatgaaatgaagaaaacataataaaagaattgatatttatggtatccttcagtttgggaatgtgacacacatgatctcctttattgacgtttaagtttggaaaaaaaaacaagtctttaaatgcatgcaatcgtattcgcaatcaatatacattttgcttgttattactaaagtctaaaactaaaagccttttgccgtacgtttaagaattccataactggaagaacaaatcatgtttttaattcaaatgtttaaaacaaagtctacattcaaaggaatttagaacacactttttttttttactttttgctgggaattcacaaactctttaacgagtctattcacatttcacctttccgtgcccaaactcattcgatttctctaaccgaaactaaatcatcaccaaagaaggtacaccgttacgccaacttgcccaaaggaccatgtgtccccaccatgctgccaattgggagccagcaatacataaaacagacttgatccaactttttacaagttagatgcagtgtctttttcgtaaatcataatagatccaagcccattctcgtataacctccaccacatcactcctcatatcatatgtgagacagccacgagtcttctaatttctacacgccgtgtcgcaaagcctctcgtcacttctctctgacgcttgtcgtcacttttgaatttttttaatttttaaataattgataaccgaaacggtgcgttttactcaccgtcgtcgggaaaaaaaacatgaggaaggaagttttgccgccggtgttatcaaccaccacagtatgtttcgagaagaaaccaataattgctacattactagctctctctctcgtcatgattgtctggaaccttcctccttactaccacaacctcatctccaccgctcgtccctgtccgccgtcaccaccaccaccaccaccaccttactctcctcatcgaacttcacttcggcggagaatttcaccacctctctctcaacgacaactgcagcagcttctcagaagtacgattcaactccctcagatccgaacaaacgcgttttccaaccgttcggaaacgcggcggcgttattcgtactaatgggagcttaccgcggcggtccaacgacgttttccgttatcggactcgcgtcgaaaccgatccacgtttacggaaaaccatggtacaagtgtgagtggatatctaacaatggaacttcgattcgagctaaagcacagaagattctaccagattggggatacggacgagtctacaccgtcgtcgtcgtcaattgcactttcaattcaaaccctaactccgataacaccggagtaaactcattctcaacgcttactacaacgaatctcccaaactctttgaacgattcactacgttagaagaatcagctggaatctacgacgaatcgaaatactcgccgccgtatcagtacgattacctctattgtggctcgtcactgtacggtaacgtgagcgcgtcgcgtatgagagagtggatggcttaccacgcttggttctttggtgacaaatcgcattttgttttccacgatgctggtggtgtgtcgccggaagttaggaaggttcttgagccgtggattcgagctgggagggtcacggttcagaatattcgggatcagtcgcagtatgatggttactctataatcagtttcttattgttaatgattgc

SEQ ID NO: 11861 - DNA, 392 bp, Arabidopsis thaliana
aaaccttcttcttatacgggaagggaagagctcgacaagatcatcagtgggcatgtcaagaagagcatcgagatcgactcctttgaaggaaaactttttgaacgttctcttcttcgcaagagcagctgcggaaacatctggttcgacttcagcctacggatttcgacagagaaatttaagaccatgatgggttcaaggatctaacaatcgaataattaaggtttaaagagatggagatcaagaaactaaccattgttcttggtttgagaagccgggaaagtgactgcaactagggttttgctatggagatacgacaagagacataacttggcacccaatatatatatatatatatatatatatacacagatgtattatcgatcctacagtgt

SEQ ID NO: 11862 - DNA, 543 bp, Arabidopsis thaliana
ccaattcaatctttaacttctccaccatctctagaagctcttcttctctgctcttctcttccttgtccccactcaatgcttcgattataatcgacactcttgctctttgatgctctaaacttttcttcaacactttcagtttctctaacaccaaatctttatcaaacccaacaacctcaccttcttggttcttagcttcctcgttcgacaaacctaaaccgagttcataccccgttattgtgacgttatcgtcttcctttttgtcttttgattgatcttcttcacgtggactggactcagaagagtctgattcagtagctgggaacactggactaagttggagatcgtcttcacggaaattccacccactgattcttctattcttcactatctcttcgtcttcttcttcttcttcttcatcatcatctccaacactcttgatcaaaatctgactctccataaacatctgctctgcgtttgacaagctatgcaacacgttcttgaccacaaagtcgagtcctttacagttcttgaaaaaaggat

SEQ ID NO: 11863 - DNA, 1185 bp, Arabidopsis thaliana
ccacaatccaccgtttctttctcagatatttattaaattcttcattaactatcatacaaaatgggcccttattcagcccatattgacgttgggcttgtattctgaaattggataatttgcaaatagaacagaacaagaagagttcgtgtatataggaaagaaataaaaacagagcttatggaaaaaaatgtctcatctttttttttttaacgaatagagaaactaaagaaaactcaattcttcctcaccaaactaacaaacctaacagactttaacagtgacagcgaaggggaaacgtttttagaagtctcagcaaattttgtattaccaaagcacagagaatgaatttagtagagcttcttttctccatttctcatggtgccgattctacggttgaaccacaaacagaggctgtaaaatcgcaaaaacatcgaatatcagtagagatatctttctaaattatatataacctttcaattgaaatgatgaaatcgtaaaaactagttctagtaaagcacacaaaattctgacagtgtaatctgcgacaattagaaaacttacagtgtcgaggctgacaggcttgccgtcttctgcgacaatatcgactacggttccggtatggtcagactgaggagaagaagttcaagtttcagagttaaatcaatggcacacgttaagcacaagtattcatccatatataattgacaaatcatatgaagtagatgactaagtgggattgaacagagaaacaacatatttttttagtgtatgtatttagtaagagatgattcgaagtagttaaggtagataaaaggttcagatggtaccccattttcagatgattcagaaactcacctctatttcattcattaacttcatggcttcaacaatgcatagaacttgccccttctgcactttgtctccaacctgaaagaccaagaaagttatatggtacgaattcagacagtgaaatgcagcagccatgaatttgcaaaaatcgctatttataaagcacatgcattaacatcaaccgaaaagcgcatgtcttagtttcagaaaataatctaaccttaataaagggtggttcacaggtgcaggactacggtagaatgtgccagccatggggcttttaacagtaggaagtgacgatttggctggagtaggtggggatggtggaggcagaga

SEQ ID NO: 11864 - DNA, 583 bp, Arabidopsis thaliana
acaagcaatgggtgcagtttcaatttttttctcattttcttttcacgtctcaacgggttgacttttaacggatgcttcttggaaggggaagtaacaaacttataatacgaatatatagtttcaaccggcattgttaattttaaaagatgacatcaaacaagtatttaaagcaacccatcaacagattaattcataccaaatatcagcacaatttctagctagaaagatgatgatgcaagaaaaaagtcaccttaaatcactggagaagaagaagatggttgcaccaattatcgatgccatcctcgcaaacgacgtgtccactttactcgctctcgcagaggggaatctatcggtattgagggagagataccactgggattctctcggtgggacggttttgcatctagcgactgaacttgggcataaggaaattgtcgaggcgataattaagctttgtccttctctagtcggtgttaccaaccttgatggcgacactcctcttcattttgctgcacgctggggacatgcgaccattgtggctcagatattagcgtctggatatgctgagttcaccccggtcaac

SEQ ID NO: 11865 - DNA, 541 bp, Arabidopsis thaliana
taacggctgccggcctgcactgtgctctaaagtagccgcgcgcgccccttcttcagtccttgtaccacagatcttgaccagaggtgaatttcgtgactgcagaggaagcttcttggattgtcctcccagaagctcagcgacgaatgctgcagtgtctggcgcacgcataagggcctctccgacgagaatagctttcacaccatccttcttgtaggcttctacatccttgggtccagaaataccgctaagtgcacaaacaatagtgctctcgggtacctggtccatgagccggctggtagtgccaagatcaacttcaaagcttgttaggtctctgttgttgacgccaatcacttgagcgccaaggtccactgcgatcttcatctcatccggtgtattgacctcaacaaggggttccatcccaaggctctgggaataaagataaagtcttgtgagaagctcagtgtcaagcattttcacaattagtaggacggtatctgcgcccgccagacgagcttccaaaatctgatattcacgaaaatga

SEQ ID NO: 11866 - DNA, 508 bp, Arabidopsis thaliana columbia
aacggccgccagtgtgctctaaaggtcaaattatcaggcagatccggccgttccgggcttaagcaagatcgcctggcaagagattgaccgtcgtgctgaacggatgcacattcctgcttttctggttcataccgcgctaaaaatcaaatcgccaaacggcaaaagttatagcgaacggttagattcggtgcgtacagaaaagcaattgagcgcgatttttgacgatctgatcaacatggtgccaatggggcagacgctgtttggttcgctcaatccggtgcgcaccggtgggccgatgcaggtcagcattgcttttgccgaacagcataccaaagggtatccgtggaaaatggacggtacagtccgtcaggaagtcttcagtcgccgctggcgggttgtggtttggtacttaccatttactgaattatcccgccagttatagcgcaccgatataccgttttgctgattttaacgctggctggtacgcagccgtaatgccgcgtttcag

SEQ ID NO: 11867 - DNA, 493 bp, Arabidopsis thaliana
cgtatatatatatatatatatatatatatatatataggagatgactgtgtatccattcaaaccggctcctccaatctcactcttcaacacatcaattgtggccctggcatggcattaggtatatgtatacataataataaattttcaattaattttcaatctattactttttcaattttttactgattttttttgtttgtttggtgtatatttgctttggtttgtgatcacagcataggtggactagggaaagataagagtgtggcatgtgtttctgatatcattgtagaggatatctctatacaaaacactcttgctggttgtcgaatccagacttggcaggtacatatatagataccacatcataccttatataaataaatgattttgtgacttctgacccacgtaaatatagagccacattatatgatattattgagatatataacactaaaactaaaagatagacatgagaccttatatgaatagttgt

SEQ ID NO: 11868 - DNA, 529 bp, Arabidopsis thaliana columbia
gatgcttcatggcttttgacaaaacttaaaaaccctgtaagtctatatattccttcaagaataactaactagaatgaatcatattaatttcttgttacatgtatagtagaattagggtttaatttatttttcttttctatctataccttttttagatgcgttgggtgactattttcccatcactcgttggaaatgtgtcaatcgaatcaagcaacgacgatgttaggatggtataaaacgttttttcgattaatatattaattttttccttttttatttcaattatattcattttatctttaataatagctttcatttgtggacatgtagatcattgatatggagtttctgacattaattaccccggtcattccgacccgaaaagtaaaagttctccgatattgtcaccgtatagcaaatgatacatggattatagcggatatctccatgtacttaagctcctattcagacgatttacgacctgagtttctcagatttccttctggatttattattagacatgtagcaa

SEQ ID NO: 11869 - DNA, 570 bp, Arabidopsis thaliana
ggcgtatgattcggcctctacccatttagagaagtaatcggttaagacgaggactaatttgttctgtttcgaggcatccatggggccgatgatgtccatcaaccgacccatgaatggatatggcgacgcgatcaatgaaaggagcacgactggttgatggattgtgggtgcatgcctataacatctttcgcatcgtctagagtacttttcgcagtccttgatcattgtcggccagaattaactgtggcgttttatcttgatggtcagggctcttcctccagaatgattttcgcatgagcctccgtggttttcttccatgatcttacgagccgcttctttttctacgcaggtcattagtggtctggacagacgccacttgaataacttttcctcgattaggacgaagcgtgcagcctgagtttttagttttcgagcttcccatttatcgcagggcactttcccctcggatatgtaacttctaatgggtcctatccactcggagtcgcaacctaagtcttagctgtcatttggtccaaaatgcctcataattcgcggcattatgtacgggga

SEQ ID NO: 11870 - DNA, 622 bp, Arabidopsis thaliana
cagaacgttagtactatacaatcttgtattcggtctttgggtgtaggaaaccctctaggagttcgaagaagcatgtttagttcgcctggctcccacacgatgaacggtaccagtggacaaacaaaccccgattctgttaataaacaaattctgccggaggatactgcaaatcgatctagaagaagtcgatgaagatgcatggtactacaaggttttctctgaaaacctttgcggacaggcgctgatgtggttcacacagctggaaccaggatctattggtaattttaacgagctgtcagccgtgtttttaaaggaatattccatccttatggataaaagcacttcggacaccgatatatgaaacctgtcgcaaggaccaaacaagtcacttcgtagtttcattacaaagtttaaaggagtgctctcaaaacttccaagggtgtcacactaatccgcgttatcggctcttcgaaaaggattgtggcatgattcgagattcgaagaagatctaatacttcagttagtgctatcaaaaagcataggcgaaatgttctacttaaaacaagctgaagcgaggaagtctattttcaaggtgcgcaatctcgatggaagaagaagaact

SEQ ID NO: 11871 - DNA, 501 bp, Arabidopsis thaliana columbia
cgagcctgacgctgctgatgacagggtcggcaacgagcggcgtatttccccgggctcggcacgcggtcggggtggtcgtcttggtcgaaggtgatgggcttgtcggaccagtctaggtagactagcgccgccacctttaccgagcagacctcccgacgctcttgcttgcggtgctgagccgaggcgttcgccacttgcccaccatagatcatgaagcagttgtggacctcggtgaactctcctgccttgcgatcctccttcttatcgtcgtcacgggccctgccaccttccgcagctggtccggccttgtgaaagtggcgccgaagcatggcgcactcctcaagggtgtgcttgacgggcccctgatgataggggaacggctcctcaagcatcttgtcgaagagattggcacctccaggaggtttccgagggttcttgtactcggcggcggcgacaaggtccacgtcggtggcgtctggtttcgcttgcgacttcttcttg

SEQ ID NO: 11872 - DNA, 540 bp, Arabidopsis thaliana columbia
  unsure (1)..(540): unsure at all n locations
nnnnnnnnnnnnnnnnnnnnctaaagtgtagcgccgtggtgcgtcgcacaggtcgccccaggctttatcgacaacttcaccatcgccatgcttgatacagagttgcattaattgatattgcgcgaccagcaaactttccagctctcgatccacttcttgtttgatcgatcgcggagaaaagagcaaatccgccataatcgcacacacaataccgataacgatctcgctacaacgttcgacggcaaactgcggcgtaacgaatggttccggctgaatggtgatcacaatgatcagcgcggtataaccggccagcccccacgcatacgagttttctattcgtaccagcgaggatatccaggtacaaaaaccggcccagatacagcacaccagaatcatcaataatggtgcgcggatcatcgcaatgatgatcaccagtccggcaatacagccaataaatgtgccgatgatgcgcaaaaagccacgatagcgaatacgccagaatacggttcactcccgcagcaaaggccggaccggggcaac

SEQ ID NO: 11873 - DNA, 420 bp, Arabidopsis thaliana
  unsure (1)..(420): unsure at all n locations
tcagttaattcacggagtgtatcaggaatcaatgtatgtttcttcagattcaatcgaaaacgaaaatttctcaaaattgaaatcgaggcatacatatatatatatatatatatatatatatatacctttcttggccagcggtatcccaaatctgagctctgacgatcgtatcagcgacatggatgctacgagtggcgaattctacaccgatcgtcgatttagattcgagactgaacacggtgcacctgaaacangcactcncgcccgattttccaaggccggagtctccaagtaacacaactttgcagaggcaatcgtactcgtcgacggctctatatgcggccattgtgaggttctctgattagagaatctcgccacggaaaatttcatgcatctgagattacgagaaactcagcgcgt

SEQ ID NO: 11874 - DNA, 389 bp, Arabidopsis thaliana columbia
agtaacggtcgaagcgttaccagtgagcagctttaaatttcaccaatatatttctcagttatgggtttatcaggttgaatttagccttagaactatttagatgaagtagttttcttaatggtgcatgatcaggttacatcagtgcttcggtgcaaacttctggaacatagtaatcttgttgcgatatgctgagaaacttaagtcagagttccttgaagcctcttcttcatctccttcacctccacttcactcattcccttcctcatttccaagaaagagtaagacacatctaaccttcaacgtccatatcatatatatttcatcatattatatatctgtcatatatgcaacattcattggatatgtttaagcctgtgaaggaagcgaat

SEQ ID NO: 11875 - DNA, 655 bp, Arabidopsis thaliana
cttgtggatttcaccggataagctgttgtagctaagatcaagaagtgtaagcttttgtagattcttgatagattttgggatttgaccagtgaggagattgttgttgaggatcagcttgtttaagtagcttaggttcccaaaactcagcggtatgtttcctgtgaagctgtttctgctcaaatcaagctgctctagattcacaaggttccccaactgagcaggaatatctccggtgatgtagttgttgtggacatctaagagctcaaggacagtgatgttagagatctcgtaaggaagcccaccggagaaatggttcatgtagagatcaagaaacaccaggttctgtaactcgcctatctctttagggatttgacctgagagttggttctctccgactcttagcctcacaagcgactggcattttgctacgctctttggtaatccaccggataaggagttccctagaaggagaagtttgctgagcctctttaaactgaagagctcttctggtattcttcctgttagcttgttcctagagaggtccagggccactaggtctgtgcagttgccaaaagaagacggaattgttcctgaaattgagttccccacaagaaaaagctctgcagagacttgaggtttcaatttgtgagggtat

SEQ ID NO: 11876 - DNA, 453 bp, Arabidopsis thaliana columbia
  unsure (1)..(453): unsure at all n locations
atatgtaaggtggatgagttctggaaaacagcggtgaaagatgatattgactacatagcatgggcaaagggattgacgaagaatagcggtatgtcgtctaccagagcaatgggaaagatgacttcgagaggatctgnatttggcaggaagttccgcagaaatgaccctgttccggataagatcgctcaggacctgcttatacggataccggaacagggccttaatcgacgcggttgccgtggtggcaaacccactgccaggccgtcgacgatgtccgtaggatcaggaatcggtgagggcatgtgaggttccacgcgcctgtagataggttagttanagaggctaacttccgtaagcactaatctgtatacagaatcaagtagctcggagagaataccggccttatatacccannacagnttgattgtataattattttgaagtaaataatta

SEQ ID NO: 11877 - DNA, 497 bp, Arabidopsis thaliana columbia
tgaataatcactcggtctagagtagtaatcacttggtctagagtagtcactcggtcttgaatcactcgggtcttctggaataatcactaggccttctggaatagtcactaggccttctagaataatcactaggccttctagagtaatcactaggcctatgactgctgctgctaccacggaaactcgggtcgaaatcacttggcctgtgctgaagaagacacggtcacagacgctgaaacgacggtcaagacctggctgaggaatagaaggatcattccatgtactactcggggtctgaaaagacgtctgtggaagaaagtagagttcttttgccttgtagatccagagaaatcagcatcaagctctgccataggcacagggataggggaaggcgtgtgataccgctggttccgctagttcctggtcggttattaagcgtttttaggataagagagagccatttctgagcaggtccattgtcttcagctccaaggaca

SEQ ID NO: 11878 - DNA, 652 bp, Arabidopsis thaliana columbia
gaaaaagatgatgggtacacatattccatttaaccaatgtgaaagattcacatcacctttttcgatttttaatagattcggttttaccttctcgtaacgtaattctaagaaaagaaaacgtcaatcatatttactaggaaagataattataatttattgctttttctctcactctctgacctgaaatctcctactgagatttttgaagtgtattcaacaatggcggatccaccacatttctctctgtttcagcaaaaatttcgtaccggagacaaaccatttctcgtaactgtttctctccttttatctttttgtttaagttactgtctttgtcatcgtcaagaactggttcctttttgttttattttgcagactcttgatgctgacttcttaatgaatcacacgaaagtgttactaaaatcggatgcttcagacaaagtttggaaagtgaaactggacggcggtaggcgttccgaagctgggaagagttcgctgcgaccagaaattcagagaaggtgacgttttggtttcaaacatcatggagacgaggctttcatgtagctgtggtgccccatctgttcccgggacatacgtacgcacttctagcaagttttacggagatcttatatgatgttgacgatgtgatgatgat

SEQ ID NO: 11879 - DNA, 463 bp, Arabidopsis thaliana columbia
gcaatggtttcaccaaggtcgtctaatcagtctcctgagatgtctgttatgtctcctttgacgctgggatcatcgccaatgaactctcctatggctaatggtgttcctttgtctccaagaaatggtggtttatggcagaacagagttaatagccttacaccaccaccgttgcagcttaatggtagcagattgaagtcgactttgagtgctagagatatggatatggagatggaacttaggtttcgcggtttggataaccggagacttggtgatctcaagccatccaacctcgaagagactttcggatcatatgactcagcttctgtgatgcaacttcaatcaccaagcaggcattctcagatgaaccactatccgtcttcacctgtgaggcagcctcctcctcatggattcgaatcttcagcagccatggcagctgcagtgatgaatgcaagatcctcagcgt

SEQ ID NO: 11880 - DNA, 583 bp, Arabidopsis thaliana columbia
tgaattgccgaaaaagttacaaaaatctgaagaggagaaattaaaaaaatgtttaggaaaaactcaccaaaaatctcaaaatttgatagagaattagcgtctgagtattttgaggctttaaaaggtatctaatatattagggtttaataaaaatcggaaaaatgtgctaatcaaaagcgatccctacaatatcggaagagatgaactcgagcttcaggttttctcgtttttgcactttagtccctagtttctgaaattatttttttattttttactaacttctaaaattatcaatttaacccaaaacgatcaatggacagtttttatcttcatctccaacgaaacaatatttaccatcttcaaaggtttttctttatcaagagaccaatacaatttaggttttgaggatacaatcgtcaagagaataacaatgccgaattcgtaaaactaaaacggatccttctaactagtaagtaagcatattgcagtacccaactccactcatctcctagctttgaatattgttttcttgtagtacttaagctcctttatactttctcttatatcaccatggctctgtgat

SEQ ID NO: 11881 - DNA, 920 bp, Arabidopsis thaliana
ccgggcagtaggatttggagaagatgacaatcttgttggacaagatggcgttctgaacgaaagctgacacagaattcgcagctcccgcagaattcgaaagatcgcacagaaccacaaacaataggagcgccgccacgacaacacggcgaggactctggtcaaccatcgccgtttcgatcacggtctcgtcgaatgtaaaaatcttttatttttttggttaggtgatttattgttggatttggaccattaattaggttccaatttatggctcttagtaaaagaacacgtgacattgacaaaaatgacacgtggcaaatttatctcactttcaaaacgttggcgtatactagtcgctcttcagtcttcgtcattcgacgccgtcgccgcgtggattattctccggtgacaaaaaccacagttcctgaaaacagacaccacttgattcatacaggtaaatacataatcttttctgatcaagtagatttgtgtatttgtttatgtgcacaataatataatgttcatcaactgtttgacgaaatgcctcaatgaagcgttttaggattagatcagttgattttcgtcagctggttaattttttttcttttatgcgatgggaatgtagttcttctgctacggtctgggttagattcaacatgacgatcagaattatcaatcgtcaatccagattctgctgtaagagttttctgtctgcgaggctgtatagttcaagcgaacaagtggaaatgtgcggatgtggcgaagaacatatctaaagtattgatgtcttctccgcaattggtgcttgactcggctttagatcaaagtgggttaagggtttcacaagaagttgtagaagatgttttaaatagattcaggaatgctggtttgttgacatacaggttcttccaatggtctgagaa

SEQ ID NO: 11882 - DNA, 625 bp, Arabidopsis thaliana columbia
tgttagtgtcttcattagttatgtggactacgttatttgggtcttttgggtctccagtacaattgttctgagaattattatcttttaaatcaacttggataaatctgaccgagcacttatccttaacttgtgtaaatgatctgatatttgcatggagtgaggaagaatatagcggttcttatgttagtgatatgaaagaacaagatagcgattcatttcaatgaaatttaatatacttgggagtaagagggaactaagggtagctgcttgttgtaggtccgtgattgttctataactgaagaaaagagtgagatttggtaggtctgggaaatgagaaggatgatcggtacataatcttgttttcctttattactggagggttcaattcgttgtctaaataatgtttattgtttaagttgacactaccaaaattttggctcttaaaattacaagatagaagttgcgtactgtgcagcaaaggaatcttttacattccatatgcacttaattatgattttgtttttgtgtgcagagacttgcatctgattttcttcaaattacatatgtctggctgttggaagagtggggtcaagtacggagttaattgtcctaagagtagagtttg

SEQ ID NO: 11883 - DNA, 604 bp, Arabidopsis thaliana columbia
cacttccatttcaatattgtgtttccagaaaagggccagtccaccagcccctgtggagcttggaagaacaaaatggtgcgagtcataacccatccaaagcagatgttgaagaacaaattctgaggtattctttgtctccattaggaacagtatatcagggaagatcttcttgtggatttcccttagacgctggcctgtcatggggttcctaagcccacagtagttctagcttactggtcttaaggaagaggggttggcggtttctgaaaatccaccaagtatttctttgttgcagggattaaagagatttttggagcactgggtttggagggtttactttttgatgttttagctgagcttcctacagacttgccagtaggtttttcagcaggtggatgaatagtacttggacctgcagtctgatcccctaggctgggaagtttccctaggttaatgttttctttggggacccaatagttagatttcatttctgagatttagctcccaggaggtttaaacttggttttgctgatggtagctgcccttgccttttttaacaggagcatctagctcttttgagagaatggttggtcttcaccagtga

SEQ ID NO: 11884 - DNA, 593 bp, Arabidopsis thaliana columbia
taactggaaatgatctacaaacgcagtgtagtgatcgacagtggtgctttaccttgttttctcaacattctaactcacaactataagaaagatattaagaaggatgcttgttggacgatttcaaacatcactgcaggaacacaagaacagatccagatggtaatagaggctaatttgattgatccgttggttcatctgcttcaatatgctgaatttgacattaagaaagaagcagcatgggcaatttacaatgtaacttcaggttgtcatgatcaagtcaagtaccttgtggagcaaggatgcataacaccgttatgcgatcttttgttatgtgcagatccaaaaatcataattatctgccttaaaggattagaaaacattttgaaagtgggagaggcagagaagaacttaggtaatacaggggacatgaactattacacgtacctgattgatgatgcaggagggctagaaaatatgatggaacttcaggaccatgacaacagtgagatctatgaaaaagctgtaaaagttatggagacatattgggtgtagaagaagctgacgagacacatgccgggtttcagttcggtgtg

SEQ ID NO: 11885 - DNA, 832 bp, Arabidopsis thaliana
aagcatggttctgataagcgatatcgttaccgtgagccaagacggaacaggaaatttcaccaacatcacggcagctgtagcgcggcgccgaacaacaccgacggaagcgccggtttctttttgatctatgtgacggcgggaatctacgaagagtatatctcaatcgcgaagaacaaaaggtacatgatgatgataggtgacgggattaatcagacggtggtcaccggaaatagaagcgtcgtcgacggttggactactttcaattccgccacatttggtacgtcacacaatcacatgttattaataataatgtctcgagatctcaaagttatttttcaataatatttaaaatttctcgagtacgtaaatagttgcctttaattattgcatttaaaactttaggtcaaaaaagttagaattgaaagtggtgaacaggggacaagatgcattaataatactgagtgtacataaccattttgttgatttttttagtacgacatagtttgacaatgcaggcattaaataaacgttatttttgggttcaagtgattctagtaactaatcgtgcacatgaatcttttattcagctgtgacagcaccgaactttgttgcggtgaacataacgttccggaacacggccggaccggagaagcaccaggctgttgcgttacggagcggcgcagatttctcaatcttctatagttgtagtttcgaggcgttatcgagatacactctacacacattctctaagacagttttatagagaatgcgatgtctatggaacggtcgattttatctttggaaacgcggcagttgtgtgcaaaactgtaat

SEQ ID NO: 11886 - DNA, 234 bp, Arabidopsis thaliana
  unsure (1)..(234): unsure at all n locations
nnnnnnnnnnnnnnnnnnnnnnctaaagacaaagaaagacagtcattacaaatctcccaaagagtataagcccagtgccagatgattatactgcagaactctaccaggctttcgaagaagagctaattcaagtgctccatacattattgcaccacatggaatcaggaggagcgttgccccatcattccatgaggccacaatcattccggtacataaactaccagcagactgaac

SEQ ID NO: 11887 - DNA, 549 bp, Arabidopsis thaliana
  unsure (1)..(549): unsure at all n locations
agctatcgacacctccacagctaggtcttttatgaagcgcacccgatcacggcatgttttattctccccaaaaatattgctacaccgccatttccatccccaccaaaccgccatagcaaacatcgtcgaccagtcactaccctctgtcataagaccttgccttagattcgagtagagccactccaataaggacatagtgaagaacgactgctgcaatctccttggtacaatacgatcccatatgcccgacatagcgggacagtccctaagaacatgtaggattgattctatgcctcctcgacaaacttgacaaacatcagaatcacacaaatgccttctcttacgctcggagttcgtcataattgcttggttcactaccaaccaaagaaaaacccgtacccgttccggtgcctggactttccacacacgcccatacaaactactcatatcctgcctcggagaatcatcattagtcaacattgcaaatgctgatttgactgtgaaacgccatctgaagtcatcnccaagctaaacgatcatgtgcactgt

SEQ ID NO: 11888 - DNA, 431 bp, Arabidopsis thaliana columbia
ttccaagtgttttgattagtcgagacgtatcttctgttgcggttcaagaaatgagcgttgcggaaacgagtacgcaccaagcggctggagcaatcgagggccgccgcttgagtaacggtttaccatcggatttgatgtccgggagcggaacttttccaagttttaccggtgacttcgatgaactattgaatagccaagagttcttcagtgggtatttatggaattactagagagcattaggtgtatgtatatatatatatatatatatatatatatatattccacgctctattgttgtttatgcccatgcggaaaatgtatatttatgtctagtctctggagcttagagcgtcgtaattttagtcctgtttccacattaagccttaacccatatacttcggattctcttgtcataccacttggtaagaaga

SEQ ID NO: 11889 - DNA, 480 bp, Arabidopsis thaliana columbia
ccaagatcttggctgaggagtttggatgggacaaggatcttgcaaagaagatctgggcttttggacctgaaaccacagggcctaacatggttgtcgatatgtgtaagggagttcagtaccttaacgaaatcaaggattcagttgttgctggtttccagtgggcgtccaaggaaggtcctcttgctgaagagaacatgagaggtatctgttttgaggtatgtgatgtggtgcttcactctgatgccatccacagaggaggtggtcaggttatccccacagccagaagggtcatatacgcttcccagatcacagctaagcccagacttttggagccggtttacatggttgagatccaggcaccagagggagctcttggaggaatctacagtgtgctgaatcagaagcgtggacacgtgttcgaggagatgcagaggccaggaactcccttgtacaacatcaaggcatatctgcctgttgtgg

SEQ ID NO: 11890 - DNA, 521 bp, Arabidopsis thaliana
cccaaagctctaagatccaatccacaagaacttcttcattttccggtgcacgtcgctcaatcattcttctaccacaaacaacttcaagcattaccaacccaaaggcataaacatcagtgcttgtggtcgctcttcctgttcttaggagctcaggtgcgatataaccaaatgttcccgctactctagatgtctgagggtcaagtccctgatcatacagctttgccaatccgaaatccccgatccttgcattcatttcgtggtcgattaggacattagctggtttgatatctctatgaatgatgatttgtacccattcttgatgcaggtgtagtagagcagatgcaacatctttgatgatcttgaaacgttgttcccaagtgagccgttcttgattctcattacggtctagatacttgtcaaggcttccattgggcgtaaagtcataaaccaagtagagattctccttatgcctacaatatcccagaagcctgactagatttggatgcctgagacgaccaatg

SEQ ID NO: 11891 - DNA, 610 bp, Arabidopsis thaliana columbia
ctgcggaaagggtgcgagagactcggtttgcaggtagaatcagttccaaggaactcaccagaggatcattactgtggcttgtgcgggtatggatgtagagcaggagccaagaacgggacagatcaaacctggttggttgatgctgtagagaatggtgcagtgatcctgacagggatcaaagctgagagatttgtattagtagacaacactagtagtagcaatgagagaaagaaacgatgtgtgggagtgtttgctagctctgttggaggaaagattgggaagaagtttattatcgaagctcgagtaacggtttcatccgctggatcgctgttaacaccgcctctgatgctttcgagtgggctaaagaacccgaacattggaaggaacttaaagctgcacccggttctgatgacatggggatacttcccggagaaagattctgagttcctcgggaaaatgtatgagggagggatcatacgtccgtccatcatatgaatgatactgaatctggatgcaaagcaatactggagaatcactgataggacagcttcttcgcagggttgacccgtggtttcaggacagaccttaagagagatgattagtcggaaga

SEQ ID NO: 11892 - DNA, 319 bp, Arabidopsis thaliana
gagctgaggaagaaaaacaagaaccagtagatagttgatgaggtctgaaaagatccaaaatcgatacacaaaaccaggagttcgtacaccagcaggagcacgtgtggatgtaccaccgggtacagggaagactaagcctgcgaatgcagacgcagtagatgcaggagcaccagtcccaagcatcactggctcagactctgaatatatggaagtcggagtcggagctagacgtggtcgcgctcgctctgaggatgccaataaagcagcaccagcaaccaccatcatcgatgtaaatgaagctgatggatcgcaacgtgga

SEQ ID NO: 11893 - DNA, 275 bp, Arabidopsis thaliana columbia
taagatgaaaaaccttggcattctctgtataagaccttctccaaaatggttgtatgcaatggttacttgcatcattttgtctctggtgtatgaatcggtatgccccaacaaaatagcctgcattatcatctattgtcagcttttgatgtttagaccaagaaacaaaacactgcttttgttaagtactgagctaatcaatccggtttgcatttcggaaacttaatcttgatcaaaagatgaaccaaagaccccagatgaagtacacactaccatca

SEQ ID NO: 11894 - DNA, 501 bp, Arabidopsis thaliana columbia
ttgcctgcatccgctttatatgctttacgccgtcatagttcacttggatactctcaacgcatctttctcgggtcactacatttcgtatgtcaaagatttgagagggaattggtacagaatcgatgattcagaggtaaactagtttcatcctcctcttccattatgcgacaagccaaacggtttatgaacatatgcaaatttcttttttctgcagattcatccagtgccaatgactcaagttatgtcagaaggagcttacatgttgttctacatgaggtaagaaaataaaataccggtttggaacttataatggttttttctgcattccgaggtcatggattcttaaaatacattttttgcagatcgtatccacgtcctcaaagaggagagcacaatggaaaagctccggttcaccattcgcaaccaagaaacgagatgaaggaacagaggaaacctgttaaccgcttcaaaccgagagcggatcacaagaacacagagtca

SEQ ID NO: 11895 - DNA, 503 bp, Arabidopsis thaliana columbia
tgcggaagacgagagagatcagctggaatatgacccattagccggttagatcttaactcaagaacttcaagagctgagcagtttccaatttcaggtggaatagacccagagatgtgattatctgacagtgacaaagaaaccaacaaccgaagaaacccaaaagtctgcggtatttccccggagaatgagttcgagctaaggttcacataccttaaactcaccaagctactaaacccttcaggtacaaccccagagaagttgtttccctgcaatgcaatcacttgcacgttgggcaaaccagagagctcaaccggaacctcaccagacatattctgcttgctcaaatcaagagctgttaacttaaacagattgcctacactagctggtatctcaccagaaaatccattcccactcaaattcaaaaaactaagggtacttaagttgctgatactaaccggaactgccccggaaaaacgatttcactcagatccagtcagacagac

SEQ ID NO: 11896 - DNA, 1383 bp, Arabidopsis thaliana
gctcttatacacataaataatcagttacaccagcatgaggtacactgtattttgtatcctatttcgaccatctttgatatttgttattattgattggttggaattctttgtataggctgctgtcggtatactaacctatgctcaacaacatcttgatgtgcaattaaaagaatcatggtaacatggcttttctgaatcatgatgcacttattttcagttctgtttgataggcattccgtcacaagattgtgtgtggttccattctttgatcctaatcagtggaaaagcactaacagtgtttgtttctaggtatgagaagctgcagcgctgggacgatgcactcaaggcgtacactttgaaagcatctcaaacaacaaatcctcatcttgtattagaagccacattaggtttgtggtaaccaagactaatattgggaggatttagtgggtttttttcttcgataatgtttttttctaagttctgttggcatttttttgtcggtattctgttagtagttcatagagaactgtgggttcataacattcttacaagttagcagaacaacagatcaacgcatttttttccagtctaaaattcatatgatgcttctcttttcttttcatgaaatggcctgattctattgcttatttaccacgttgtaggacaaatgagatgtcttgctgcacttgcacgatgggaagagctcaacaatctctgcaaagagtactggagtcctgctgagccatctgcgcgtctggaaatggcaccaatggttggtaacttctacttatgctacattcggtgatatagctacatggttacataatgtctttttgcaaccatactaggctgcacaagctgcatggaacatgggagagtgggatcaaatggccgaatatgtgtctcggctagatgatggtgatgaaacaaagcttcggggtttagcaagcccggtttctagtggcgatgggagcagtaatggcacattcttcagggctgttctgttagttcgaagggcaaaggtacacttggacctatattttcgtactataaatcttatcaggcttacttataatctatttgcagacactaatttctgcgtatgtgtgcctgtggatatttttctttcctttttagtacgacgaggcacgcgaatatgtggaaagagctagaaaatgtcttgccacagaacttgcagcgctggtaggtttcatttctggtagtattttcattataaacttttgtgaaaaatatctatgaatcatctgttgtgaataaagggaacagatgtatatcagcaaagatatttgtcactggtctcagccttttccattatgttcttgaaactatttgagtacgccttgtggtgttggaagtaggatt

SEQ ID NO: 11897 - DNA, 592 bp, Arabidopsis thaliana columbia
tgtccatcatgatgtcgaggaagctgttaaggtaaagatgcttaactatcacagtgaaaggcttgcaatagcttttggattgatatttgtaccctcagggcaacctattagagtaggaaaaaatcttagagcgtgtgtggattgccacaatgccactaaacatatctccagcgtcactggtagagagatacttgtcagagatgctgttaggtttcaccgttttaaagatggaacttgctcatgtggagatttctggtaggttttatcttggaattttctgaacatagagcgaagtatgatgaatctccatcactagtctgaaatatcaaaacagagccaggaagattcaagtaagacttatctctctttgctttcaatattgtctcattttctgatgctagtcttctaaatttattttgtcctgcctgattagttgcattggactccaattgggtgaattggcctagatattttgacagggtgcattcatataattcgactgcaacatcgacaaagctggagaacgtgaattgtaagacctatcaggatttgtgatcttatatattataaagttggaagatgggtggtttag

SEQ ID NO: 11898 - DNA, 538 bp, Arabidopsis thaliana columbia
cccaacaacggtttctctctatctccgaaaaagctttctttcttcatttcattgtttttgttaccccattgcataacatcagaaagtgttcctgaagccatatcctctgtgaaacttagtctttcctctcttagtttctcattctccttcaagctatatctgttcttagaaggtgcattatttgtaggttcttgagtaagctgatcagcgtaaagcacgtcttctagtctcgacatcacggtgtgagctaaactctcaagcactcttgaataactctccaatatcgcaagtcctacatcctgcaacaacaattatccaataatgagattttctcatgaccatagagaaaacacaatcaaaatgtatttggaagttaagagttttaaattactctgttgaattgaatcttgctgatatcgagcgaggactgtgagattccgggaaacccttgttttaatagtagcaagatggtttcagctctttcttcaaactgttctctgttctcaatactcactgttgatcccaaggagactttgtg

SEQ ID NO: 11899 - DNA, 792 bp, Arabidopsis thaliana
cgcgtggagacgagctccggcttcctgcgcctgaagcaaaccggaatccgttaactggatcttatgatccggcgtcgttgtatacgccgccgtgtcgagattcccttccgattcaccgtgccgtacaaggatgatccgcttcggaagcagtttattgtccggactcatggatgattggaaaacggagaaaacacttttctaggttttttttttctttccccggaatctgagaaatggcaatttgaaattcgaattaaatagaagaaatgtgagaatcgaatttcatgtggatttgttcttcatccagaatctctgtgtagtgtgcttcgtttgcattaccttcttgctcaagcttaagcaccaaaccagtttcaattttgtttattttatcttaagttaagtgaaatttgtacgtaatattaaagcttaactaattaagtaatgtttaaaactacaatttctcgtctttttttttgtttatgcagtaagataacaactaatatttgacgtacaacgaatgtttccaattttaaacatatgataatgtttaatgactaattataaattataaatattatccacgtctgttccattacattacactagagaacaattatatgtttttttaaataaaacagagattaaaaggtcaatttggattaggtttaaattttaacgtggcaaaccaccatctctcttttgtttaaataattcttaattgacgaattattatttgcatttaaagaagttaatggaaaaacaatattattttgttaatcggtcaacaaacga

SEQ ID NO: 11900 - DNA, 532 bp, Arabidopsis thaliana columbia
tatagcataaagttgcggatttcggactctctagactgggaatgacggaatcttctcacatatcaacggctcctcaagggactcctggttatcttgacccgcagtaccatcaatgctttcatctctctgataagagcgacgtctacagctttggagtcgtccttgccgagattataacgggattgaaagtcgttgatttcacacgtccacataccgaaatcaacctagcggctcttgctgttgacaaaatcgggtcaggttgtatcgatgagataatagacccgattcttgacttggatctcgacgcatggactctctcatccatacacacggtggctgagcttgcatttcgatgcttagccttccacagtgacatgagaccgacaatgaccgaagtagcggacgagcttgaacagataagactcagtggttggattcaagcatgagcttggattcaccagccggttctctccgttcatctgatcgaggaagcgaaagatcagttaaacaatcatcaataggaagcagaaga

SEQ ID NO: 11901 - DNA, 556 bp, Arabidopsis thaliana columbia
aacataattagtttttgtttcacataaaaactttacttgcagagcaaagacaaaaccgcagaaaaatgtggtttgacctttagtaaaagccttcttccatttgcataaagcgtcttttaggatagttgaagatgatgtctaccctctaaacacacaagattatatggcagacaccacccaaaaccaaggcggtacacaaacacgtaacagtgtacaaacttcttctagacgtgcaaggcaacctcgaagaaggtctatcattgaaagcgtgatcgaaaatagtggaaactttattacggagtatcgtgaaagacggggtgttgtacttttgtatcaagatgttattaacgctcttagacgtcttgatgtcccgaagcgtacaccattctggcgggctgcagtacgatgtcttgctcaagccaactatgcatcggcttttgttgctctagaagaagaggaaaatattgattggcttgaagctattactggattcagcaaagacggagaacgtttcgatgagcaagaattgggctttggatgcaatggtttcatgata

SEQ ID NO: 11902 - DNA, 524 bp, Arabidopsis thaliana columbia
gctcttgtggtaagtccaatttctaatacattcccaatccatccaccaccgaaataattcctgcatctctatcaactttctcgtctttcttctaactcttagtccattttttatgacctatcaggttgcagacacacaaaagcatgcagatatggcagcacaccttgcagtagttgagtacgattcaaggaatataggaacaccagtattatctgtggaggatgcagtcaaaaggtccagcctttttgaggttcctcccgagtatcagcccgaacctgttggcgatatttcaaaaggaatggctgaagctgatcgcaagatacgctcagtagaggtattaaaattctctttctctctcttaatctttgatatattaaaaaaaaataagaaaaaatacattcttacactatgtttgctgttgattttggttatgcagttgagacttgggtcacagtacttcttctatatggagacacaaacagcacttgccttgccagatgaagacaactgtttagtggtttcag

SEQ ID NO: 11903 - DNA, 629 bp, Arabidopsis thaliana columbia
cagcagttgcataaaccatgttaggagctgtttcttgagtcacagaaggagagtacttaatcgaagaaggattcgccgttacaacaagaacagagctgttcacatgaagatactctgcatcattatcccattgtctccccaatgtatcgttttgagaagtcaacaatggtcctcccatatttaatctgtagactgtttcaaatgcaagcagagagagaccactaaatggtgttgaagggtttaacgccaaagcttgatcagggataagattatccggaacagagacaacttcaatagcgttgacaaagaccaccgaattgtttgaaggaatgaaacttaaagtcaagaactctgaagtgacattgactgtgtactctttgaagatgtaagaaccgttgaagttgttgaaggagaagttgttcaagagcacgaagtcttctgttacgacagtgattgaagcagaggttaagtccaagtagagttgttgataggtgagaaatgaagacggatccaatgtcgacctaaagaagtgattttgaatctgtaagaagctacactggagaaacacgagcggtttggtagatggaattggtttgattgttggaagtagttgatgttgcacagaagag

SEQ ID NO: 11904 - DNA, 934 bp, Arabidopsis thaliana
gttcttggtcttttccgaatttctaagcctattggactaacagagtaagcatgtgcctttgtgtatcgttggatacagtgagtttgtaattttgatcaaatctccagtaagatctagtgtcatatatcatgtgatcagttttaaatccataatttcatttgcatgcactaaggcaagagtttcatgagaaacttgaaaagcttatcttctcaacccttaaacctgattggttactttggaatctgttaaggctctgaaattttcttaaacatttatctttgtggatgcaggacattcttgttggattgctacgtttgcgaaaatgcgggaagaatgtaacgtgtccagaactcatgggaaagtgttctgttgtccgtgagcttcatgtatacggaacagctgtaccagttcatggtcgagatgctgataagttgcaacatcaggtaccacccgagattcaacttgaaattgacacttaaattaaggacttgtgattctgattatcttattatctcctgtatcgaatttgcagggctatggtacacttctgatggaagaagcagagaggattgctagaagagacatcgatctaacaatatcggtgtgatttctggtgtaggaaccagacattactacagaaagttgggttatgaattggaaggtccttacatggtgaagcatcttctttgaaattatgtttacttaaaaaccaaattcgtaaaatctttatgttgaactagtgagattaatcccttgtggtatcattatgctctttaaattttcatagtcaaaaagttgagaaatcggctaattccttcacgaactatggcgattttgtaagattaatctgtaatgcgtacacatgttgctaagttttacagaattttgcatccaaaaacgcctgaactaaaatcatcattcatcacttccactt

SEQ ID NO: 11905 - DNA, 489 bp, Arabidopsis thaliana columbia
ctaaaggtaaatgttcgggatattcataaattgccgcagcttcaaattcgagccgcggagaagttaaacgccgtaccactgttgactccgaatgctggttatctatccagtgtaacaggcgggaagcgattaaaaaagaggcgggtcgatgacaaaggttacaccgtctgacgtgctacgcctgtcaggcctattcgactcctgcaatgtattgaatttgcatagttttataggtcgaataaggcgttcacgccgcatccggcgtgaacataattactctttttcgcacaatccaatatgtgcaaattattactttttccagaaatcatcgaaaacggtaattggcggacggcgtttatgttcggttttcagataccagttctctattgttctggcgacctgttgaggtacgttttcccttccagatagtcgtcgatattgtcataggtcacgccgagtgccacttcatctggcagagaagggcgatca

SEQ ID NO: 11906 - DNA, 731 bp, Arabidopsis thaliana
ccatctcgggacacatctccaaaacgatttgagaagattatcactgggtattctcacagaacggaatctcaacgcaccattatccactccattaagtcccactttatgtccacaatcttggatttcaacaccagggagtgtctggtgtgttttcatatcccttatcggaacaatgaaggcggaacacccatatccgagactcctttggaatcatgagttggaagtataagcctggcaaaaacagtggcaaacttcccatgaactgcagcatttccaatccaccatttgatagctccatcattaggtgtatcgatcacaaattcgtctttaagtggatcgaatgtcgccgtggtctgaagaccttgcacatttgaccctagaagaaacatagacagacacttaatactgggcatgacactgagacagactactagatgctgaggggacattagacatcactcaccatggtgtaattcagtcatggcaaagcaaccggtgtaatcaagattgtcaatgccatcaaaatacttgtctctatgcttcttagtccctaaattgatcacagagcctccccagagactgcaaatatatacgtatcaacaaatcaaatccagagactagagtatgaatcctaacatcaatactaacaaaacaagatcaaaccttttccatcaagaacaaccacaaaacaaaaatatttcaatttagactactactaacctgtattgaac

SEQ ID NO: 11907 - DNA, 599 bp, Arabidopsis thaliana columbia
  unsure (1)..(599): unsure at all n locations
nnnnnnnnnnnnnnnnnnnnnctaaagaaccacttttcgacgctttttcgccgagagtttaactggtcaccgcgtgatattcgccagggacgggatggctttctgcaataacgcgaatcttctcaacgtatttgtacgccatattgcgaataatcaacttcgttctctggccgaggtagccacggtggcgcatcagttaaaacttctcaaagatgatttttttgccagcgaccagcaggcagtcgctgtggctgaccgttatccgcaagatgtctttgctgaacatacacatgatttttgtgagctggtgattgtctggcgcggtaatggcctgcatgtactcaacgatcgcccttatcgcattacccgtggcgatctcttttacattcatgctgacgataaacactcctacgcttccgttaacgatctggttttgcagaatattatttattgcccggagcgtctgaagctgaatcttgactggcagggggcgattccgggatttaacgccagcgcagggcaaccacaccgtggcagcttaggtagcatggggatggcgcaggcgcggcaggttatcggtcagcttgagcatgaaagta

SEQ ID NO: 11908 - DNA, 568 bp, Arabidopsis thaliana columbia
ttgctcaagaccttttccaggagatgatttctaatggtgtgtcccctgatatcgtaacttgtaacactctgctggccggtctctgcgagaatgggaagttagaaaaggcgttggaaatgtttaaggttttccagaaaagtaagatggatcttgatactgctacttgtaacatcatcatcaatggaatgtgcaagggtaataaggtggacgaagcatgggatttgttcaatagtctccccgtcaatggtgtggaaactgatgtcgtaacttacaatatattgatcggcgtatttgtcaaagaagggaactttttaagggctgaagatatttacttggaaatgctctgtaaaggtataattcccagtactgtcacatataactcaatggtagatgggttctgcaaacagaaccgcctagaagaggccagacagatggtcgattcgatggttagtgaaggctgctcccctgacgtagtgacctttagtacactcattaaaggctattgtaaggcaggaagggttgatgacggattagagcttttcagcgagatgtgtcaaaggggattagt

SEQ ID NO: 11909 - DNA, 524 bp, Arabidopsis thaliana columbia
agagctaacagcaccatccagctctggatcaccattttcatcggccaaagagccctttgatatctcatccacaagatttgaaccactcaactcggcatcactattttcaacagccaacgaaccacttgatgtctcgttcacaacatcgatactcccaaatctaatttgaagaggatgtgagttctgtgtaattgccaaattgtctgcaggataaaccagcttatgcacagcatcttctgaatctgcgcttgtgctagcttctgcttgattacctgtactgtgaaactcaacaccttgccaatcatcgccagtcgatttggctcctgcctgacaggagacagggggttctgaggaaaccactccagactcatccgatccgctcaacccgatcttaccttttctctgaatatcaacaacaacatttggcataacatgtgtcaactgattcctcttagaaaccgattcagtaactggggcccttgtttcatgatattcaaaagccatagaggcagatcctgaatatg

SEQ ID NO: 11910 - DNA, 439 bp, Arabidopsis thaliana
aatatcaatgaacgtcagtttcggtctataaaatttatccacaaagttgctttcaatttctcgacattgacccactcttttgaattttcacaacatgacaactcattttcagacacataagccaactcaagtatagataaatactcaaatagtcatatccttacatataattagtgtctttttgtatgcatgtgcgtatataagatcaaccagtcatattaattgactatacctaaaaatgaaaatctctgctcttggtcgcggtggctcctcccctttgtccgcctgtttccatccttccgccaccgccatcaacgacgatctaccgtcggctcttccatccccatcaaatccatcgtatatctccacctccggcgacgctaccacaacttgtcagtaccacactaacgttggtgttttctttctttcatggtctcga

SEQ ID NO: 11911 - DNA, 524 bp, Arabidopsis thaliana
ccagtaacgtccgccagtgtgctctaaagagaccaacgccttcagcgccgttacgctctgcaccttcaacgtcacgaaccgtaccaatgttagcgcatacttctacctggtgaccgtccagcgtaatagctggcagatctttcagtttagcaagctctgctttttcagaagccacttgctcctgaacagcgcgcattttatcaataacttcgttggttggattgacgtaaacctgattatttacggcatccagaatcagatagtcgtcatttttcacctgagaggtgacgctaccggtacccacgatagcaggtagttccagagaacgcgccatgatagaggtgtgggaagtacggccacccgcgtcggtgatgaaacccagcaccttcttcaggttcagctgtgcggtttcggacggcgtcaggtcagcggcaaccagaatgacttcatcctgaatggcgctcaggtcgataatcttcaggcccaggatgttgcgcacaggccgttaccgatatcacgtacgt

SEQ ID NO: 11912 - DNA, 448 bp, Arabidopsis thaliana columbia
aacgcccgcctctaaagtttacggaggctattttcaagaacgtttagagcatcagcaccttcatcgctgccaaaaggagattcttcatcccagcaacacatataaagtggatcagtaaaatggcactggaagtttgggtgtgacgttttaacatgtaacccaatttcttcatcatcaaaatagtagcgatccatgaagttaaactttggatcttcttgatagcctttcttcatttttgcggcaatcaatttactggcttctttcagacactgttcttcattatcgaactcttttgtctggaatttaccaatactacctaccttgccatagttgacagctaaactatccccttcgtaatctatccaccaaaatttattcgatttttcatcgtgataaataaagcgttttttcatgttacctcctgtaaatgccttccaaagcggattaa

SEQ ID NO: 11913 - DNA, 466 bp, Arabidopsis thaliana columbia
taattgtgatttttggaggtgaaattgcgatggacccgctagctcacgtgggtccaggtcaattgaccgatggaacttttgcattggacacagagacgttgcaatgggagaggctggataagtttggtggagaggaagagactccgagtagcagaggatggaccgcgtccacgactgctaccattgatggtaagaaaggacttgtgatgcatggtggtaaagctccaaccaatgaccggtttgatgatctcttcttttacgggattgactctgcctaattaaggcagatttggtgatcatgaacgtttgtgaatgtgtgtgtgtgtgtgtgggtctgtgtttgtgtgtgtaataagggaggggtatacaccatatgatcctccccagcttgaccattgtattttttttaatatgtttttctttctacatgtttgtttcacgtttcatgttgtatcaataaattgtg

SEQ ID NO: 11914 - DNA, 530 bp, Arabidopsis thaliana
tgaagcaatttgtcagattggtgacgataaggctccgggtccagatggtctaacagcacgtttttacaaacaatgttgggatattgttggtaacgatgtaattaaagaggtgaaactttttttcgaatcatcacatatgaagaccagcgtcaatcacactaacatatgtatgattccaaaaattcaaaatcctcaaacgctgtccgattacagacctatagctttgtgtaatgtcttatacaaagtcatttcaaaatgcatggtgaaccgtcttaaagcacacctaaactcaatcgtctcggattcgcaagctgcgtttattccagggagaattatcaatgataatgttatgatcgctcatgaaattatgcactccttaaaagtccggaagcgagtctcgaaaacatatatggcagtgaaaacagatgttagcaaagcatatgaccgagtagagtgggattttctggaaacgacgatgcgacttttcggtttttgcgataaatggataggttggataatggctgctgtga

SEQ ID NO: 11915 - DNA, 574 bp, Arabidopsis thaliana
caataaatgaaatcttttactagaaattcacaaagcacttgacaaatttcaagagtataggttccttctttaatatataagcacacatcgttttcataattaaacaaatttagacccttggcttaaccatggctctcaacggtttcttcattaccaccgtaaactccaatttcccggcgaaatcaatttcactttccggcggataagcgctccactcaaactcttgaaccatcttcgctagcatcaaatgcacgtgtacggtcgccatcgctagccccggacagatccgacggccaataccgaacggcatcattttaactccggttacaccggttatgtccgcttcctccttacccgaaataaaccgatccgggttaaatttcttcggatcagaccaaagctttggatcctcatttattcccggaagataaaactcaacgttaatcccaacgggaacatcgtaaccggcgaccgtcgtcggctccgtgacggaatgagtcaacgtaaagtatgtcggaggatgtttcgtaaaatctccttacaacggcttgtaaaaagccattttatcacatct

SEQ ID NO: 11916 - DNA, 1564 bp, Arabidopsis thaliana
tttcagaacaatagtaaccaaagaagagtgagtgagacccaagaaattacagacgcacgatcgcgagggtgattgtaacgacgtctgttacagtagccacagacaccagttcgcatgtagtaggcacagtcaggagcacctggtctctcagggtacgagtagctacctgccctgatcgccacatcgattctgcagatcacaaaattgagcacagtcagggccatttagcggaaaccctaaagagaccgtacagttgctgagaatcaaagcgcatgcgagaccttggagtccggtatcggcatctgcaggggtccagtcgggagcttgagcagattgtgagccattgaggggaggattgcgagcatacatgtccttaaatttagggatttggtgtacagtaaaaaagatactagtaaaaactcctctcaccaaactagaagaaactaataagagagtaaatgtcaaaagctcatcggtggatcgacagagatttaccggagaagccgattagaaaagctctgagagagaagaatataagaagaagaagaagaagagatgcttcgacagtgattgagaggagcttcttctttggtcggtctctctctctctctctctcttctttcgctcttcaggaataccgtacggtctgccctctgcactactgtttctttttttagctttcaatttctttttctcatattcttttttaaataataatagtatatagtagtagtttgtattaatttgttttgtgagatttatttttggttctctcttggtccttgggtcgccaagtaaaagcatcccagaaaagggaagatatttccaagaaatatactacttgacaaaacaacaaacaaaaaataaataaactaatttttactagtttccaaccaaaatgacggtaaggtccttgggcggggatagcgcgcgagtggccaacatgtgacacacagacagttttctcacttcacttgctaactcggggagtaaagtggtctggtccgaaagtggggacacatccgtcatttctacctgctactgtttcttaactgctctctcaactcgctctgaccgagtctgactcgactcgactcgccttcaatcaatgccatcacatttcttcgtttccgcttcccatttgtcggcgccacaaaaaccttctgttgttcacgaagccctctagtaccatatataggcccatttatatagctaagtcggcccaattatgttgttagtgtgcgcgggccaaattttagattcgaaaacggcagcgtttgagctgttacttttttttgctcttcttgtcaacaaatcgacactgccgactaaacagcgaaaatcccaaacaaaaaaataaaagaatggcgtctctgtgcctttctctccaccaaaccctaactaatcccctgtcggctcccagatgcagaccactcagcctctccttccccggatcctcaaccttctcgatccgcccctctagcagacgcgcaaccgccttgacgacccgcgcctcctacaccccgacgccggcgactgagcgcgtgatttcgatagcgtcgta

SEQ ID NO: 11917 - DNA, 589 bp, Arabidopsis thaliana columbia
ccccaaagcctcctgtaacaggagcttcatggctaatctgcaaccgaagtaagcaaacacatttattctctgagacttaggacaatgatactcactcagagaagcttaacttacaagaagtctgccagtctttctcactgaggtctcaacgatttccttatcccaagggatcagagtcttgagatctatcaattcacacgatattccttcctgcaaaaacattttgtttcatcatctgtatcgccaaagactaattaagtgcaaaacataaaaactaacgttttctgcgtcaggacatgcttgttccatgatagtgagctgtgctccccatccaacaagagttatgtcggaaccttctcgcataacctgtgacaaaaagttttcatttattagtcttagaagtgtactaaaagaagagacactagaaatggaacctatatacctctgcctcagataaaggtatcatatagtcatcttcagggacatcctctaccgcttgacgatatagcactgaagaagaagaacaaaggatcaaagactcttttacaggttcttgaagttgacaatactcaagaagtagtacgtttgg

SEQ ID NO: 11918 - DNA, 582 bp, Arabidopsis thaliana
ctatccttaaatttctggtcattggtttcatcacataatccctgtttttatattgtttgtttgtgtactagttaattgatgatgatgatctagaagagagtaaggaagatgaagaaatattatgtgcacagtttaataaggcgagtactatgtagataaagttcagaaaaatgcatctataaaatttcacttccttggtatgcaagtttggttgtctgaacatatcttagaaaatccctgcaggtgaatgacagagagcaagtatttgatagtctgcaactatatgaaaacatgaacggaaaagaaaaggtttccaatactgaggtggaagaaccaacctgcaaagagaaattcactttcgttacaactacttcttctttagaacgaatgtcaccaaattcagagcatgacattcccgaggccaaggttaagccattaagacgccaaagtcagagtggaccacttacaagcaggactgtattaagccactcggcttcagagaaaagtcatatctttgaaaggtttgacatttgctaattgctgtttgagactacactttaaatctgcttgtcctatatatag

SEQ ID NO: 11919 - DNA, 444 bp, Arabidopsis thaliana columbia
aagactctaaagctcctctcttttaaattgattaaattgtctgaattgttgttgttatggacttgtgataaatttactggagatttcttatgtgtatactgtttatttttcttaggaatgtacttgtaatttgcagcctaaaattttctactgtagcagtgccagtaacagctataacaacacacaacaccaacaacgagacaaatacatgtatcctctaagattgcactggatctggaaaaaaaattgcagagggttgagttttcacaacaaatccagcagatagagttcattttatccctttgggtctcaatgccagcgaggtatgggaggatgtacctaccactggaaatgcaccagcttggtgaccatatgcagacattgaaatcattattgaagctttggggaatacaatagcttggccaaatgacaaactcaattaca

SEQ ID NO: 11920 - DNA, 558 bp, Arabidopsis thaliana columbia
  unsure (1)..(558): unsure at all n locations
ctctagtagcgatgagcaagcatatgatcgtcttgaatgggattttatcagattagttcttgagaggttggggttccatcctaaatgggtaaactggattatgcaatgcattgacacagtctcctattcttttctactcaatggatcagctcaaggatcagtgactccaaccagaggaataagactgggagataccctctcaccctaccttttcatcctttgtagtgaggtcctttcaggtctttgtctaaaagctcaagcagaaggaaaattacctggaattagagttgcattaggcagtccaagagtgaaccatctgctctttgcagatgacaccatgtgcttttgccgatctgacagaaagagttgcctagaacttatgtctatcctgcataaatatgaggaagcttcaggttaaatgattaagacagagaaatcagccataactttctcttcaaagactagtgaagaagcaagaattttggctanacaagttctcagaatccagaaggaaagcggtctgggaaagtacttagggttactgaactctttggaagg

SEQ ID NO: 11921 - DNA, 577 bp, Arabidopsis thaliana columbia
ctagtaacggccgccaaaagaggcaagatgaatctcaacgtgcaacaggcgggcggcagtgtgctggtggtttcccagtttaccctcgccgcagataccgaacgggggatgcgcccaagtttctccaaaggtgcatcaccggatcgcgcagaggcgttatatgactatttcgtcgaacgctgccgtcagcaagagatgaacacgcaaacaggacgcttcgctgcggatatgcaggtatcgctggtcaatgatggccccgtgacattctggttgcaggtatgagccagcttccagggttgtcacgggaaacaagagagagtatcgctatgtatcaccttcgggttccacaaacagaagaagaattagagcgttactatcagtttcgctgggaaatgttgcgtaacgccctgcatcaaccaaaaggttcggaacgcgacgcgtgggatgcgatggcgcatcaccagatggtcgtcgacgagcagggtaatctggtggcggtaggcgactgtatattaatgccgcaatgaagcgtccattcgctttatggccgttcacccgacgtgcaggacaaagggtt

SEQ ID NO: 11922 - DNA, 1187 bp, Arabidopsis thaliana
atgtgaattcccaaggaatgaagaatatgcgaagtgtgagacccgcaacacagagccaccaatgtccacgcaaacgccacacggttcctgctcttaacaagcaagtcctctttcttacttaccatctccttccacttcttcacattctccgccactcccatacccgagactctcctcttagcctcaaaaccactctctgtcaatctcttagctaaactctctgccgtatccgccgtcacctcaacctccggtttaaacttcacagccgcggtttcagtcagcatgttaaccacagcagacgcgactcgatcatcagacatcaaaaccgatttaactcgggcgacgcagccaccacacatcatcccactcacatcgaggagaataggcgtgtcgctcgtaatggatttcacagattcgattgaagattcagtagattcaaatgattgagtacttatctcgaccgagtttgatactaaaaaaaaaggtcgcgaacagtgccgccggatacgagaacggcgcagtcttggaaagcatcggttcacgaggaacttacttggacgaatatgaagactcgatggcggaggaagaggaaatcggagaagattgctcgccattttctccggcgagacagacgacgatagtcacgcgatgtatacaagtaagaaactagtggtggactggtgtatggttcgttaaaaagagtatcgctaaacgttgacacgtcggatttggaatatatccgaacattagccatttttgtggaatttttaaaaagccaggctgtcaccagaaaaatcagagagagacataaaacgcaaagttttaataggtaagaccttctaactcagctagaggattacagcccccgggacacagcgatgccacgtgtcatcttcctgaaatattgttttttgtttggaggtaactttatcttctcaagctttcttcttctacaacacatctagagctttgcaacaatggaggcgagtgcgaatgaaccagctatgaaaagcttgaaatccaatccttcaggaccgataccgaactttttcgtatcgctctcttcggcatttacgcaaacacctcttgtgcgttcgaacaaacccaatttgcttcttctaccaccagttgcagactccgtcaaattgattcaggactttcatcagtctctgatttctgctactgag

SEQ ID NO: 11923 - DNA, 1781 bp, Arabidopsis thaliana
tggtcgaacatgatgggcctttatatttgcccggcccaagaattttctgttcgagactttaggggggaaaaattgggacaatttatcatcaaaatactatttttaaaggtcatccttaagatttatgttgtgaaagattaggttcatattcggacctaagttctacttctaccctatggttttaaattctacatgtccgaaacttatatgtatcaatatttttgatatttcttttcatttaggaagtagctagtaataactatatcttttattatcattgggaaaattattgttaatatgtctaaaatggtattttaaacattatattagatattttcacaaagatatatccaccatctaagtccagagttaaatgtttctattctgtaaatatccaattatgtaacgttatagggtgcttcgtcgcccgactaaaacacttagcgtaccgtttgttccacgcttccaccttattattttccacacacatgcataaaagtccatagataaggtgtatacgttaattctctagctcacatatatgtcgtgactcgtgtatagatatttgcacacacatacttcaattcaagcatcacattttcaagaaaatggcttctctcgtggtaatagtttcacttctcttggcagctttcgcttctcctcttttagagactgctcatagttataatgtaaccgcccccagggtatcactaaatccaattgatgcttgctggcgaagaaaccctaaatggggactaatcgtcaagccctagcacattgcgcggtagggtacgggaaagcagcaataggggaaaaaacggtccgatctacgtggtacaaacccatcagacaaccctacacgccctagccccggaaccttaagatatgcggtgagccaacctaaaccgctgtggatcacatttgcacgtgacatggtgatagtgttgaaaagccagctcatgattaacagctacaagacaatcgacggaagaggggcaaaggttgaaattgccaacggaccatgcttaaggatcagacaagtgaagcatgtcattatacatgggataagtatccatgattgtaaagcagatcccaatggaatggatggtgatggaatacgcgtttttcaatctacacatgtttggatcgatcattgtttcctttctcggtgccatgatggtttgatcgatgtgattgtatcttctacggctgtcacgatttcaaataactacttcacgcagcatgataaagtaagtttatatttacattaaactgtaacttttataaataatttttgagtgtttgatgaaaatttggtatgacgttcttataaaggtgatgttactcggacatgatgacagttatatgggagataaggacatgagagttacaattgcattcaatacttttggaccgggtctcattgagagaatgcctaggtgagtataaatatatattgttaattattttaatttatatgaagtagataattagaaaattaaacgctaacatatatagatctatgattgatgatgtgggagggtgaggagagggtatgcacatgtagcaaacaataggtacgagaaatggcaaatgtacgcgatcggaggaagtgctaatccaattatctttagtgaaggcaactacttcgttgctcccggaaaacgctgcagcaaacaggtatatatatcaatctcacgttaaaattatcataagacctgacatattatatgatacacttgggttgatatagtcgttatcaattgatttttgagttgaaa

SEQ ID NO: 11924 - DNA, 591 bp, Arabidopsis thaliana
cctcctctgtctcgccatccgtttctttcttgcctctttagttgctgaggacacaaacggagtaatctctgatctctcatttgtcctgcaggaacataaggatattggtacggattcatgttgtatccattgaaacctgttggatctccaaattgattatactgcgaggttggcggcatggggaattgttgatgtggcatgggaccagactgtggtggtggtggccatgacggtggagattcaagtaaaggaaggaactctggctgtggcggatagtttggagcaggcatgtatccaaaacccgggtccgagacaaaagcttgttgttgtggtggtggaggaacccatgttgaaggtgagaaacaggtttggtcggacggtgggattaggttgttgttattagggttagggttttgaaatggatcttgttggaatgattgttgataagagaggttggtggtggtggtggtggtgcgtcttctttgtaagtgattagtttggacccattcaagaatcagctttaaaagctgcttcatcgcttctttaccaccgcctagtcttcttgccgctgattcaatcgtagctttcttt

SEQ ID NO: 11925 - DNA, 703 bp, Arabidopsis thaliana
aagccacagctacagaacacaaaaaatccctattatttcaaaattaagacaggagttggatcataattatttagtaataagtataaagtaacctttaatatcattcttcccttgaacaggaatacttttcatctgcaacaccctgaccaactctttaacagtcttattcattccattcttcacagaaacagcattagctccaaaagcaatagccaaagaaccagctttgatcatttctctagccaaaatgattgcagtggttgtcccgtcacccgctgattcgttcattttaatcgcaacctacacaagatagaaactcgcaaggttcagataactaattgataccatttagagctcaaagaatgaactaacaatggggaaaagaaggggaatcatttagccaccatgaatatgaataacctcttggattaatgttgctccagcgttctcaatagtgtcaggaagctcaatagatttagcaatggtgacaccatcgttaatcactttgattgtatctttttctagcaagcactagattacgccctgcgtctgtggtttccacattgacaatcaatcacttcgatgtcccagaggagggttggcttgctcataatcagattctgcccggaaaaaaacttcaaatcgtagccaagatcgaaatctaattcactaacctctagggcctaaggtgatggaaacagca

SEQ ID NO: 11926 - DNA, 699 bp, Arabidopsis thaliana
tgaagtttgtaaaatacggtacctgtttggtgtaggttgaggcatgtaggctgatggggcaatgcggcatctgagtctcaaggattcagcatcaaagactgcaatgtttccatcagcgaatgacgcgtaaaccagttggctgttgcatgagtaagatgcagaggttatgggcgaagagagagcttcttggggcacccactgcacaaggaatgagaatttaaggtttcttataatcattcaagatctccaagtaaatacaaagattttttacgataccttatgaatgcattccatcttcgaagcatcgtaaatggcgagctgtgtctcatgtgaaaccaataactggatttggtcgttgtggaattggactcgtgtgtcgcctactggtgctttgccaggtggtagctgtatcgctgaagatttctttttctcccacgagtcagcggtccagaagaagagctgtaataaagagagttaacgagtctgttaagttacaagccaacatggacacgaaaagctccaatagcatctaagaaacatgaattttgtcttacctgagcatcggcaccagaagagacaagaatattgagcgcggtagagaatgctagaccagttatgtgcttctggtgacctttcaactttgttttcacctatagattaaaagagattacattacaaattcatttaagagatgaatca

SEQ ID NO: 11927 - DNA, 575 bp, Arabidopsis thaliana columbia
ccaaaaccatcaaagaaagagacgaagctctcgagaaatgtcagcgtctcatgttcgatagccactcgcttcagcagcaaaagcatatgactcctcctttatctggagcttcaagcattgaagacgaacaagtgcagcctcaacaactaagatccaacaagagcttctcatcttctgattgcgaggagagcattatgtcaccaactgatcatatcatgaatccaccaccatgtcagcttgaagaagtctcaggaactgagattatcatggatccattgttgcaagacaagccactgcctgagaagggtaagcttttacaagctgttattaaggcagggcctttacttcagacactgctcttagctggtccattacctcaatggcgccatccgccaccgcctctcaagagcttcgagatccctccggtcacagtccaatgcccaattgtcaacaatggatgtgggaagttcaacaggaaaagagtattctcagatggatcctattcagaagctaagtatcagaaagttcttctccaatgaccgggcaatgaaaacatttctggctactgatctttt

SEQ ID NO: 11928 - DNA, 552 bp, Arabidopsis thaliana columbia
  unsure (1)..(552): unsure at all n locations
nnnnnnnnnnnnnnnnnnnnctaaaggtcccaataaacgcttctccacgttaatgtggcagtcggttatctgctgcctgctggctggcttgctgatgtggatccccgactggtttggcgtgatgaatgtctggacgctgctcgttcccgccgcgctgttctttttcggtgccgggatgctgtttccgctggcgaccangcggcgcgatggagccgttccccttcctggcgggcacggctggcgcgctggtcggcggtctgcaaaacattggttccggcgtgctggcgtcgctctctgcgatgttgccgcaaaccggtcagggcagcctggggttgttgatgaccttaatgggattgttgatcgtgctgtgctggctgccgctggcgacgcggatgtcgcatcaggggcacccgtttaagcgcacgtcaccgcagcatcgtcatcagctccatgggagaacgatgctgctttatcagatcacgcatcacccgcatatgcggtgcggagtaagaataaaacgcctgatagcccgcacaaagcacgctgtctggc

SEQ ID NO: 11929 - DNA, 592 bp, Arabidopsis thaliana columbia
cttcttcctcagtgttctgccatggtgtaaccatcttactgtgcatgccattcatatcgcgaattggtttattgatcgttacgtgtttgctggtgtcaactccatatgcatctatcaacgctctaggtctttcgtgatcatttccttggcctaagttttcctttcttcgccattccatatgttcatcatctctgctagtagctcgacccattccatagttaaaagcttgattagaaggattagctccatcattagacctcctggtaaaaccatctggtgtactagacagtgaagatgggctctctaactgatcttcgaaatcattatacccaccgagtgaattttggccataaactcttgcactggaattaattcctctcaaattctgcatgtcaagcaagagcaattaaggaaatatgcatctcaggtatagtcactctttgaaaaaaaacatataaaaacagttccaaacgacacatgatgcataaacagtgatctactgtactataaccaaaaaaaaccctctacatgtgctaacaagatcatttctaatgtccagagtccagtgacgtctatcatgtatactgagaga

SEQ ID NO: 11930 - DNA, 597 bp, Arabidopsis thaliana columbia
caactaccaccaaccaaactcaatttggaaatttcaaaggtccattagtcaaagcagcattaagtcattcagtaatcaacaaatatattcatatgaaacccaaaataaaataaaataaacacttttcaagaaaaaaataaaatactgagtactaaactggaaaccctttataagcaaaaagaccaaaagttaaaagttaattaagatttggtttaaggcgctttgctttattagagaggaaggaacgaaccatcatagaaatctctccttcgttcaagtttttctctactgtgttggttgagcaatcgagtgatggttattgcggtggcgacgacgagctccattgtttccggaatcaagctttcagggatcttaacttcgttcaacgccgtagatgatgcgtccagtagttgcggaagaagcaacttgaccggagttagaatttttccgacattgagtcggcgacgattctcatcgatcggagctgttccccaattcgtggggatgtcaatcttcctttagtcgcaggtaaagcatcgatttttgggtttaggtgtctgcttattagagtaaaacacatcttttgaaattgtttgt

SEQ ID NO: 11931 - DNA, 464 bp, Arabidopsis thaliana columbia
aatgcccttgttagtcgtcattattcaatatattcatcactagtcgtttgtcttaactcacatgaaacaacttattttaaaagccactcacttactgatttccactcagactcaagaagaaagaaagtctcgaaaatcttctctctttctcttacacaaacatatattttcttgtttaccattaaacaaaatctttcataaaaaattggccatgaataaacgttacggtcacctcataagtctattgttcgtgttttctcttgttatgttccccttcataacaatatcacagacgccatgtccgtacccttgtaacccgttgccaatagccggtactggctccactcaaccggccggttattatcctcaaccgaccggttactatcctctccatcgtcgagtaatgtaccgaattacccttctccaccttattacggaggtaatcccagcgggggatataacgg

SEQ ID NO: 11932 - DNA, 479 bp, Arabidopsis thaliana columbia
tgctaaagagtactcaccgcatacatgcattcattgataagaaagtcctcgagttcgcgaacattggaaacatctaactcgaccattagtgtatcatagggcaatacctataacaagcagagtgagagagacattcagttaggcaaacagcaggggaaaaagataatggaacagagtagatagcaggagcaaatcatgaacctaagacaaatataccttgttagactcagcaagggtgaggacagtgagctgcttaagcttaagaatttggtcaggggacaagtgcggaagacgggtggcattgcctagtgtttcgatgaaagcaagtcaagaggagagaatatgacaaaagggaaaacgaattgaaatagcatatgacaaaggggtcatacatttgtagtctcccaggtgccatggcaaacaagcgtagtagatccaggtacacagaatctgtggtccttcaagctgcacaattacga

SEQ ID NO: 11933 - DNA, 463 bp, Arabidopsis thaliana columbia
cctaaagacgtcgacatccttatcgtcaactgctctcttttctctcccacaccatcgctctcagctatggtcatcaacaaatataagcttaggagtaatatcaagagcttcaatctttcggggatgggctgcagcgcgggcctgatctcagttgatctagcccgcgacttgctccaagttcatcgcaattcaaatgcaatcatcgtcagcacggagatcataacgcctaattactatcaaggcaacgagagagccatgttgttacccaattgtctcttccgcatgggtgcggcagcatacacatgtcaaaccgccggtctgaccggtggcgagccaaatacaagctttcccacctcgtccggacacaccgtagcgctgacgacaagtctttctactgtgtctacgaacaggaagactcagaaggacacgttggcatcaacttgtccaaagatctcatggccat

SEQ ID NO: 11934 - DNA, 644 bp, Arabidopsis thaliana columbia
tctacactggaaaagcacccacaggaagaaaaactaaatggaaaatgaatgagtaccacgccgttgacgaaacagtcaacgcttccacaatccctaaggtacttgcatataattaaaaacttttaaattagaacattcttgttacttttaataacgagattttttgtttttgctttcttgaaaaatgtagctgagacgtgagttcagtttatgtcgagtctacataacaacaggaagctccagagcttttgatagacgtcctgagggagttttgcagacagagagaatgctaacaagtgatgttgcagtagctgagacatcgttccgtgtggaaagctcactggaaacttcgatttcaggaggagaacatattgatgtctctatgaacacagagtttgttgatggactatcagaaccgatgtgggactgggaacagctgacttggccttgaagctatatagattttataatcaagcaaatttaaacttgtttcaattgcttattgttagtttgaattttatgaccgaaagattctttgtctttctttaccttgtaacgtgagaatttgagagataataaatgacgtagacagtgacatatgagatgtttctagagaatgttggagtcatggcacgtgtgatcag

SEQ ID NO: 11935 - DNA, 549 bp, Arabidopsis thaliana
taacaattgaaatcaacaggagcatatctaaaacaaaaatggctacttatagcttcatagtcaagaccaagacaccaagttgtgtttcaaattacctctaaaagcctttccatgttcctgagaaccaatcgatagaaaaggttggcctctgtatctttgaaccgtcgcattttgcttctccgataactacagttaaagaccaacaatttctacagtgaccactgaaaaactcaaaatcgagatgatcacaatctctactctatacagtgaatcaaacatagaacaaataggcaaagtcgcaaccttacaaataaagcgctcatcttcaccaccaacggaagcggcacgaacagaaactgtctcatttttcgccggagccaccgtctccggtacgagtgcttcaccgggagtcgatagcaaaaagacctcaagaacatctctgactagcttcttgtgattggttccgataagtcgataccgagtttagccgaagcgtcaagtcggagtttgaactccgtcatttggtccatatcagattcactgagtatg

SEQ ID NO: 11936 - DNA, 531 bp, Arabidopsis thaliana columbia
tacagacctcgtcctttctaaaaaaatttccttcgactatagtatcaatatatgcttgatcgtctgtgagaatatcacgtgcaaaacatgcaaaaacatctttgtatgtctgtccacgtgccaaacatgcaaaaatttccttcgactatagtatcaatatatcaatatttccttgtatgtctcatacacaacatctttgtatgttctgatatcttcatcactctttggaccacatactatcccaagaagtatcttcatgtaatattctggttccatctttatggaggcgtagttcattcttcctatatagaaacctctttccctaagcttccactgcttattctgtccatcccatgtgaaatatggaggaatctctgtgtaaatgaactgtctagcaaactcacactcttgattcagtttcagaaaaccaataaacataaaatcttcgtttgcttttcattctgaaagttcatctatattctgagtgtcttcaaaacatagtggctgcattcatggtagatgatatgaaag

SEQ ID NO: 11937 - DNA, 510 bp, Arabidopsis thaliana columbia
agattcaactcgaacctcggcacgatcagtaacgctgcaccggttctcatcgccgaaagcatcaacgcgtcgagagcgtaaatgtgaaacattgggagaaaacagaggatgacgtcattggccgtgaagttaaggttagggttttctccgtcgactttctgagcgatgcttgtaactaaacccttgtgagtaatcatcactccctttggaagtcccgttgttccggaagagtacggcatcgccaccgtgtcttccggcgatattttaggttttagaagttctgtttcgtccgcttgagtcagttccgtgaaactcacgcaaccatcatcactcgacgaaacaacgccgttgtcaccgtcatcgtctaggcaaacgatcaaaacgccgtcgtttttgatgtttgttagtttatcgactaaacatttcttcgtgatgatcatcttcgcggcggaggctttagcatgtttagcgatctccggctgagtgtagaacggattcgcggtagtggaa

SEQ ID NO: 11938 - DNA, 434 bp, Arabidopsis thaliana columbia
tgcttgtaaataaggtagtttaacgatatcaagatcttgaacggtgccctttagccctatcacttgtcttatctcttcttgaactttcactatcatcttagggtttcgaagtaactccgccatagcccattccaccgcactcgaactcgtgtctactcccgccagaaacaagtcctaatacacaattacatggatttagctaagaacatgtatagaagccaatttgttttggcttatttaagacttacgagaagcagatgtttgatattattgtcatcgagttctgactccttcttatgagcaatatccaaaagagaatctaacatatcgttgttatttctcgaagttgatgatctctttgtatcgatgaatccttgaaaaaccctaaacagtttgtgcatcaatagcctcgcttcttttctagctccttgcag

SEQ ID NO: 11939 - DNA, 885 bp, Arabidopsis thaliana
atagaccaataacttagacatcataccaaaatgtacatactaaaaggaaacatcacataaaaattaagttttgctagagttaggtgacaacagacaagaaagaagatcataaatctgaagttgtccctaaccaaaagttgcaaagatacctggcttatgaccgtagaatcaagcttctcttttggtccattaacacaaatatccaaaagatcatacctgcagaaagccaccatatagtttattcattcacaaaaacaaacataaaggtttcaactttaaacaaaggaacataccctaagatatcattagctttcttatacaactctccagctgctccaacactctgagactcttttcccattcctactgcttgagctccctgagacatagcaaattcatctaaactttgtcacatttgatctaaaaattgaaacgagttctgagagattacaagcaaagaatatgacgttatgatgaagaccctacattgtaattaaaatcacatcaatcagatcaaaattagcaaacttttcaatctgggcaattccaaatttcctaaattgatacgaaatcaatcagagtccacattttcattgttcagattgataacatgtaatcggaagttacctgaccgggaaagagaaaagcagaggtgggtttgtaatcagcgaacagagaatcgtgaacagtagtactctgagatccagcagagacgctcatagaaatcctagatcggctgagattcttggcggcgaacgaaaggaggcatttttagaggaggagagattgttgagagatatggaagggaggagcaaggaagaggatgcggtggtggccatggcggagagagaagtgcgccggataagagaatgagacggagatgtg

SEQ ID NO: 11940 - DNA, 447 bp, Arabidopsis thaliana columbia
acgatctggatcgagcatgaaaacactggtctattggaaagctagtgttttttttattcaaaacatttttaaaaattgaggacttctttttgacattttccggaaatatataatacaattaaatcagtttatccaattaactcaagtagccaaaatccaaaatctccgccatggctgagagcttctgagagagacacagccatggctacaacttcacacaacaaaccctcactcttccctctactctcccttctctgtttcatctccattttcctcctcctcatctctatccaaacgcgcttccctctcctctcccaaaactcaccgctccgccaccgtcttccctccaaaacccgactggtccctctcacctctctccgccacttgcgacttctccgaagctcctggatctacgacccaaccccagatccacaggtacaccagtag

SEQ ID NO: 11941 - DNA, 478 bp, Arabidopsis thaliana columbia
cggtcaaagcactagggagatacttgatggcatttgctatatggagactgcggaagttgtaactacgctggtacatacaggcagaacaaatgccagtctggttgtggcgagccgacacaaagatggtaacaataatgccttgttcttaactatacattttcgagctacttaagctctcttctagtattaaaatgagtctttttagtatgtaggtatcatgttccgcattcgtggttgaagccataagggaacttgttagtactctttgaagaacttggtggagatatatccgaagtctctgttgtgaagagatcagtaaactatcttacaagataaaaccgatattgtgtgtgcattacactaaaagcattactcgtgctgtgctttaaattatccctctttgtgatcagtcaccatatttgacactcgtgatagttataatacttaatgtgtagtacaaatgcatcattttattata

SEQ ID NO: 11942 - DNA, 1064 bp, Arabidopsis thaliana
tcccctaaatcactccaaaaaaatatgtggctaattaaactgttgaaatataggtaactaattcttcggtgaaccgatcaattaactgacaaattgttttataagtcgactagtccatatattttgtgacctttaattggaacatgtaaacttgataagcgtattttgctttcatttttgttcctttaacctttacggcgttttatccaaaattcctagctaataataataataaaagaattaacattttattttaaaagtaatatatcaaaatgctatattacataaataaatatgtgtgagtttatatagaagaaaatatattttagatagagatttaatttccaaacaaaatcgttgatcttacatgaagaacaggaaaaaaagacatgttcttaagaccctagcttgttgtccacggataaaagctaaaccaacaaaatacgtagaattacacatccgaaactcaaaacaaagtacccaaaaaaaaaaaatcgaccatcaaaatgaaaactcttattgcctactgtcattgttgctcgtagccacattattattattggtgttattattttgatgactggaaccgttcataatggacgtgatcgctgccgctagagccgccgcaaagtttggatcggacgcaattgctgcactggcagcactaacgctctcggccaccgaggaagtggccgcgatctgcagtggctgagccggtaactgtaaaccagaaaacttggactgttgttggttattgtacatagcttgaccaaccacttgaggcaaaactgccgggttgaaaccgggccgttgagcgaactgcatcaacgggttattagtggtcatattagggttgttaccgttgggtgaattggtgaggtccaatgtgatggttgggaatggtgcggaggctgagattgtagccatgcttgaggagcaaggcaagatagctcgagctaggaggtttgttgggttcattaaaccgtcttgactcgacattgagcccgagacgagcatgcttgcagctgcggtggttgttgaggcatggcgtagcgcgtggtggg

SEQ ID NO: 11943 - DNA, 615 bp, Arabidopsis thaliana columbia
caatgattgttcatattatggatcagcctgaacttcagagagatgaaggtccaattggtgtcatatgtgctccaaccagagaattggctcatcaaatcttcttggaagccaagaaattttcgaaagcatatggcttacgagtctctgctgtgtatggtggaatgtctaaacatgaacagtttaaggaactcaaggcaggatgcgaaatagtttgttgctactcctggaaggttgatagacatgctgaagatgaaggctttgacaatgatgagagccagttatttggttcttgatgaggcagatcggatgtttgaccttggctttgagccacaagtaaggtctattgttggccagattcgtcctgatcgccagactttactattttcagccactatgccttggaaagttgaaaagttagctagggaaatcctttcagatcctattagagtcacagttggtgaagtggggatggcaatgaagatattacgcaggttgtcaatgtcataccttctgatgctgaaaaacttccctggctacttgaaaagctccctggaatgattgatgagggtgacgtattagtgtttgcatctaaaaaggccactgttgatgagattg

SEQ ID NO: 11944 - DNA, 583 bp, Arabidopsis thaliana columbia
aactctgagcagattcttgaaaatctcgaagagctgattaagaagtctaaagatttgggatatgtagaagacaaaagctgtgtgtttcaagacatggaggagactgcaaaagagagatctctgcatcaacatagcgaaaaactcgccatagctttcgcagtgtggagaaatgttggtggaagtataaggattctaaagaaccttagagtttgtgttgattgtcacagttggatcaagatcgtgtcaagagttatgaagagagaaattatatgtagagattcaaaaaggtttcatcatttcagagatgggtcttgttcgtgtggggattattggtaaagtatgggacttgtcttgtcttgtcatttcagccattctcagtacacagtgttcgtcctcaaccttcagtccttttcttagcacaaactcgtcgatatttctcgtgaaaagctcgaggagcatcgctccaaagctgtaaagatcccatttgggactcggtttcaggattccgagtctctgaaactggctcaggcttggtgtaggcagaagactcgtgaggaagtttgtgtaatgcttactactggaa

SEQ ID NO: 11945 - DNA, 570 bp, Arabidopsis thaliana columbia
tcaaatgtcgatatctttacttataatgcatacaattatacggttagggtgtacacatatatatgtaaatgtatatgtttcgattcattatatatatacacaatcaagagaggctctttcaaccaaaacattgatctatagagagagagagagaacaaaaaatgggagagagcaaacgcaccgagaaaacgcgcgttttggtggttggagcgactggatacatagggaagaggatagtaagggcgtgtttggctgaaggtcacgagacttacgttttgcagaggccagagattggtctcgaaatcgagaaagtccaactctttctttctttcaagaaactcggcgcacgtatcgttgaaggttctttctccgaccatcaaagcctcgtatccgccgtgaaaattgttgacgtcgttgtctccgccatgtcaggtgttcacttccgtagccataacattctagtccagctcaagctcgtcgaagctatcaaagaggctggtaacgtaaaggtataataaactataaattaaagtttaattatgaatgatcggtttagaaaattgtgcggtt

SEQ ID NO: 11946 - DNA, 991 bp, Arabidopsis thaliana
gcatgcacctgagacgaaacagaccaccaatgagattaacaagctctgtcctgattatttgcgcacaaacggagttaaaagacttaccagaaaaggagctttgcaaggtaatccctggatgtgtccacctttctaccagttccatcaccaccttctgtagtccttatgccaggattttgcatgaaatttgaagtagtctggtcttcgaagagcctctctaatacgttttggacaagctggttcacaatctcttccacttccggtgaagacagttgagataactcagtcacctgccaatatgatttcttgtcatcagactaaaaatcttgagactgagaataaaaatcaaaggaaacctcaacgttaagtaccatctcgggatctaaagaacgcaaataatccaacaaatcattcctgtttcctttctcacattctatcctcaaagctttcttcttttgtgaatctagctcctgcaatatacacattaagaacaaaacaagtattaggagcttaaaagtatcacaaactcagacataaaccatgcactaatttgagtgtttgacaattacctctttcatggaagatagctcagactgcaaaagctgaatataactcaacgcttcaggtgacaagtctccaaacacctgaggactcagtctctcaaattcctcaacacaattccctaaatcctcactcattcccttctctgaaccaaatctaacattgtctttcgaagattgatcctcctcctcctttctaggatcaatcggtatatcaaaattcctcctcagtgatacacgatactccgcattccacaatgtatacctaaatcccacaaaaatccctaaattcacagtgttccaacaaaagagatggatgattttaacttacccggtgatgatggaagaaataaggagacgataaagaggctgttcggagatagtaacggaaacggaaaattgatcggaaggaagaagccaagcatagaaga

SEQ ID NO: 11947 - DNA, 427 bp, Arabidopsis thaliana columbia
  unsure (1)..(427): unsure at all n locations
tgatttgtccaatcatttcatattctaccttccatatgtctcatacaattttctgaaacagtccattgtagttgtgttgatcaatatacatttatttctaagtggttaatgaaaaactggggatatgctttcaggggaaggtaccggtttgctccgtctccatagtacataccgtcacgaccttaaaatttacagctctgacgagggacgtgttcaggtacaactttctgccgatttcgtattgacgatgaccattgagcattcaaatgttcactatatcttctggatattcctcatcggttgcactgagatatgatatgaatgtatgcagatgtctgcagctgcttttgccaaagcgctgcttgacctagaaggacagctgaccccaatcctggtttgccattttctnttacctagctagtatagt

SEQ ID NO: 11948 - DNA, 601 bp, Arabidopsis thaliana columbia
caaatatctttgtcttgagaaagaccaaccttgtcccataagattaagagttttccaccatagttagctatttcaatcattccacaaccaagattcttgttcaacatatctaaaccttttaccactctccattttttactatttttgtcataccatcagcagctctgtttatcacaataacaccatacattatttaccatacattgcacaggtgatttttctgcaacattccatttaccttcttttggatcataaacagagtctatcttctcgttgctgctaacgtaaagcttttcttggaacacatctatttttctaattgaagaaaaacggagctcagagccagggtcaggtaaagcttcccaagtttgagtctttgggtcaaaaacctcaccccaattcacggattcatcatccctgcaacctcccatgacatatagtttcccattgtaggcgtgccgatggctttcgctcgagctacagtcatgtttggggcattacccaaaacaaatcctccttgttacggacaaacatgttggaggacggatcattgtgttggctgagtccgtatacttcggaaccacagaaattaggtaatgtg

SEQ ID NO: 11949 - DNA, 580 bp, Arabidopsis thaliana columbia
caagcgccaagatttagcctcaaaagtattatctaagatgcttgagaattcctgtgcgcccaatgtggttatatacactgagatgattgatggcttatgcaaggttggtaaaactgatgaagcttataagcttatgcaaatgatggaagaaaaagggtgtcagcccaatgttgtgacatatacagcgatgattgatggatttggaatgattggtaaaatagaaacatgccttgagctcttagagcgaatgggttccaaaggtgttgctccaaattatgttacttacagggtcttgatagatcattgttgcaaaaatggtgcactggatgtggcccacaatcttctcgaagaaatgaaacagacacattggcctacacacacagcaggatatcgcaaagtcattgaaggattcaataaagagttcatagagtctctagggcttctcgatgagataggccaggatgatactgccccttttctttctgtatataggcttttgattgataatcttattaaagctcaaagactggaaatggctcttaggcttcttgaagaggttgcacattttcagcacgttggt

SEQ ID NO: 11950 - DNA, 610 bp, Arabidopsis thaliana columbia
gttatagatactgttcccatcttcaagaatgtgacagtgctcttggaggccagacgcttcatgcacagcgcttcgtccttttactttaacagtgacaaggctctcactagtgtcttcaattttgtacttgtcaaatggaagtttcctctgttttttaaaacaatcaaccaaataatcctctctcacgattgccactttcatcctcctgccacacatttatcaactccagcgttcaaagtgagaaaaaatagtgtgacaaagttaaagagtatcagcacaatgaaggcaatattctaccttgcctttctcatttcagcgtctctgatatctgtcagtccacaaacaaccaaacagcttgtacctacaaatttgtgaaacagagatattcaaaagctaaaactagtgtcacaataatcaaaaatagacactcgagttatccataccttttttaacattagcatgaaactctgcaccagcttcctcaattctcttcttccatggttgctgcaaaatgatccatcaagcaatgaagtgcaaagatagtctacaatataatttttgacagaagaacataccctttccttagtatttcagcaattgaaactttaag

SEQ ID NO: 11951 - DNA, 946 bp, Arabidopsis thaliana
aatattcacatacggcgattcttatcttcaataaatacgctgtcgtgcaccggagaaagcccggtctgctgaatgtaagtggtgctgataatcgctacatcaactttggatcatccagtacgctgcgggacgtgcgccccctcgagttccataatctgcaaatgacgaggattatcggttatatccagcgcggtaggtaataacccttttccctctttcagagtaattagcttctctttttgcaacagtaaaagtgcgcgaccaaggttggtcgggtcgttggggatcgccactgtcgcgccttcttttatttgcgccacggttttgatttttttggaataacccgccatagggaagacaaacgtatttcccaccgctaccagtttataaccatgcgcctgattatcttgttcaagaaagggtcgatgctggaagacattcgcatcaagttcgccatgatttgtcgcatcgttcggtagcaacgaaccgctaaatcctaccagttcaacatcgaggccatatttctcttttgccacctttttagcgacttccgcgacatcttgttctgcgccatttataacgccaactttaatgtgttttgcatcgctgctactctggtcgcaacctgccagcagaattccggccagcaataatgcggcccctgtccgtagatgatgtgttgtcagtttcatttttttatccttttattaatgattacctgactatagcggtaaggtcgctgcggtttaaaaaacgaaacgctatcgataagaataaaaaggaataaaagtggaatataaagtctggcacttcttactgaccacgcaagcgcgtttcgtacagcatgatgagagcgatgaaagcaaactacacttatgcttcattcgatacacatttgtaaaaggttgaaccatgaaccaacgacactactgcttatttcactttt

SEQ ID NO: 11952 - DNA, 1623 bp, Arabidopsis thaliana
ctgcgatggtaaagaactcggcacttatagaaccgcctctgtttccattgaatctgatttcttctgtgctactgccatcacttttgaggtcctaaaaccctctcttttactattattccttgtctactttctatgtgtattgtgtttttatgttttgaattgtttgtgatgtacggattgaggcagaacacggtggttgcagaggcaggggaacaggggaggcaagcggtggcgttgagaataattggggacaaagctgtgttctatagagttagggttttgggatcacaagacactctttttgatgacaatggatctcactacttttaccaatgctatatccaaggcaatgtagatttcatctttggcaatgcgaaatcactttaccaggcaaaaccccttccatttgatcttcttaaatcctttgtatcgaaatccatttgtaaagatattgatcgaagttttggtgtttggtaaccacaggactgtgatatccactcaaccgcaaagagatatggcgcgatcgggctcatcatagagactcggagactgaagataccgggttctcctttgtgaactgtgatatcagtggtactgggcagatttacttaggaagggcttggggaaactactcaagaactgtttattcaaactgtttcatagctgatattatcatcctgtgggctggagtgactggaaacaccctgagaggcaaaggtaaaaaaaggatcttgaaaattgaaaactcatctctgaaactacagcatttctctctcaaaacaacatcaagcgaatttcttttgcaggaaagtgatgttcggggagtacaattgcaggggaagaggagcagagagaggaggccgagtaccgtggtcgaaaactcttaccagagatgaagtgaagccttttctgggaagagagttcatatatggagatcaatggctgagactctaaatcctttttcaaccggacataaaggtccagctagctaacaggagatgatgatctaattctactctattcatttgtaattagtttgaatttagagagaaatagaatctgcatgttttaactcataccaaagtaaatgaaacccaggttttggttttagataaactaaatttcttacaagctgatacgaagtggttttacatggagttttgtgacaataaggcaaaatacaaatggatatccttttctcctaataaacattgcataaataaaacctaaaacaaccagtactaatgaatcctatgcttagatgattggttaaaacaaatgcaaccaccaaaatcatgcctcttcaattttctatacaacctttacctactcctctctcctcagcaccaaccaagtcaaacccagaatcactttttctgcaaactatgtcaatttatatatatacataaaaagaaacatcaacgtttccagagatgtggcacgtaccagaattaccatcattatgtatgacttcaagcaagcatctttacgttgtcaccagcgtggtagtagtttttgatagggtgaagactgattctgatttgcgggccttctcatcattaagggtaacatcatcttctttgtggtctccacggtattttcatggttgacataggttttagt

SEQ ID NO: 11953 - DNA, 1285 bp, Arabidopsis thaliana
cataaacctaaggttccggttctacccaaaattccctgtacagttcgtggatctctatatatgtagccaactaaccattagccaagatcaagagaggcttacacaagctggtggtattccaaagaattgagtaggtgtgataatccttggtcgggtcgaaccagagggaatgtcgcatctcccgattcccggttccgttcttatacacattggtctgaataatgtaaggctgtccggttcggttccctagaaattcgaaatctatctcgtctctctccggtcctgccccattctccgaacacatctgctcaaccaaatttaatctaaaataattaatacaaaacaaaatcattggttatcttctttacaaaattgaaacattaaataagaacgacggctcacgtagtaagcggtgacgacgccggcggagtcgcctccgacgagctttagcttcatactaaaccatccgaatctatacatgtgctttgtctgaaatccacatcctgttttattttttatccaatcagaatatttaaactttcgatataataatcaagagactaagttaaaaaatgtcatgtagatttaagtaggaacagagtaagtatcagtgtaatttcgaaagactagaacggcattgatcctaaaccggaagcaaactggatttgaacgtaccggtgtcgttatctaaggaaagattccagatctctccatcatcggaagtcgtgaagtgattttcagaccacataatgttgaaattatcttcaaacgattgtgtcggtgttgctgcgatagaggacgacgccattagagccgtcatgaacaagaacagagccgtcatggcagaacagctcgttatgatcctcctttccgtctccattggttgtctctacttcgaatatttcgaagagagagagagagagaggtaatgcaatctacacttgttccgtgagtgagaagagtatagagctttcttgcttttattataaagaccggggaaatgactgttttgaccattaataattcttttaatatgctattgcgtttagacttttgatacggttttttttctaagattttcatgtaataatgatgtttacgataatttgtaaaagaaagcaaaaagggtaaatgaaaaagtttaattaaagaaaactaacagtaaaactcaatgatttttatgttaatcaagtgtaaactgtttggttataatcacacggtttagctaattaaaagccgccggtttatcattaagttctgagataggcatttgaacatattgatg

SEQ ID NO: 11954 - DNA, 522 bp, Arabidopsis thaliana columbia
ggattgcgactactaatccaagagtctctttgacaacagacatctggacagctaaagctacagttgctagttacatggtgattactgctcactttgttgattctgcttggaaattaaggaagccaatcattgggtttaagtacattacggatcacaaaggtgcaacaatagcaaggattcttcttgagtgtttggctgagtgtggaatagagaagattttcactatcacagtggacaatgaaacaacaaacacttctgctttgaagaaatttcaagaaacattcagcttaaggagtaatgaagcatttgttttagaaggcgaaggtatgcatgtgaggtgtgctgctcacataatcaatttaattgtcaaggagggtttggttgaattgggtgatcatgtggcagccatacgcaattcagtgcagtatgtgaggtcttctacttcaaggtgtgattcatttgaccagaaagttgtctcaggcaagatgactagagggagtttacagttggacatcaaaacaa

SEQ ID NO: 11955 - DNA, 787 bp, Arabidopsis thaliana
ccatcattgatgttaatgctaaataaaagttaagaactatcattatattactttatattctatatactaactagaaaattaaccctaactactttgcttaaaaagctagttcatgaatgttgattgtcacaatcacctttttatcttgtagttcacacactaacgtattgtttgcgtatacgaatgacctaaacacgattttaaaagtgcttacacaataagcacacagacacaacacatcaatataaataggtaaagacctaatctcacttctcatctcattttcatagctctcaacataaaatcacaaaacacgacaatggcacaacgtcctaacttgttatctcatttgcaagatctggtcaccaaatttaaaaacatgacaatggcacaagatcggttcaagttcgttttcactgccaacgaagcagcgttggaaggtgtcaccgaccccatcagacttccaaatctgatcagaaaggcgatgtgtctcgctcgggctccaatctccaaatacaaagtcggagccgttggacgcgcatcatcaggtcgggtctacttaggcgtcaatgtcgacttcccaggtcttcctcttcaccactccatccacgccgagcaattcctcgttaccaacctcgcactcaactacgagaaagacctctgtaagttagccgtcgccatctctactgacggcctcgaattcggcacaccgtgcggaaactgcctccaatttcttatggagatgagcaacgcgcttgatatgaaaatcctgtcaaaccaaagcatg

SEQ ID NO: 11956 - DNA, 437 bp, Arabidopsis thaliana columbia
agatgttaaaactgctacatgataagctccacatgctatttcttcaactcaatcctttgttagtttatcctctactaagcaaggaagtttcccatcagcattgggattccctagttgaccatatactgtactacccattgtgtaaactttgcccgatgttgtcaaaccaactgttaaactatgtccacatgcaactctgtgaaaagtatggtcaattagagctgatacacatgttggtttaagccgaggctctttatctccatgaccaatacggctcttgtcaccatcaccccatgtgaacagctttcctgatgaaacacttgaacttgagtgagtgacaatgacttctactattgcagcagcatgccatacaccgcatgcgacagcagtggtcctcaatacagattaagattcaacttctctcgggtaaaatacag

SEQ ID NO: 11957 - DNA, 654 bp, Arabidopsis thaliana
aacgacgtcgttgctgcaatgtataagattggattttcaggcgagtcgccggcgattcccgcgtggatatcggataaagctaaagactttctgaagaattgtttaaaggaagatcaaaaacagagatggactgtggaagaattacttaaacatccatttcttgatgacgacgaagaatctcagacaagtgattgtttgaagaacaagacttcttctccaagcactgtgttggatcaacgattttgggattcatgcgaaagctccaaaagtcacttagtttcgattgatcatgaagacccttttgctgaatactcggaatctttggattcaccggctgatcggatcgagaaactcgccggagatgagttttcaagcttacttgattgggatacggaagacgatggcggatggattcaagtgagaggcgagaaacataaagaaaccgagaaacgcgacggcgacgaagacgtgatttgcgttgaagcaacgtcatcgtcgcaaacgattgaagaagttgaagattggatttcgaatcaagacagcttgttctcggaatattcctctgacgacatcattaataatttctactctaatgttgctattcaaggaaatttaattgcgattcattattgtactgatgaagatgaaaatgta

SEQ ID NO: 11958 - DNA, 511 bp, Arabidopsis thaliana columbia
gatgtgctcaagaatgtcccttttcgccatatttctccccacacgagcctcataagttcgcttccgtccacaaagtctttggagctagtaacgtctccaagatgctaatggtaatagccatttcaaaacacacatagatatggtcttgatttatgcatgcattattacatatgtaacaataaccaactgatggtaatctagtggtcatatatatagctacgttagattgattcttattagacacatatataatttaccatagcgagaaattagatggttataaaaagttcgagattattactctgtatttcactatgcaaaccctgttaaaagaaaaaaagattaatggttttggcaaaattctcacaatgtgtaacaattccaaactaatcaggaagtacctgagagccagagagcagatgccgcgaatagccttgtgtatgaagcaaacgtgaggctaagagatccggtgtacggatgcatgggagccatctcagctctacaacaacaa

SEQ ID NO: 11959 - DNA, 494 bp, Arabidopsis thaliana columbia
gtgtattgggaagagagtgaagtcccggagctggcagcgtcttcaggctgttaacaagcggaagaagatggagactgtagctccggtgacatctcccccaaagaaacgacggcagaagaaacctaaaaactatgactccgacattgaggacatcacaccaacttgcaacgacagtgttcctcctcctcaagtcagtaacatgtactctgtacctaacaactctgtaaaagagagtttttctaggataatgagagatctgaatgtggagaagaaatcaggtcccagctcctctaggttaacagatgggtctgagcagaacccatgtctgaaagagaggtcttttagggttagtgatttgggcgtggagaagaaatgttcccctgagattacagatttggatgttgggatactgttccgagattttctaagttaaaggatgtgtctgaacagaagaacacatgtctgatgcagaagagttctcctgagattgctga

SEQ ID NO: 11960 - DNA, 502 bp, Arabidopsis thaliana columbia
gatcgcaaaaatcgtatatcaaagatgcgtgcaagaacgcttcatctagaggagctgtgaagtcaccaaaccggttaatccctttacgctcaccaagagcctttaatagagcctagaaaagaaacaaatacacagggatttcatcacaacacaatttccgtaggaaaagacaacgcactgttgctcataggtctcataagagcatgactgaaaacagagaaaagaagctggcaaaacgaaagacagtaagacttacagttccaatggcaagagctatatcttcattagtgtgatgatcatcaatgtgaacatcaccagtagctctaacgtgcacatcaaacaagccatgcgaacgaagttgctaaaccaagacagacaaagagtgaaaccataaaaacatcaatcagtcaacattccaataatgaatcacaacaagatccttaaattaaaaagtctgtgttaagctctcttccaatggaaactgaagaaatcaaaaatacat

SEQ ID NO: 11961 - DNA, 510 bp, Arabidopsis thaliana columbia
cattttaaagtttcggttgttgagtttattttaattatggctttatgccttaaattgtttttttgcttcaatagttttggtttatgttttggttccggaaaaattgtttttccgctgactaagaatcagaaaaagtttgggctatactttccgctgactaagaatcagagaaactaagaatcaggaatagttttgctagacttgtttgggctatatcccccatcccagccccgcctgaaggtgagtggtcagattctctataccaaaacatgcacaggatattgaacattaatcagtaccacccacagttgggagatgacggtatggtagctccatggattctatggagactgtggaagaatcgaaatgacctcgtttttaaggggaaacagtttgatgcaccagatgtaattcggcgggctgtagaggatgttgaggagtggagggaaaatctgcagcggagttttctaccagaacacatagagagatctgagcagcaagtgatcaagt

SEQ ID NO: 11962 - DNA, 571 bp, Arabidopsis thaliana columbia
ggcctggaaaatccagtggatgaggacggtgatcttaacgctcttgcccgtgagttcttcactaagtatttgaccggagcaaataccgaccatcttctttaatataaccatgttaacctttgcgacatttattaggaactctttattttgtactaactggattgccctgtaacttaaaaggggcgttaatagattctattggatttgcagtgcaaactcacatctcacatctcacgcttgacgtcgacatgacacccatgtccctctattttattataaggcattgctccattttattggggtccaataatgaaaatgttaaatgtgtaattcataggtaatacaggcccaaaaggttaaggcccaaaatccccaaatgggcttatgttaaaatcttgccttttgcatccaaacccacttgccttttcttcaagtgtgactaaaaacattatgtaataaagctaacgttaatcacttgtcttggaaatatacaggggtgattaatatataatagtggtgaaggtggtctcgaggcgtcgaaattttaatttgaactcaaggaaagatgtgt

SEQ ID NO: 11963 - DNA, 483 bp, Arabidopsis thaliana columbia
cgaaagatattcatggttcagaccacacgaaagtatccttccctgagccaatggactttcccagatgtgtttttaggagatcgcggcctattaggattcctctccaaccatgagaggctgagccagttgcttagcaatccggaaaactagaggcactacaatactttcccaataggatttttgctaggaggcaattgggagaggtaagaatttgccagctaaccttagataacaaagcatcattaaagtttgtaataaccttaaaccctaatccaccatctctctttgacttagtcatttttgaccatgccatccaacacatctttttcttttccgcagttgaatccaccagaatcgagtaagggctgattctatccttttgcagagagacaccagtagcttgaagcaggacatcgtgtaagttggcattgcagctaacacaaattttagaagagtggttttccggcagttgcaagaacgaga

SEQ ID NO: 11964 - DNA, 659 bp, Arabidopsis thaliana
ctcaatggatcgagagtggtgcgctgtgatcagaaagctattaaacatgttctttgatggagctgttggtgaattttcttcctcctctaatgccacactgtcagaactgtgccttcttcacagagccgtgaggaaaaactctaagcctatggttgaaatgctcttgagatatattcccaagcaacaaagaaacagcttgtttagacccgatgctgctggtccagccggcttaacacctcttcatattgcagctggtaaagacggttcagaagatgtgttggatgcgctaacagaagatcctgcaatggtgactttgattttccctcttatttcagccatgaaatttgattctcttagctaaacgcttatctttgtgcatctgatataggtggggattgaagcgtggaagacatgtcgagacagcacaggcttcacaccagaagactacgcacgcttacgcggtcacttctcatacatccacttgattcaacgcaagatcaataaaaagtcaacaactgaagatcatgttgtggtcaacatcccagtttctttctcagacagagagcagaaagaaccaaaatgaggtccgatggcttcagccttgggagatacacagattccatgcaagctctgtgacgataaacctggtgtatgggaca

SEQ ID NO: 11965 - DNA, 516 bp, Arabidopsis thaliana columbia
ctcgcattgcagttgacccaattgttattggtggcttaaatccaatggactatacgtccttgcaagctccttccgtagtcaagttcttggctccatcagaaaataatatgtttttgatatatctcaagttaaaagacttgttatttcatggttctgttttcatcaacaatatatgaaaaaaaaaacaatgtctatgattcaacacatgttgctaggcatataacatactggaaccacaagtatatatgcaattatttgtttttgtgtcttccctcgtgggactaaaaggtggttcaaaaggttataaccgagcatggaagagcttcgattattatgttcttggttggtattgtcatggtattgaacagtgttgatgactagctatggatatatgtttggaatgatttgtctctgtagttacatgactttcaaattaccacagaaataaagttttggtttctttgctaaatagttcaaaatagatgtgtataccatatcatcatattcttttggttg

SEQ ID NO: 11966 - DNA, 582 bp, Arabidopsis thaliana
tgaagcacacaatagctctagctctgcttttgatacttagcttccttttcacgtatcttattcttgtcgctgttaaatcacgacgacggagatcaagctcactggcactggttccgggacctcccggaccttcgggatggcccataatcggaaaccttctccagatcatcggaaaagctcctcaccgttcatttgctgatctctcgagagtttatggaccagtcatgagtcttaggcttggaagtttaaccaaagtggtcatttcttcaccagatgcagcaagagaggttctttaaacgcttgaccatgtcttatccgggcaaacctttagcaagacggttcgagccttcggcaccacgaagtctccgtagcatggctaccttcgacgtcgtctcgttggaggtaaattataagttaatgtgattaattaaatatggttatctatctatatatataaatacaatgttccaattaggttatggatactggcgacaaaacttttctcacgggagcatcacaaagccacgaagtccgtaaggtcgaagaaagcgaaagaacttgtaacatttcattatccaaaga

SEQ ID NO: 11967 - DNA, 588 bp, Arabidopsis thaliana columbia
cacatctgtcaaaagtcctccactatcaaatcttaatttaaactatctgtcgctctttgaataacacatgcttaaattaaatgtcgccaacgccaagtgctgctaaataaaaatatttgaacagtctctcaactagttacgcaagtaatagagactatagagaaagacacaagagtcttctttgcaaagtagagtagtagtacgggcattaaagtgattgtattacacactaaagtccacgaatcattgtcttaactgtattttcataccttccaatttaatgctcttctctatctttatatatcatccagctttttatttaatctcctcaaccaaacccactaaatatctacattaccaaaaatgttcacaaaatctatccttttggcttctcttcttatcatcatcctcgtctctgcaactgaatcagctcgtcaaaagagcgggaacgatggtttaggattcggtggtgtcccggatccggatttataccgggtttggaacgggtttcggggactggagttggtggtggatcggtggagggtttggtggtgtagcggagggtttgggaaaggaggtgtggtgaga

SEQ ID NO: 11968 - DNA, 480 bp, Arabidopsis thaliana columbia
ttcacttactagttggcttctttctcttaaggggtaaagagaactggttcactcaatttaaagcctatccgattggttcttatggtgatttgattatgacaatttctagcttaaaatatctctatggctccctaatttgcaataaaatatctaccattccacggctacttctgacagttagtatcaacttgcaagactccaacctaaacaccaaaccgaatctaaaactccataatctaacttagtataataaaagaacaaaatcaaagataacatgattagtagtaaattataatataatggtcagatgttaattacctgtcgtagtcatgaatgataaggtagagaaactgtgcgtaattagcaagaaggagaacgtttccaggctcctgagacaatcccgtttggtaaagaagctctgtcttgaagtaatccatggattcttctgcttctaatcgagcttccacggagaaaccatcc

SEQ ID NO: 11969 - DNA, 1617 bp, Arabidopsis thaliana
  unsure (1)..(1617): unsure at all n locations
tcccatgatcccccacactaaaacttaagacaccttgaaaattttctaatgattttaaaccgtccggtataggaccaaaccggtcaagcatcacttttgctatacattatggtagttaaccgctggctagccagtatgccacagggctggccgggagtctaaaccctaatgagtcattgacctgatgcggaaccggcactcataacatcctataaggagtattctatatgcaagaagagagagatttatttacataggtagaagatttaccagtctgtaagtgttgggtttcaccactctggcaatgtctataaagttgaaaagggtctgcaaaagagcgcaaccaacagttatttactaatatattttgagtaatgcaaaactaagtgaaatgaaatttagggaaaaccgacttggagtttgtcagatttaaggaaccggcggccccgacgtgttccatccggcatccggattagaagggtaatggcattctcttcatcagcttgaggctccttaggtaaagacgcttcttttgcatctagttgtctttctagctcctgcaacaacattcagagaaaaaaaaaacttaaatcagtaacgaagagaacgcctacataggaactcaaaccagattattttcacagctattgtattgtatagagatacatttttctgatgtaataaagctgcaggtgttttggctgatctttctctatccactagcagaagcctccaaaacaatccgcagtcaacatatttacaaaaacttgtttgaacgcggatttacaaagagagatataaatgaaaacagaagaagcacctgttcctcctcgagttttctttgagcttcttcctcttttttcttttcttcctccagaaaagcctttctcgcagtttcttcctctagctgacgtgcctcagcatctctaatggacttcatttctttatctcggtcagcttgcagggacgcaacatactcatcatcctgctcgatgtaacagctcaagaattttataataacccataactctcaatatagtagaggggtttagtcaagtaggtagtaagtgttgcctaacctgctgttcccgtatcaacctctgagctgtcagcgaaggtgagggtggacgtggttgggccctcggctgaggaggtaagaatggaagatgattatatccagtttcaggaatgccaccaaacatggctgcctcgagcatgacagcttcatcatgttcctcagatgaaatgcctccccactagagcatacacaatagagtattagcaaaggtaaggactagctactctaaccaataagtaatactggaattctagtctggtttcagtgtaataaacaaaacagattttacggatacctcagaaggaaacccanctgcctactccgctggattaatacttgcatgttcttcttcaggactcccactccgggaacgatcagcgttagctgagccagagatccggatgctgcacgttctgggcctgtgtctaacaagaggttgctcatcaacatcatcagagtcatcatcaaatggtgaactaggtgctgccaatctagacaatataaaagacgattagttagacatcgatttttgacaaaca

SEQ ID NO: 11970 - DNA, 620 bp, Arabidopsis thaliana columbia
gaaactgtccatggatgctaatggaggacctgtacagatccggacccaaaactacgtcaagcttggttatcactatctgatcactcacttttttaaactcatgttcctccctctaatggctgttttgttcatgaatgtctcattgttaagcctaaaccatcttcagctctattacaattccaccggattcatcttcgtcattactctcgccattgtcggatccattgtcttcttcatgtctcgacctagatccatctaccttctagattactcttgctacctcccgccttcgagtcaaaaagttagctaccagaaattcatgaacaactctagtttgattcaagatttcagcgaaacttctcttgagttccagaggaagatcttgattcgctctggtctcggtgaagagacttatttaccggattctattcactctatccctccgcgtcctactatggctgcagcgcgtgaagaagcggacgaggtaatcttcggtgcactcgacaatcttttcgagaatacaaaaatcaatcctagggagattggtgttcttgttgtgaattgtagtttgtttaccctacgcttctttatccgcatgattgttacaagtatagcttaga

SEQ ID NO: 11971 - DNA, 1215 bp, Arabidopsis thaliana
taaagccgcccatcctggtcttgtctatgatctcaccacaggagactacttggacttcctctgcgccgttggctacaacaacaccgtggttcaactctttgccgaggacccacagtacacgtgtcgccaaggagccaatcttctcgacttcaactacccttcaatcactgtcccaaacctcacgggctctatcaccgtcacccgaaaactcaaaaacgttggaccacctgctacctacaacgctcgtttccgagagccacttggagttcgcgtctccgtggagccaaaacagctcacgttcaacaaaactggtgaagtgaagatatttcagatgactcttcgtcccttgccagtgacgccttcaggctacgtttttggagagctgacgtggactgattcacatcattacgttaggagtcccatcgtcgtccaactttcaagctagcctcattcttcattctacttcatcgttctcacttttcttctatgaatcattttatatgtttggataatattttaatgttcaaaaaaaaaataaaaaaaattgaattaaaacacattctttcttaaaacagtttaattttattttgatgttaacaaataactatcggcatcatataattcattacctaaaataaaatgtatagctagtaaaccaaaaacattgattatttttattatctttgtgattagcatatttgatttgcatgtgattattaactttatttttcattaatcatcttctaattacagaatttgtattaaggtaaaaatttgccaagtggacatatggtgctttttgcgtgtcgttacgtgaaagcagtgacagagaaataagaagtgtgtgtggcttggacgaccaaactaaaaaccacactctcgtctcgggcttttgggttagacccggcaacgaagcgatgcagacgagatcctcttcctctccttcggctaaccaccgccgcgaaacccagttgcagatcgcggatcccacctcgttttgcggcaagattatgcctggttggaccgtcgtgaatcggccgcgatctagcaacaacggtgttgttgatacggtaaatatgagctacatcaagcaaatgtgaaacaaaatttgagctttttctcagaatttgaacaattagagctaatttatgtcttttgtgcaatggatatgtatgacacagtgtaatgcttggatcagattagtgattgtgttgc

SEQ ID NO: 11972 - DNA, 489 bp, Arabidopsis thaliana columbia
ccatggcacaatattctacacaaactgccaatatacaatgcaacctaaatatatattcaacactaaacataaaagggagtgtgaaataagttttacgagtttacctgacaagcgatgttagaaatgcatatcgcattgtatccattccaagaacataagcaatatgtaatccagctttaaatccctccatgcagagaagaatccttggtttgttatcacctacttccattgtaacggagaaagcagcaagcagaggccacccaacagcttccaccatgggccttataatgtccacttgctcaaccgtgtgaaagactcctcttttcactccatgctttcggaaaatttcctgtgttttcctaacaatgtcctcagtctcagatttagcatcagctgctgatattctctttggcaaacccagattaagaatgctgacaagacacctctttcttctcctcctggcctttgactactgagcttcttcatggt

SEQ ID NO: 11973 - DNA, 569 bp, Arabidopsis thaliana columbia
gttcttaaactattataactcctatttaactgaatttcttatttaatagtcatgaatgttatcaacttgagacattttctttgcagcatcttccgtaaggtttaaccacctcaagtggtctgagtaaactgtgcaagaagattatttttatggatcaaaaaggtaggtcatcgatactagacttgagctacagtatatcagatgatcggtttactgtcaggcgaggctggaaagctttctgctgcaggaatgagcataaaactggttgtttcttgaggctcatattggtccaaaatggaaaaacacccgtactccggatttttcctttggagagatatgagaacagcattggtaagttcaacacacccttgctttttatatgtagttaggaatgcaatgtttatgagggaaccttttctattccagcgaagaactctaagaagattaagcaagaagtagaatatgagtctgcgaaagaagagaagaacctggaatcattgtctttgtcagataattctagctttgtggtatctgcacagtttctaatctaagtgaagatatactggtta

SEQ ID NO: 11974 - DNA, 658 bp, Arabidopsis thaliana columbia
gcagctaggacatgaaggttatcaggagatcggtcacaaaggtggagaggcgaggaaggagcagttagggcacgagggttatcaggagatgggtcacaaaggtggagaggcgaggaaggagcagctagggcacgagggttatcaggagatgggacacaaaggaggagaggcgaggaaggagcagctagggcacgagggttataaggagatgggacgtaaaggaggactcagtacgatggaaaaatctggtggagagcgtgcggaggaagaagggattgagatcgatgagtcaaagttcaccaacaagtgatagtagttacgagctactagtgtccgctgcaacagtctgttatatatcatctaataagtaacctgcttgtaggttcagtgtttggcagcgtggattttaactagggtctaatgtagcgcgtttaggttttttgtgttttatatgtgtgtgatataactatgtatggcttgtactaacggcagtgttgtaccgttcaaatggtatgcggttatgttatgtaatgcggttgccggttggttttcttcgtgtcttacttgtgatagtatgttgtgtccacaacgtgagacttgatatgttaagattgcagcatatcaaatggctgtagaatagaaaaaatcaggtagtaat

SEQ ID NO: 11975 - DNA, 542 bp, Arabidopsis thaliana columbia
ctagttaaatcattcaagtagtagaactaggggaaaagatcatttccttaaaattgaaagcctcacaaagccataaagatacttattaaactacaaaaggaaagagaacacagaggtggcaacattacattaagaggtacatttagttccacttttattaaacctctcataaaacacaaaccacatcaccaagaagatgaacacatcttaagctgggaatgaatacttggcaacagtctccttccacgcaggacggctgctaatatcatcccaccacgcgctcacgtgtttcctatctttgatcatgtaagctttcccaatcggaccaaccaagtaatcagtgaacgggaggtgagccaaatcagccaagctcacgaagtcaccggccaagtacttgctctttgagagatgtgcctcgtagacatcaagaacacccgcaagcttctcttcactctccttgatcagcttctcatcagatgggaatccatgactgatgcgaacattatgtgaagcgttaagttcaatagcggtgggtggtaagt

SEQ ID NO: 11976 - DNA, 518 bp, Arabidopsis thaliana columbia
ccctgctcgttcttaccaggggaagaagctgctgtggctgctgctacactgccacacagatgcaaccgctgcaacagaaacagctgcgtgaacctgtgcattctgagtcctagtctcttctttcttcttttccttacggtccttgagccacctaccaactgtctttggaccggttccagccatgggggtattgctcccatttccggtggtaccacggctgcctcctgtgccggagaagagaggatgtatggtgttgtgggtgcgaaaatactgcattaggattggtttattagataggctgacttaatgaaaaatccaacaagttgatggcattatattggactacaaaaagcaaataaaggattaatgaactgcttggaaatggaggtaaagtgactgctcgctctaaaagcatttaccgataactttcttaaaatgagccaaccaaagaggagctctaggcgttaccgtaacattcctattcctgtgtccaccaattatgtctttaatcttttatg

SEQ ID NO: 11977 - DNA, 1000 bp, Arabidopsis thaliana
cattctttaacttcaaaaacttaaaacccactactcatcctcgtccacaaaacctttaagattcaaatccgacggtccaccttccgctgccgcatcaacagccatcgccttccacttctctgcattctctctcatctcctccgcctcttctccaccactcatcaccttctccaaacaccttctaatctcctccccatccacatctccttcctccccaaccttcaccttcactccaatcctccacgtatcctccacaagcttcgccgttgtacactgatcagcaaactgcggaaacgaaccaccggaacaccactctctaaactctccaacgtcgaattccaaccacaatgagtcacaaaacatcccacagcacaatgcgccaaaacagctgtctgagaacaccatcccaccaccaatcctcgatcacttcctctgatcaattcaagaaaccgattcttcttcttctcttctggatttttctccctcacgatccataaaaacggtctgtttgtagctaacacgccgtgagtaagcgcttccatgtgtttctctggtaaatcatcggcgtgtgtgcctaaggaaatgtaaatcactgatctctcgagcttcgagtctaaccatttcgtgtaatcctcgtcggaagatttgaaaagatcggttttaccctcggaggaagaaaccaacggtccgattgggatcatcttgagtttctcaacagaggttaaagcatcgtgttccaaagcagagaatgtgttaacaagaatcttagggtttgattccgtttcgagagcttcgatatgttctcttagagtcacaagagctgacggtaatgccttcgaaggttgaagaaacgacgggaggtcaccggtggtgatcagtggcagtttcggtaatttaatcggttcaacgtcgaagagatgtttgtaagaggtgttgaagtagtagtagtagatgtctagtacagtagctggttcaaccagagaagtgtagttgggaggtg

SEQ ID NO: 11978 - DNA, 691 bp, Arabidopsis thaliana
gtcgatcccacagactgaaatattcctaatcatctttctactcgtggctgttactcgtcggtcgtcacataagacttttctcatccaccggtcttgtaagagacagacagtgcaaagattgtcaattattcctaatccatcttttataccattgatacttaaaatggtttagctcttatatataaaagcttgagtatgttctttcttttactaaaacttataacatcttcaaaacattctaaaatggccacttccgtcaatggttcccatcgtcgtccacattacttgcttgtaacattcccagcgcaaggtcacatcaacccggcgcttcaactagccaaccgcctcatccaccacggtgcaaccgtcacatactccaccgcagtctctgctcaccgacgtatgggcgagccaccttccacaaaaggtctatccttcgcttggttcaccgatggattcgacgacggtctcaagtcattcgaagaccagaaaatctacatgtccgaactcaaacgatgtggttcaaacgccctgagagacatcatcaaagccaatcttgacgccaccaccgaaacagagcctatcaccggggtaatctactctgttctcgtcccgtgggtttctacggtagcgcgtgagtttcacctcccaactacacttctctggattgaaccagctactgtactagaca

SEQ ID NO: 11979 - DNA, 622 bp, Arabidopsis thaliana columbia
tctccgaccagtttatacagacatcagaattgaagaaattaggggattagatgtgtcggaagagtgaagccatgggaagaagaagagtagagatcaaactaattgagaacatcagcagtagacaagtcactttctgtaagagacgaaatggtctcatggagaaagctcgtcaactctcaattctctgtggatcctccgtcgctcttttcatcgtctctctaaacggcaaactctagaaatcctcctccggcgacaggtctcactctttttagctcctcgttgtagattctcattttagttcatcatcttctccgaaacttagaaactagggttttttttgcccccttcgaatcttcttgtgttagccaaatttaagattgtacaatgtggtggcggaagatgtactcttcgtgttcgatttcttaaatttccatttttttattgtttcaatttgttgcagggatttgttgtttttatactctttttttccttgcatgcacttcaagagatttttctacacgtggtggtaaccgtaattcatgtttgtttattaggatttcaagtcatcttaactttgtcttgctactagagtgttataagccaatgtaaattgtttaattta

SEQ ID NO: 11980 - DNA, 558 bp, Arabidopsis thaliana columbia
tttttagttgctcaatgaagttcttgattttgaaataaagatacaattcgaaaacttgccgcctttttcactgttatgtttcagaaataataaagagtaaaaagccaaagagaacagagagtttgaaaaccttttgaactcaaaaagctactttcttgaaaaagcgttttcatcagtttttgggttgatttattattacctttgagataaagaccatcgtgggaagagagagtgacttcgatgaaatgaggatggtcaagctgaccattccggcagagataatagacgactgggactttccggttaacgacgggtttaagacgaggctcgaccagattcggttacggtcgggactggtgtcttgttggtctttggatctcctggggaccaaatagttgttatctggtgttgctctgaacactcttgaactcatcctttttgtttctttgctcatggaagagtgcaagaaaaaaagccaaagagacgaagaacacgaagtagtgaaggagttttaaagtgagagtctttgtgggagtttatgagggagttgatgttgat

SEQ ID NO: 11981 - DNA, 546 bp, Arabidopsis thaliana columbia
  unsure (1)..(546): unsure at all n locations
tagtaacgggcgtgctgtaaagtcgttgattaacgaagttgcgtgaagaaatcgcgcgccttgagaatctcattaccgctgaagagcaagtgttgtcgaatctggaagtctcccgtgatggcgtggaaaaagcagttacagcgacacgcacgtagtcgctcagtttgagcagcaaatggaagtcgttaaagccactgaagccatgcagcgtgcacaacaggctgtaacaacctctaccgttggcgcatcttccagcgtttcgacagcggcagaatccttaaaacgcctgcaaacgcgtcaggccgaacgtcaggctcgcctggatgctgccgcacagttggagaaagtcgcagacggtcgcgaccttgacgaaaagctggcggaacgggaattggcggtacgnataaaagtagcgcccaggatgtattagcaagactgcaacgccaacagggcgagtaatttttttgccagcctcgctaaaaggctggcactattttaaggataaaatatgtctggtttttccagcgtctgtttggcaaggataat

SEQ ID NO: 11982 - DNA, 942 bp, Arabidopsis thaliana
taacttccacccatcaaattcatatgaaaagtatgatgtcggtgtagaggaagctggtgaatataccgtaagttttttccattctctgtttagatattgcacccatcatctatcatctttaataagtgtctgtcaatgaaaccactgctttgctctccatgaaacacagttgctaccgcgtttttactcgttgatagaacaatgaactccactataaggttgttcaatgcgtttcacctgagaatattacctggattttgcagatgatactgaactccgatgaagtaaagtatgggggtcaagggattgtaacagaagaccactatcttcaacggtcaattagcaagaggtttgtaattttagtttaatgttatagtatcctacttagcaaagatataaggatgttatctgttcatcattttgaaccgaatccacatttgtgcagaattgatggtcaaagaaattgcttagaggtgtttttgcctagccggactgcccaagtcagctctctctctctctctccttcttttgctctctctctatgctatctactgccatgagaattgattcatagatgcattcaacctgtcatatgttgattcaaactccatttttatattctcaggtttacaagttgacccggatcctccgaatatgatcctctctctttgtatgccacatacaaacaccaagcatgtttgtctgagaggctaggtatgaacccaaggtcactacaagaggtgatgtaatattaacatggctcgtccaagcgatgatggcagttaagaagattatcaatcacgccttcacagaggtgcaataaaagaacaagcagttcataaagagaatcccaggaagaccaattcatctcgtggtgtagttcaagcaaacaaatgttttgtatcgaatcagctgcatcatgttacgagaagttacacatga

SEQ ID NO: 11983 - DNA, 583 bp, Arabidopsis thaliana columbia
ctcaacataaactacagaggagatgtatctcttaaggaccaatcattcaattacactgaaggggtcgaagttaaagacttgttgatggatccagatctgatgacgtggtcaatcttcgagaatttttgcaaagaaaatggagttaatggtgaagtcgaagcgaactggtacaaacttccacaagagaacaatagttcaacaagagttatcggcgccgacaaagatgatgggattagggagttaagtcgtgaggctgtgataggcggtgaagttgatatatacattgacaatgacatctctgtacctgcacctttttctcttcgaaatcgtgatgatgatgatgaagtcaatgaggaaggagtagatgatgacgaagagattgatgaggagactacagctgaaacaaatggttataatcaaggattacaagatgatggaaaagatcctataaaagaaagaatgcacgataatcctaggtttgaagctttctatgaagaaattcataatggtacagaagctgcggaacgtatggatgaagagagtacaaagtccagaagatcagttgtcgagaactgatgatgag

SEQ ID NO: 11984 - DNA, 846 bp, Arabidopsis thaliana
ttgtggaaatttggttgaggaacaaaattagtgatcttgatgatatttggtcggcctgaatcagattgttatactggctaacacgtatattggctcctctagttccaccggacaagctggtttagtcatgtagtagctggtacattataaatagcttatagagtccgtcttgtaattgtgttgttgagttagagtttcactgccttcagtagtgtatgatcgaagttagtacagtttgtacaatttcaaaatgtgaataaatgatgacacccttgcggatgacacaactttggttatcaattgtgtaggagatatatggtcagggtctgagggaggtgctcttaaagtttggccctgggacggtgctcttgggaagtcgctttctttgaagatggaagaaaggcacatggctgcgttagcagttgaaagatcgtatattgaccctaggaacatggtttcggccaatggatttgctaatacattaacgtcagatgttacattcctagtatctgatcatacaagggcaagagtatggagtgctagtcccctgacgtttgctatatggtaaaatggagagtcatatttctgcttttcttatgcatcatcctttctttttctaattgatcatccagaatataccagcattactgcaataaacttaatgggaattaattacttttgtctacaatatctcttgtcacttggatctgtagtttttcaattgctagcaggaaccattaagttcatgtgtatagctcagtactttttaaattttatggttctttatgcagggatgctcgcactagggatttgatcaaagtattcaatattgatgggcagctcgag

SEQ ID NO: 11985 - DNA, 614 bp, Arabidopsis thaliana columbia
  unsure (1)..(614): unsure at all n locations
gaacaagggccgatccatgtccattcgaattccctgatgcacacaacctgtttgatgtaatgcctatcttctaagaaacacaaagcaaacatttttcttttgttgctgcatttttgtgaaatggcagacaaatggattgtagcagctctgtttggatccgttctgcttctacgacatgatggtgcagctttgtgggctgtgattggatcggtttcaaattccgtgctctcagtagctttgaaacgtatacttaaccaagagagacctgttgctactctccgttctgatcctgggatgccttcttctcatgcccaatccatttctttcatctctgtgttttctgtcttctccggtaaacaatcagtcacaatgctcatctgtttcttcccttgcatttgatcaactcttaaagatgactttattactcttatttccacagttatggagtggcttggaaccaatgtactctctctgttccttagcggcttcatcctcgcattgggttcttatttcgtaagtcttcacatcagtttaggacatgaatcaagttaacaattatcgttgaaaacganatattgacactgatgttttattttggggtatagacgtggtta

SEQ ID NO: 11986 - DNA, 607 bp, Arabidopsis thaliana columbia
acctataacaagacatttgctagtgaaggtcaatagttattggcatacctcttattatgtatagtggcagaactttgacccaaattcttagttattctgcaccattcatgtttttccagggaagacggtttaatctcagagcatattaccatatcattgcacctaatctcaatgtcagagaatctggtgtccagaggaactgcaaatttgtatagaattcattatgaaagtttcacaataaatctcaaattaaagtgaattcgtcaatttagaactaaaaatgagaatttgcaatcaattagagaaatgagtaagcaccacaaggaaacaagactgacccagtttggcccatgcatcatcatcagagggtttcgaaccagaggattgcccagtttccgccgtcgtcgtcatcggacttctggaatcaaatgtcatagttcatcaccgcaaataagagatttcaacagaaactaaaggaagtctcttcgcgaggaagaagatgattcgagaaagagagtgataggcacgattcctattttggtctttagggttcacatctgtagaagaactctccatttttattttttaggaaaaggtttattggtgt

SEQ ID NO: 11987 - DNA, 554 bp, Arabidopsis thaliana columbia
cagcccttttttcgtatatcccatatcttaagatttgtgtctagtgagcctgacgcaaaaaactcaccaaaagggtggaaatccactgagatgcaattggacctgtgaccagtgagagtcctgacaactactcaacaaagcaagtgaaagaacacgtaagtactcacagaagtcaaatcgagtccaataagaatggtctcttggaactacaaaacttactctttgcctcctctaaatcccaaagtttgatagtaccactagcagctcctgctgcaactaagacctccgaagcatcaaacgtcactgaatcaattccacttgagtgcccatacaagctctgacaacaaacaagcacaaatgagatactcagaaagagtgaatcccatagaaacactctactaacttataaccaacacataatgaaacagtagaccgagaactgaccagaatggcattgggcttaccaataggcaaagattgccttgtgatcttcacagctgttacagaacctagaagacttcgtccgatcttagacaattgcagcagcagaatgt

SEQ ID NO: 11988 - DNA, 505 bp, Arabidopsis thaliana columbia
gaggatacggccgctgtgctctaaagaagccgtttttcgatatcagtaaaatcctgctgaaaaacggttttcactgccgttttatcaccacggttgatcgccgcagctaactgaccaatgccagaatcgctgccgaaacgatagcttttttgcagcaggcagagactgtcgcgcaaagatgccgcttctgtgccggttcctgccggaacgtgagtccccgtcaggcggcttagctgcctggcacgctcggcggtaaagcccgcgttggcataagcgcagatatcgcccagcacagccccagcctcaaccgaggccagttgatcacgatcgccgagaaagatcactcgcgcatgatcgggcaaggcgtcgatcagtctcgacatcataggcagatcgatcattgacgcttcatctaccaccagcacatcaagatgcagcgggttaccggcatgatgacgtaaacgctggctaccggctgcgcgccagcaatcggtgcaaagtgctg

SEQ ID NO: 11989 - DNA, 498 bp, Arabidopsis thaliana columbia
ccctggggttgcttcggctaggttcgtgactgagatactttcactctacatattgtctgctttagttattgtctggtttcagttgagtgaaatataaaaatatgcatttttaagttcaattttggaaatgagaaggttttgtcttgtgatatagtagtagaggtgtattctccaattttcatgtttgtatctcattctcattaccataacttcttgtgcagagaagaaacatcaacagtttctgaagataaggattatgggatatcaaattctgcaactggagctgagcctgtggtgcactcggatcacattgtcccacctgtagaagaagtaccgaagcaggaagctttatcaaacacagaaactcatcaaattgcttatggtcaagaagctccactcagtgtgtttggtcttgtccctcgttgtcagcaataggccaacccgttaacacagaagcagcggagactcaggtatgtggtatatcttgtcacagtatat

SEQ ID NO: 11990 - DNA, 573 bp, Arabidopsis thaliana columbia
gaagcgattccacagagtgaaaaatccaaacttgttgatgtagatcttcctataccagaacctactgcttccaaaagctacgtctgggttaatcccaaaagccccagagcttctcagctccgtagaaaatcttacgattcgaggtactcttctcttatcaaactagctgagtctcttgacgcgtgtaagccaaacgaagctgatgtttgcgatgtcattactgggtttggtggtaaattgtttgagcaagatgctgttgttactctcaataacatgactaacccagaaactgcgccacttgtgttgaataatctcttggagacgatgaaacctagcagggaagtgattctctacaatgttaccatgaaggtgtttaggaaaagcaaggatcttgaaaagtcagagaagctgttcgatgaaatgcttgagagagggattaaaccggataatgcaactttcactacgataattagttgtgctaggcagaatggtgtcctaagagagctgttgagtggtttgagaaaatgtcttcttttggatgtgacctgataatgtcctatggctgtatgatga

SEQ ID NO: 11991 - DNA, 576 bp, Arabidopsis thaliana columbia
gacgcacacaagctatctccgtgttaagctccttcatgaggctgtggagccaccggaaaactggacggtttttaagcatcgccggaatcattccaacaattggaaaaccggtgggtcctggcgggagaggatgcaacttcttgtttcgtgaagatgactttattttgttgagaatcatcaagaagcaaagggccgcaagggcttgaagcgttgtgaggagatacatgttggtaaacgacgacattccgagacttgacttggtcgtgagatccgaagagtttgaagctaaagtatccatttgcaaggaagaaggagaaggagaaacaattagtatgtgttttgtaatatatgctaattgtttctgcatggatccttctttcacgttgttatttataatgtcacattaattacaggtaggtacgtgtgaaatgacgatagtacccgcttttgtggtgggggaggaagcagtgtggaaggtatagctagagttggaccacttggtctctagtgaggagtgtcacatattttaattttgtaggctactttcaaaatgtcataaagatataacatgtatat

SEQ ID NO: 11992 - DNA, 566 bp, Arabidopsis thaliana columbia
ctcatgattgtcgtcaagccaacatcgcctatgcagccatagcattgtgagtctaagaagatgtttgaggatttgatgtttccatgtatgaacttcccttcgtggattttagctagccctctcgctgcaccggttgctattcgcagtctagcatcccaatctaacggtactcgatgataccttcctctgtttcctgcaaagaaaatggaaccttgtagtttcgatttatcatcagaatgagagcaatgaaaataactaaccgtgcagtatttcgaagaggcttccatgattgtaatagctataaaccgcgagcttatcgtctttggagtagtagtaagcctttagctcagctacattttcatgtctgatcataccaatgatctccatttgttgctcaaactctcgtcttccaacgacaacttccttcaatcgttttacaacgaccgtgctcatgtcctccattgttaccttataggttgtaccaaaagcacccttcccaaaacttctgcagatgagcttacaaatcatctaaatcaaataagtggtttcttccccaaagaagatga

SEQ ID NO: 11993 - DNA, 487 bp, Arabidopsis thaliana columbia
ttccttcagagttgactctgatgttatctctcttaatggccgtgaacccctccaggtatgaatttttcactgatgacctttttcatatgtttgttcaaattaacggaccggttaactcaagtaaactagaaaatgggtagttactagttacgacatgactacatgtcattttgggattcctttttgcctatgtaaatctataacaaattttgagttttgtctgagttcctttttcagaagtcaaaaataatcttcaaagtgacgtgttacattattcacgcagaatttaataattagtacaatataagaaatatcaagttattaactatagtctagttgaattttcattctttttgtaccgattcggttatatccggtttaaatcacatcgactcgaaattcatcacctaaaaatatggatttatctttcattagaccgatgcggagataggagacgacggaaagctacacgtggtggttcgaagat

SEQ ID NO: 11994 - DNA, 591 bp, Arabidopsis thaliana columbia
ctcaagtttatcactcgctatacccttagtggcaaagcttggaacaacatgattgaaaatagggtatgtgtgaattaaaatcttgattctaaaaccccacaaaatatatatattgacattatttgttttcccttcttgtgatctaagactgcattcacgaccaagaaagactacggtaggggagaaagggaggctcaatgggctctagctcaacgtacgctccatggacttaaaccgccggagtcaatgttcgaagacacggcaacctacaccgagctctctgagatcgctgaacaggctaagaaacgtgcagaagttgctaggtatgtaaaattgatcactctgaaagatttataggtaaacatttttctacaagattgataagagttgtgttgtgttgtgttgtggtgcatgcaggctaagagaagtgcacactctcaaaggccacgttgagtcggtagtgaagctcaagggtcttgacattgataatcttaaccaacactacaccgtctaagccaaactactatgacatttcaattattcgaatgggacacatgacaacgttctaagcaataaaagttggagaaaatg

SEQ ID NO: 11995 - DNA, 270 bp, Arabidopsis thaliana columbia
ttgacagctttatcaccccacgacacaggtaagaacgacatcgatgtgcatcatccgacctgtagagattgtgaggtgcaacagcgtagtgaatggtggcagcaacttgtgggcggaaaacggaatattcctgtgcgctctcgagatgcggatgaagatcggattgaacgtgttgaacagtggagaggagatcttggccgctatggctcatcagatgcaccatcgtgccagatagacgccagttgtatcgatccagctgaggttttagga

SEQ ID NO: 11996 - DNA, 565 bp, Arabidopsis thaliana columbia
actgttagtcctgctaatatgcttttattgactatgataacagctataccatccaaagcaaacactatacagaagagtatatatactctttgatataatatctgttgtaatcttagactagccttttctctaaatattcgatagttatcctgttgtatgtatatatagagatgtaccctgaacctaatcaatacaatgatccattgatcagctctctacatggtatcaggtaaaacaacaaacccaagcatcttgtagaagaacccagtgctcatgcacaagggataatggttaaacacaaaatgtagacagcatcctctatcctaaatctacaagagtaaccagtccaatactttccaaacatcataagccaagaagcctaagaattcaactaaagataaaggagttcttcctaaataccaattcaaacgatagtgtttaaactctttctcttgacaatattcaaaaatcagagaacttgcctggaaattatgagcagcctgaggatcattagggtttttatctggatgcacttggcgtgcctgtagaaaagagacaaaaaaaa

SEQ ID NO: 11997 - DNA, 547 bp, Arabidopsis thaliana columbia
gcggcaatatttatggcgtatcattcttacttgtggctatcaaatgtgtgaagagcggtgcttagcttccgtagatcgaataatttaacagtcttgtcagttgatcctgttgccacaacccactcattaaatggattgaaggctaagcagttaacctaaggcatttcaaacaactcaacaattagcaaatacatacgaggcaatatgattcaatggtttttagtgttaaggaaagcaagcttaaaaaccagaagtattatctgtatctaaagctaatatattgcaaactcacctccatcgaatgagcaaccacagactgtactggtttactggcagatggagaacgcagatcccatatgagaaggtattggtcatctccaactgatccaaacaggtactcatgtctcagatgccatgcaacatcttccacaaccccttcatgagccttaagttcagaaaataatcatcagcaaggaaaacacagaaaccaacctgaatatctatctatgagctttcataagtgtaactgattccgttaagtgggtgc

SEQ ID NO: 11998 - DNA, 507 bp, Arabidopsis thaliana columbia
tcaagttcatgttatattaagctcatgagatttacaagaatattggaatacatacgtccacatcgcttgccagcagggcggtttcggatgttacagcgtttaggaacgccgattgcgattccaggattgattccggctttctttgctaaaggagagagcatgacagcacaaagacaacgaggattggttctaatgagagcaccaactttggcacagcaaaccggtggaaccttacccctcgggttctttgtagcaggcaaacacgggcttaggctagccgcggcttgattaattggcatgcgaccacacatcactgccagctcaacggaagcaagtgagatcagaagactcatcaaagccactgcaacaaacttacaacacttcatgcttcttcttatattctccttcttgttttgtcttgttgagctgcttacttagtgcgttgatgattcttatatacctagtactagtaagatgttttagtggggtggttgtgtttggtgacgt

SEQ ID NO: 11999 - DNA, 479 bp, Arabidopsis thaliana columbia
ataaaaaagtactagtatcacaattgctttaacttcgttcagaaacagtaaagagaaacgactagtttggttgttacctctttgatttcttgttagtatcaaccttcgaggtccgggttttcttgttagtatcaaccttagacgtcgaggcttcttcgattcctcccctgtgttttctttggccgagtatcttcaatgtctttaagcttgtagtaatgaggagctatttcaattagccactcaggcttcatttcagttgtatgcctcatatattccttggtagtaagtactagttcatgatacaccaaccacttactaggtgacgccccaaataagcctgagttagggtgtacataaactgtctgaggttctttgactcttctgtacgatccattcttttgtaactttgcagaatgcgggaagaatccggccaagattgctttctttattgcgtctaaatcattcgggttggaagtaag

SEQ ID NO: 12000 - DNA, 423 bp, Arabidopsis thaliana columbia
ggccctgatatgaagcatctgacatcagcacattttgtttgaacccagatgtgtaccgaggtcgtagaaatatgacatcatgtttgaggacatctctggaagacaacaatgattgggttttatctgatgtcacaaaggaatctcagagttcgcccggagttgccatatttggcacaggtcttcagaatgaagttggcgaatacaattgctttttaaatgttatcatacaggtaatcttcacttctcataaactgtttagttttttgggtatcaatgtctataatttccagcttaaaagttttccgttttcctatttatacttgattttggtatgattgtagtctctgtggaatctggggatgtttcgggctgagttcttgcggcgtcaacactagagcacatcactttggagatccttgtgtt

SEQ ID NO: 12001 - DNA, 511 bp, Arabidopsis thaliana columbia
cagacaggaaaatgaagataaacatcacggatgcagcagtcgatcttcttggaagcctagggtatgatccaaactatggagctagacctgttaagcgtgtgatacagcaaaacattgagaatgagcttgctaagggtatcttgagaggagatttcaaggaggaagatggcattttgatcgataccgaggtcacagcgttctccaatggccagttacctcagcaaaagctcacattcaagaagattgagtcagaaacagcagatgctgaacaagaagaagcagctttctcaaaatagagtagttgaaaatgcaaccttttggagcccaagaagattcagacttttcagtacagaacttctagtgagttacttgtcacaaaagactgataatatttatctcaatgtgagagtttatataaatcataagcttatgagtcattgtactgatgtctcaaaggtccagaggttatgaaaattgttgatcataatttgactgtatatgaatgttgaag

SEQ ID NO: 12002 - DNA, 572 bp, Arabidopsis thaliana columbia
tgcagttaggcatgttcttcttagacaggtcagttcttcacagtggaaacctgtttcttgaatcacattctacctagtgagatcttgtgtaacctgaatctggttaatcacatgtgcagggtgtgcttggtctcaaggtgaagatcatgcttgactgggaccccaagggcaaacaaggaccgatgacaccattgcctgatgttgtgatcatccatacaccgaaagaagatgatgtatacattgcacctgctcaggttgttactcaagctgcttttgtaccggaagctccattaaccaccacagattatccagcaatgccagttgcttagagagccttttcgttttctggtttaaaacccaatggggatggttctttttttgggacagtactagttttctcatgttattctaagttaatacttaaagttctggaggttgaattacatcaaggatatgaatgtatgtttttcgttatcttttgtttaaattttatttatctattaacgatttgtctttttttaattagaaaatttgtgtttatcgcaccaagatcttgcttgtggcatgttgat

SEQ ID NO: 12003 - DNA, 591 bp, Arabidopsis thaliana columbia
  unsure (1)..(591): unsure at all n locations
cttccaatgctgactctgtatttcaacagctagacaaactacgggcagtttttgaagaatactcgaaactaactactgaaattattcctctcgctgagaaaactttgcaagagcatacagaagagctgggtcagaagtctgaagctcttgatgatgtgagttggggatcacttgtaatttccttggatagaactgattcgcagctgcaaattctatcagtttctttacaagtgcaaagtgttgctgttttctgcttgctctgtttcctcttaatcctgttgtcatgcacatgagctggaatttttaattccagttcatagcatctcaaatcatatatgtgtatgtcttcaggtattaggaatctctgcacagataaaagctgacaaagactcgattgaagcactggtgcagcccctcgaaaatgctgacaggatctttcaggaaatcgtatcctaccaaaagcaaattgaagatcttgaatataagcttgattttaggggtcttggggttaaactatggaagaaatcaatcagaattaagtagcctcanagcagcaagtaagtcgtctgaatttatgcagggtagacatat

SEQ ID NO: 12004 - DNA, 625 bp, Arabidopsis thaliana columbia
aaaccggttttaaattggttctcatcagttcttctttgtgagattaatgtcttgaggaaggagagtgtagtcgatgtgaaggtcctccaacattctcttaatggccaaagaaagttcggttcttctaagattcctctctctgttttcctgaaacgtgatggtgtggtcactgtatagggccatcttcagcttgttcatgttctctatctccttcaccaccagcgagtgaaccggtgcccaatgttgcgggttctgctccaagtacgtgatccacaaaccatagatactcattcagagacaagatctttaggctcagtggttaacaaaacagattcaaggtacttactcggcgattctttctttgagatgtgctatcttagagactggtgtcgagaaagagatagagaattccactgtttctcccatattcggacttctgaagtaattgcttatcggtttcgtggccaaaacagcgttcggataatacacgttctcgttggtaagcttcaagaacactgtcgttaagagattcatttcttccaccagcatctgaaaaaccgcacaagaatgtgtctgtatagagtataaaacatatatatgagtttaaaggatctttgatgttgaa

SEQ ID NO: 12005 - DNA, 555 bp, Arabidopsis thaliana columbia
ggataaggcaaatatttgtcttgttcattccttcttcaatactgcccgacctgaagaatgcctgaaccatctctgttatctgatcccccatagtctcccaaaattgttggtataagaacccattcattccatcaggcccggggcacttatgagggttgatgctaaaggtagctctctgaacctcttccttcgtaatgggggcaagaaggttattattcatttgatcagagactaaaggcgtgagattttctaactcctcaaccgtgtaacctacatcctccgatgcaaatagcttcttaaagtaggcctctgccactcttccaagatcttcatcggaggtccattccctaccctcttcatcaatgagtttctggattcgattttgggctcttctattcttggtagccgcatggaaatactgtgtgttcctatccccattcctcatccacataattctgctcttttcttgccaaaactgttcctcattattatattcctgactcaattccttcttcagtctcgccagctcccttctatcaaaaggaatttgtttgg

SEQ ID NO: 12006 - DNA, 571 bp, Arabidopsis thaliana columbia
  unsure (1)..(571): unsure at all n locations
nnnnnnnnnnnnnnnnnnnnnnctaaagattcagctgtttgctgaaaatcgatgggtttgaaaatggcgttgctggcgtgaaattcaccaccgcaaagaaacgcgcggcaatggggtttctctttcagcgccagaaaggtatttagcgaataacaaacggcggtaaaagggatttcattatcaatcgcttcaataatccacggtcgtggtggtgccacagtcaaaaaagagggtctgatcgggttctaccagcgtcgcagccagttttgccgcccggcgtttttcttccaccaggcgggatttttgatcgcttaacaggtaatggctggcactgcgcggttccagaacaatatagccgccgagcaaaacgacgggcgcactgtggttgttcagatcgcgacgaatcgtcatctccgaaaccccaagcagggcggcggcgtctttaagatgtaacttatcgctgcgttttaattcttgcagcagctgcccgatacgctcttcgcgacgtgtttccataatccctctgaatagttattgaagcgagctgtcaatactacactttttagcagag

SEQ ID NO: 12007 - DNA, 874 bp, Arabidopsis thaliana
tgtgaagttgaaactgtaatgtcaatgtagattgagtctcattgtccgtatgttttattgttcatgattttggaaataactctgactaggttatgttcagtaggacaaagcaactgtcgaaatggaatgcatggaagagggctatctcgccaagattgtaaagacggaaggttcagaagaaattcaagtcggcgaggtatgaaaattgtctgcattctgcagagttatgtattgtcatggtttctcatggggctacgggtagtgatattaggatccacagtccatttgtggaaatgttaattgaaattatttggataatgtcatttttttttgctttcaaataggtaattgctattacagttgaagatgaagaggacattggaaagttcaaagattacaccccatcatctactgctgatgccgctcctacaaaagcagaaccaactcctgccccaccaaaggaagagaaggtcaaacagccatcatcgcctcctgaaccgaagcctccaagcctagcacacctcccacaggagatcgtgtttttgctagtcctcttgcaagaaagttggctgaagataataacgttagtttcacagtgttctaaatattctgttttttcttattattcctgcttaatttttcttcttgtttactttatttaaaaaaacatcaggtgcctctctcagacatcgaaggcacaggtcctgaaggacggatagtgaaggcagatatcgatgagtatttaggtataagtaactccatgactcgtcctttcctttctttttctttcagacctttcttgcctctgtttacagttatcactcatccttgtgtcgtaatacatcttccaatggtgcagcttcaagtggtaaag

SEQ ID NO: 12008 - DNA, 611 bp, Arabidopsis thaliana columbia
cgagccggtgagggcagagatcatcaaaggctgcccatttctgatcattccgatcaaaccagagtacaaggtctcgacccaagagctggaacggggttggcacattcggatccaaatcctcaaccaaagaaactggataccaatgatctctccacttaaactcagacccttcttcttccttatctccgccgtattcttcttcgatccgcttctcctccgtcgaatccgaagtgggtacagacggcggcgccccacgcgtaaagggttgtggaaaagtttcgatcttgatggagaaattgagacctttaatgggaattttgtggtgggagataaaaagggaatctttttggattgggatttggtgattgttgcagaagtagaagagagtaaaactactgacatttttctagtttggtttgttggattttgatgtttatttactcttctgatgaatcttatttcaagctacgagaagaacgaagaagaagaagaagagattgcgtgcaagtatgcaatttttccgtggacattgataccatttgttgtcttgtaacgagaaactatgaacaaatggatttacacgtggaggattttggcacattgcaaatatg

SEQ ID NO: 12009 - DNA, 705 bp, Arabidopsis thaliana
tgatcccctcagagacttgttgcatttcttctaattagttacaacttttgcaatctttgctagtataaaaatattttattagaaatatgtaaaatttgggaaagtattatttcacaacagaaaaaaaaaaagcatagtacttttcaaatatcgaccaaccttctgattcgttgaatccgtttctcgaatattataattttatttttgttgtttgccctatctttctttctccctctgctcttgtgcaacttgatccgtcgtcttctctcagctctccatctccgtcttccaaggtttttgtttttgctatttacgtttacagattcgtaatcctatcctggattgagaaatgcgtagtttgatgattcttcgctcgcctctttgttgactgcagttttactgtcaggtagaagaatccatgtcgatttacgtcgcgtcgcgacggctctccggcggaacaactgtgacggcgctgcgttatgccacctctctgagatcttattcgacctcgtttagggaggagagggacaccttcgggccgattcaagttccttccgataagttcgggatctgatctttacgcaacgtcgaattttcgcttatcctcgagggaaacgtttcacagtgttttaattgttgtgtgtctcagattgtggggagccagacgcagagatcgctgcagaacttcgaaatcggtggtgagcg

SEQ ID NO: 12010 - DNA, 510 bp, Arabidopsis thaliana columbia
tcctaaaagcagcagtcttcttatatacgaaaccaacatccttataatactactaggccccagcacactgaattatgaactttgcgcctccaggagggtcaaggcagaattccattcctatctccttcgtctggtcgagaagggactctgactcttctattactacagtacagaggattagtcccattttttcgtcacgatcgatccacgtccgggcttagaaagctagcttactaaggcgaaggaccgctttttattgattgcacgagctaagaacagtattgcactgtatctctcgatatagctatcgtgtagatggagataagttccaggtgtaggtacacaagtgcaggaacatccaaccgtagggtgagagacatacttgttccaagggactggttatttccagtatagagtatagtagcaggacaagatcctgttcttctgcaagaatcatcacgaaggactctaacatcgcgactctcaggacgcgggatttgtacaaaggag

SEQ ID NO: 12011 - DNA, 603 bp, Arabidopsis thaliana columbia
atctactgcagagtaactggactgaggctcgcttggccattgaccaagcactaaaagcaacagctcctgagcatttcatgcactgtcttagagagcatgctgtgtttcagctaatcaacgagttgcaagcaacgggtgaattttcaatcaacctacaaatgagattactcaactcttatttggatcgagcaagttctttacctgtaaaagagccactatcttggaaattcattagcaacagcgctgagaaaccaagagtcaggaagctagttactaaccttctggctccagtttcatctgaactctttgtggtgaatgttgttcttgaagcatggcacggaccatctcttgtacccgagaagctaagtaagcaaaaggaactggtggattttgtggaaacaatcttagggttggtccaagcaattacccgctggctttgtctgtaagtaagctgttaaggaaagaagagaaacaatcagattctggtcctcctcgggtattcatttctgggcaggtctgaatttggcgagtacaatatcttgtgccacccagtagctcggagtatatttgggtggaggctggagaaatagtgagtgatacaat

SEQ ID NO: 12012 - DNA, 531 bp, Arabidopsis thaliana
gtgattgctatcacagttgaagatgaagatgatattcaaaagtttaaagattacacaccctcatccgatactggtcccgctgcgcctgaagcaaaaccagctccttccctaccaaaggaagagaaggtagagaagccagccagtgctcctgaagccaagatctctaagccaagctcagctccttcagaagatcgtatttttgccagtcctcttgcaagaaagttggctgaagataataatgtcagtttccagacgaaaaatattagttaagctcgtgttagatctccatctctaatttgtttttcctacttttcctttgaaaaacattaggtacctctctcaagcattaaaggcacaggtcctgaaggacggatagtgaaggctgatgtcgaagatttcttaggtatcagaaatccttggctcttccctcttcttacattttcccctctcgttacagaatttacctcatccctatgttctaaatttctaatacatcttcctatggtacagcttcaggcagtaaagaaacta

SEQ ID NO: 12013 - DNA, 468 bp, Arabidopsis thaliana columbia
ccccatccttttgcaagccaagcaagacatcaacgaagtcattttcctctccattgagattattacccttcttcatcttgtgtttctcaattattccgccgacaaaagtgttgacttcagagaccaaagctctacacctcttcctcactccttggaagtcaaaccaacgaagaaaccaaaagtgatcactccagttaaaaatcccaagcaactcgtagccttcactcaccagcctctccaaaaaacacccttttccattaacttcatcaaaatcgtagctttcaccaaacactgtcgtcattacattattcaaagaaccaaagtgaacgatctttttcacttcaacttcaccacaagcatcagacgtaacaaggcttttaatcttcttgaccatcttcataccgatgccaactctaacaccctcaaaactcgcgattcttcttggactgaaaagatgagtggaggaga

SEQ ID NO: 12014 - DNA, 504 bp, Arabidopsis thaliana columbia
gcaagtattagcatttatgaggaacataagaaaaccgctttgcatcgaggtagataacatgaacaataccaggataaatttcttgacatcttttcctgatgcaatgttcctaagaagggtcaaaccacgattgatttcaatccttaatccagaaacaagttgaagaataggatcttcagggatgtgaacttccgggatgtgaggagttgacctgaggataagaactcagttgatcaggcagttatctcatacttaacacttaacatataagggatgttgtaagaacatacttgtggatgaatgtacaagcattagaccacaagaacaatgctgcaagagcaaaaatcgcaaagtgacagagaaaagcgaggagatggtattcgaataactcgaataagacccaagacgcagttacagcacccaagactccaccagataccttcttgttcctccaaaggaatatatcagcagctacatgcaaacaatgaatccagattcaacata

SEQ ID NO: 12015 - DNA, 897 bp, Arabidopsis thaliana
tttttccttttgaaatgtaattgcgcttttactgttttaaatttggtaaaatgtgaaattaagtgatcatttttaagtttttaatgataccttaaccttaatcacgtaatcacttttatatgacaacaaatccaagcttttgaaaaaacactaactctccaacgaccgttatgggttgctccccctccaagctcgacggtttaccggccgtatctctatgccgtgaccgctgcagctcactcgaagatacgctccggcgaactacgccttagccgacgctcactcagcttatctcctttctctgaacaccgtcggtccagctctccatagattcttccaacatgccgtcgagtctccgccggatgttgaatccgaagctgacgaatcaccggagacgtattctccggaatcctgttcctcggctcactcggttaccagttctgattccgatttgcctcccaagttcgattcggattgtgaggaaggtgaaggtacgaattgcgatctcttaagcggttcaaaacctgaatctctaaatcttaatcatgactcgttctactcccggagatacgaatccggcaccataacgccgcctcctccaccgccggctccgagtaattacgcttgggattttatcaatttcttcgagagctatgagcttccgtacactacggatgtcaatgatttgaaggatagagagaccactccttctcatgaagaagataagttgaagaagaagaagattactgtgagccaaaacgatgagaagattaaagtagaagaagagaaaaaaactttgagaatctcagagaaaaataggaagcgtgctcctaaagaatcaaaggatcaaaaagtttcatcagatttatctgaagtacaaagcaattgcaggaaatg

SEQ ID NO: 12016 - DNA, 447 bp, Arabidopsis thaliana
atccccatcttggtttttagaattttaaaatggtgtctatgaaaagaataagaaaaaaaataatccaaaagtctttaagaaaaccaattcaacattccctgaaaaagaccaccaaaccggactaagaaaagagtaaagaaaaaatgtttgattcagttccttaaaggaagagcagagagatagcaaagcatcaaaaacctaaggctcaacagcagtaacttgttcccactctccatcaacagcctctttccacacagtcacgttgttgttcccatcggatacggccaataagttaccggtcaacgaccacgagacccgccacacaggagtcataaagtccttgagaaccttaccttcccattgctcaccttcttttccactgtccatatgataactttcccatcttgggaaccactggctatggtggacttggggagaccaagtttg

SEQ ID NO: 12017 - DNA, 586 bp, Arabidopsis thaliana columbia
agtaacgaccgccagtgtgctgtaaagaatgcacaggcagtgacgaccattccgttctggcattctatggaaggggaactgggtaaagaggtggattctctggcccaacgttttaacgccgaaaacccggattacaaaattgtaccgacctataaaggcaactacgaacagaatttaagcgcggggattgccgcatttcgtaccggcaacgcgccgggtattttgcaggtttatgaagttggcaccgcaccatgatggcgtcgaaagccattaaaccggtgtatgacgtgtttaaagaggcagggattcagttcgatgagtcgcagtttgtgccgacggtttcaggttactactccgacagcaaaacgggccacttactctcccagccattcaacagctcgacccccgttctctattacaacaaagacgccttcaagaaagcaggattagacccggaacagccgccgaaaacctggcaggatctggcggactatgccgcgaaactgaaagcctccgcgatgaagtgcggctacgcagcggctggcagggctggatccactggaaaactttagcgcatggaacggtc

SEQ ID NO: 12018 - DNA, 1359 bp, Arabidopsis thaliana
gatcttccaatgaatttcgttaaaatttgctagacttctatcagcgcctgtagatcgatttaggttatgtactctcattcacatcggtgggaagcgatcaatcttagaatccacgttttataatttctcgttttgatcttgtttttttcacaacttgtaaacattgcgatgttgattgtgttgattaatcgcttaaaattgaggtctgagtttaaataatccttgtgcttaccatatggtcttggctgtgataatttgttaattgttctgcttaataatctaacactttgcttcggttaatgtctggatcaacatgctcatggttgtgttccctgttgatttgtattgtaacagtgaaagcattcaggaaacatgcctcctcagaagattgaaactggtcatagcgacactattcatgatgtggtcatggattactatggaaagcgagtacaactgcctcgtctgactgcacgatcaagataaccggagtaagcaacagcggtggatctcagcatctagctaccttaaccggtcatcgaggtcctgtctggcaagtcgcttgggcgcacccaaagtttggttcacttctcgcttcatgttcctatgatgggcaaattatattatggaaagaaggtaaccaaaaccaatggacacaagctcatgtcttcacagaccacaaagtatcatgtcaactctatcgcttgggctcctcatgaacttggactctccttagcttgcggacatcttgatggaaacatatcagttttctcggctcgagctgatggcggttgggacacgacaaagatagaccaagcacaccctgttggtgtcacttcagtgtcgtgggcaccggccacagaaccaggcgcactcgttagctctggtatgatcgatccggtctacaaactagcatccggcgggtgtgatagcacggtgaaagtgtggaagttctcgaacgggtcatggaaaatggattgtttcccggctctcaacaagcacacggattgggtccgtgatgtggcttgggcaccgaacttgggtctcccaaagtcaaccatagccagtggttcagaagatgggaaagtgatcatatggaccatagggaaagaaggtgagcaatgggaaggtactgttttgaaagatttcaaaacaccagtgtggcgggtctcgtggtcgttgaccggtaatttgttggctgtttccgatgggaacaataacgttacagtgtggaaagagtctgttgatggagagtgggaacaagtgactgttgttgagccatagattgttgtttgtttgtttggttatcttttgttttgtggtaatatccaaaatgtggtgtgttctgtatacaatttctag

SEQ ID NO: 12019 - DNA, 440 bp, Arabidopsis thaliana columbia
  unsure (1)..(440): unsure at all n locations
gtcccaggttgttttttcaaactttggggtagaattactgtaagcagctctggtctctctgctctcaatgcacctctgatgactgcagcattagttccagatgcacctgatgtgtatatatgatttttctgcaagaaaccgaattattcgagagatgttttaaatggatcggagtcaaacacaagaggatgaagttctaatgacttacggttataaccatggcgtacgtaagtatctcaatcagttcttgatgcatgaaacccatatttcttgtcccaaagaagccaattgatctaggaccttgctgctgtatcgccaatagctcctgtcgatttaaacatacacggttacaacaagctaaaagactcatgatattccaaaatctgccaatcaacaagtatagtttacaacataaagcgtaaagagtgatanntagagtt

SEQ ID NO: 12020 - DNA, 662 bp, Arabidopsis thaliana
tggaaacttctgaccgtccacgtggcattcaataagtaacacatttgcttatgacatatcccctaacttcctcgcttcttctccacgactttttcaaacttttcaaaacctccctataaacttcagatccttattcctcacaatattaaaccaaaaaaaaaaactaactttttgggactccagaactaataatggatcccataaaacacatctctttaccagttcttgtcttgtttctactattatccgtgtcggcgggtcaacccggaaccccggaccagagacatgacccgtatgcttacagcggcagtctaagtccagccatggctgttgtcgttgtagttgtcatcgcagctctcttcttcatgggcttcttcaccgtctatatacgtcactgtactggcgcagtagacggtagcgttactcctgcaggaggagctaggaggagagtgacgaacgcaacggttgcgcgtgggttagacgcggagacgatcgagacgtttccgacttttgtttactcagaagtgaagacacagaagattggtaaaggagcgttggagtgtgcgatttgtttgaatgagtttgaagacgatgaaacgctgcgtctgttgcctaaatgtgatcacgtgtttcatctcattgtatcggcgcgtggcttaagg

SEQ ID NO: 12021 - DNA, 544 bp, Arabidopsis thaliana columbia
tagagaattgtaagttaagcaaggatgttcctccacccaagcctttacgtgatggtaaatatttatttaaatgcttgtgtttttctccatgcggtttcttcataataccatttcatgagaacattacataaacaagctttttcttttcactgcagtaaatcagatactctccattcttcagaaacggaatgctacagagacatgttctgataataacatgcaaacatctgtgcttttgacaaaagtacctccagaatctgaaaccagcaaaagacacaaaatggagtctatttcaacgaaaggtaactccggaatttcaacctttttgacttgtaaagcttaactaaatccaagtataaatagttagcctttcagaatacaaaactgttcttatagtttttgttgggtttattgttgaaatctataagaatctcatcactacaaacaattctttgtttgcttatctgagttgcagaagcatctacggaacaagtaatggtgcaagaaacctcatcggccagcacaagaggttgcttaatgagtg

SEQ ID NO: 12022 - DNA, 591 bp, Arabidopsis thaliana columbia
caatctcaactgtaagaaaggtatgttgactttgtctcctgattctgcagagttggccattcttgtttttgtgttgaatcttgtttatgatttgcagactaatcttcctgttgaagagataacaaaggcgttggagaagaatggctttgaagtgataacatcagatgatgcaggtcgatttgtgtgtaactatgtctattaccattctctgagatttgcagagcagaataagaccagatcactctttgttcacgttcctcttttcgttgccgtggatgaagaaacccaaatgagattcactgtttctctgctggaggtactcgcttctatttgcaagtaatgttatcccaaatgtggctattcttattcatgaaatgtgcatcatggaccgattgtctccccacgggaaaaattcgcttatcaataaatggaatataagttcacttctctactatctcctcttcatatatgcatcattgcattcaagtttcataaactagattcattttcttcttcaaaagtggtatcaaatgaaaaatgatatatgcctacttgccagtggtgccaatgcaatgagatttggaaatatgc

SEQ ID NO: 12023 - DNA, 496 bp, Arabidopsis thaliana columbia
ggttgttcattctgaacttctgtctctttttccggggtctgctctttttgaccaaagcccagccaggaaaaaaagccacgttttttttctttcgccatttgcgactacactcctcgctgttgcttcatggcacagcgttaacgctatgtacatagcagctaaaaaaatgatgaaatagtctatcacttaacttaattcacatcaccgcctgcaagtatgtgttatctggcggattgagcaatttatcatgaaagaaccgaatcattccggcagcggccaaatccgcattattggcgggcagtggcgaggccgtaaactcccggttcctgatagcccaggtctgcgccccaccaccgaccgcgtacgcgaaacgttgtttaactggctggctccggtcattgttgacgcccaatgtctggattgcttcgccgggagcggcgcgctggggctggaagcgttatcgcgctacgcatgcgggggaacgttgattgagatg

SEQ ID NO: 12024 - DNA, 562 bp, Arabidopsis thaliana columbia
tgcttggtttacgggcaagtcatcctgggatgagaaggaagttcttcttgttatatcacgagtctcttggaaaaactttgttcgcgcggttgcagtatattattcaaattcaggattgggaagctttaagtgatgttttttggcttaaacaaggtcttgatctccttctagctatcttagtcgaggacaagccaattagcctggcgccaaattctgcaagggtactaccacttttgccttcagataatcctggaatacaacaccaagctcctgctaacttagagggtcccgaagaagttacttcaatgtttgacagcattgttatgaagcatgcacaatttctgagcgcgaccagcaaacttcaggtgattacaaatcatttaaaactttctttagtgttatcatgggtctttctctttgttattcctgatcgaaaatgttgactagattaccgtaagtccttaagcgctatatccactgatccatatgggttactgaataatcgttatcatatctgattctgaagttaaactttttgaatttcactataggtgctgatgtg

SEQ ID NO: 12025 - DNA, 561 bp, Arabidopsis thaliana columbia
gggtatgccctggagctgtggcataagatagtctcgtcaaaattgataacatacttcctcgatgaagctgtgcatcctactagtatgaggtggatcatgacccttcttggtgtctgtcttgcttcctctccgaacttttcccttaaatttcgaacaagtggaggttatcaggggctgctgcgggtacttcaaaacttttatgattccccagacatatattacatactgttctgcttgatctttgggaaacctgtttatccaagactaccggaagttcgaatgttagactttcatgctctagtgccaaatgatggaagctatgtggagttaaagttcatagaactgttggattcagtggtggcaatggctaaatctacttatgacaggttgatcatgcaatcaatgctagcccaccagtctggaaatctttctcaggtgagtgctagtcttgtggcagagcttatagagggggcagaaatgactggggagcttcagggggaagctttgatgcacaaaacatatgcggcaccgttgatgggtggcgaagtcacgtcctgctgc

SEQ ID NO: 12026 - DNA, 510 bp, Arabidopsis thaliana columbia
cgggagcttagaggagctcatcacagacaaaacaaaacttcaatggaagaaacgtattgatatagccacagatgtagcaaggggattagtgtttttacaccacgaatgctacccttccatcgttcacagagacgtcaaagccagtaacgttcttttggataaacacgggaatgcgagagtgacggattttggactagcaagactcttaaatgtaggagatagccatgtgagcacagtgattgcaggcacaatcgggtatgtagctcccgagtatggacaaacttggcaagccagcacaagaggagatgtttacagctacggagtattgaccatggaactcgcgacgggtagaagagctgttgatggaggagaagagtgtttggtcgaatgggcaagacgtgtgatgacaggtaacatgacagccaaaggttcaccaatagccctgtcagggaccaaaccagggaacggagctgagcaaatgactgagctactaaagattggtgtgaagtg

SEQ ID NO: 12027 - DNA, 541 bp, Arabidopsis thaliana columbia
taaaaaagtcaaaggtctgattttgaccaacccatcaaatccactcggtacaatgttggataaggacacactcacgaacttggtccggtttgtcacgaggaagaacattcacctagtcgtcgacgagatctacgccgccacagtcttcgccggaggagatttcgttaagcgttgctgaagtggtcaatgatgtggacatctccgaagtcaacgttgacttgattcacattgtctatagtctttctaaagatatgggacttcctggttttagagtcgggatagtctattctttcaatgactcggtcgtgtcttgcgcaagaaaaatgtcaagtttcggacttgtttcgtctcagacacaactcatgcttgcttcgatgttgtccgatgatcagtttgtggataattttctaatggaaagctcgagaaggttggggataaggcataaagtttttaccacaggggatcaagaaagcagatattgcttgtttgacaagcaacgctggtttatttgcgtggatggatttgagacatctactgagag

SEQ ID NO: 12028 - DNA, 457 bp, Arabidopsis thaliana columbia
gccatggagttgggtccctgaggccttcctcggagcattgggtgccaggggctgcccaggcttcctgagtggcccacctgggtgggaggctgccaccgcggcctgatcatgccctctgtgcccacacaggtctctgagcggcccctgatgttcctgttggacactcctggcgtgctggctcctcggattgaaagtgtggagacaggcctgaagctggccctgtgtggtgagccggggctggggctggggctggggctgggaccggggcccctgccaccccacctttagggctggctttggcacagggcccctagacgggagttgttactgcctttgacctggttgctgccagaccttcctcgaagcttagtgtgagagctgtaatagtgcacagctgacaggcactggtcaccattccaccctgccccatgagtggccttcctttccccatttgacg

SEQ ID NO: 12029 - DNA, 490 bp, Arabidopsis thaliana columbia
ctctagaggatggcaaaaaaagagagtggtgtttatatatatgaacctcagggcgaagaatccggtccatctccaagaacaagtccattaggctgcatcgttctgagctaagatgtgtgagaagttcattggcatgaagcatgtcatatgttcgaggatatgtcgggaatggttcacacctacgcagttgacaaaaacatttaagaatcaataaaaaaaaatcgatataattcttcagtttgctgcaaatgttgcttaatatctaaaaagatcttctttaaccattattataggtgacagaaggaaaaacatacactcaccagtcatgtagaacaccggcgaaaccacgatcaagtatgataggaagagtattacgtgcattgactgggacgacgttcattacccaagcagattttccttcgtcgagtaaagcggcatttaaatcccaaaacgagcatgcatgtccatcacattgcgtatcatgttgaaa

SEQ ID NO: 12030 - DNA, 452 bp, Arabidopsis thaliana columbia
ctggaatctgttttgagttaatgattgtgtaatgtttacttaggttgaagggaagaatgctaagcgtgaagctaaaagggagcgtgagtcgcagaaagcaaggagggaagtaactgctgaaatgtctgaagatttctctgaaggagagaaggcagatttgcctggtgaaatcccaactcctagtgataacaacaccaaaggaagaatgtctcggattagttctgttgatgtctttgagaattggtttgctcaacacaaagagaaaaagctttacatcgtgttaataaggtacaggccattacttgagaatttgtgtgtttgtagttggtataagtttgtttcacatggtggtgaataatggtagaaattgtcttgcagtcttcatggtttgataagtggtgaaacatggagcttggtcgcgattctgatactggtggccaggtatacttcta

SEQ ID NO: 12031 - DNA, 596 bp, Arabidopsis thaliana columbia
atcaccttatttcataaacatcttcacaaatattgaatcatattcttttttcgctgtataataagagttgttatagaaccaaagttgtaaagaaaaaaaaaatctagattctgtaaaatgggaactcacggaaccagataaagaaatttcaccggcggtcttacgtccccggcgggatatatatttcatctcttcctcctttcttccccgtatcgccaacacaagttggatgatttgattccaaaatgtgaggcattggaacaaaaaaattaaaaaagtggagaaaaacctgtgtctatgttcttcttcttcttcagattgattgtcgcttggtgaatggtttttggcagatgagaagtctttgttcactgctgctttcaacctctattactcgagcttcccacttcaactgcgttatcgtctctctcgccttttccaccagctgtgccgtgtcacggattatcacccatccctgtacaaagttttgtttattatagctaccagaatacaagaaacaataatgttctttacaaagtaaacagatgtgtactctggacgaagcaatcggtcaatctctgtgaatatatcaataagta

SEQ ID NO: 12032 - DNA, 492 bp, Arabidopsis thaliana columbia
tagtaccagtaacgtgcgtgctttaaagaacagcataaaacaccttaccaccacccaagaatttcatattgtattgtttttcaatgaaaaaatattattcgcgtaatatctcacgataaataacattaggattttgttatttaaacacgagtcctttgcacttgcttactttatcgataaatcctacttttttaatgcgatccaatcattttaaggagtttaaaatggataagaagcaagtaacggatttaaggtcggaactactcgattcacgttttggtgcgaagtctatttccactatcgcagaatcaaaacgttttccgctgcacgaaatgcgcgacgatgtcgcattccagattatcaatgacgaattatatcttgatggcaacgctcgtcagaacctggccactttctgccagacctgggacgacgaaaatgtccacaaattgatggatttatcgattaacaaaaactggatcgacaaagaagaat

SEQ ID NO: 12033 - DNA, 520 bp, Arabidopsis thaliana columbia
ctctagtctatcataggctttactcatgtccgttttaacttccaatgacacttctttgttgcacctgagtgttttagatagtgaagagcttcatgtgttattaggacattatcagaaatagcacgttgggggacaaaggccgattggttttcagaaatgcacttgtggagaaccggtttgagtctcttagctaaaagtttcacaataattttgtaatagacagaacatagagctatgggacggtaattagaaaccttttgtgggacaaggatttttgggatacgtctgacatgggtgtggtttatcttttgtggtaataggcctgagataaagaaggcttggatttcagaagttacctcatcacttatcgtattccagttggtttgagagaagcttgctgagaacccatcagggcttggtgctttgtcagggtgaattgaataacaagcctgcgtgatttccagagcagtaggtaagcaagtaggagaacattcatatcaggcgtgatacaaggtgagag

SEQ ID NO: 12034 - DNA, 556 bp, Arabidopsis thaliana columbia
cgtttcacttatgggacatggtttgctctttgcggcctagcagcgattggtaagacatacaacaattgtctatctatgcgcgacggtgtacatttccttcttaatatacaaaatgaagatgggggttggggtgaaagctatatgtcatgccctgaacaggtatttttatgtatcaacgcgaaatcctagtatatcgatttgattctcgtaaattttgaaaaagttgtaagccttataatatgttttgtatgcagagatacataccattagaggggaatagatcaaacgtagtgcaaaccgcgtgggctatgatggctctgattcacgctggacaggttcaaacattttcaatcttacatttgcatttttgtcaagtacaacgtaacaaagtgtcttgaaacctagcattgagtttcttctggttcatatataaaaatatatatgtatgcaatgtatacaacaggctaagagagatcttataccgctacatagtgctgcaaaattgagtatctcgtcgcgactggagaacggagatatccgcaacaggtaatttaaa

SEQ ID NO: 12035 - DNA, 560 bp, Arabidopsis thaliana columbia
cgtggcaactcaaaatgcactccaatttactctcgcatcatttcactctacgcggaacagaacgagcttcagtttgctgttcctggaggtctaataggagttggaacaacaatggacccaactctcactcgtgcagatcgattagttggtcaagtccttggtgaaatcggttcacttcctgatgtatttgttgaactcgaggtataaacaactcctcacaaccatactcttcagtctttatggtcctaatgggtctcttagtgtattttctccttttaatttgtggttatgtaaaatctgtaggtgaacttctttcttctacgacgtttgttgggagtgagaacaaagggatcagagaaacaagggaaagtgtcaaagctaacgaaaggagagattctgatgctcaacattggttcgatgtccactggagccaaagttgtaggagttaaagtcgatctggctaaactgcaactgactgcgcctgtttgtaccacaaaggagagacagtggctctaagcagacgtgtggaaaagcattggcgtttgattggttggggcaga

SEQ ID NO: 12036 - DNA, 570 bp, Arabidopsis thaliana columbia
ctgtaatgcaggcaaggaacaaaactgacggtgctaggcaaaaggcggctcaggaagcgtacaaggaacttgagaatgtgagacaagaggcattgcagagaaagaaagccgaaaagaagaaaatattggaggaggcacaggcaaagcttagctccgaggctctaaggaagaaagaagcaaaagaacgtgcacgccagatgaaaaagtcaatgccgaaagttaagatgagtcgtggtcactagaatcaagcataagggacacactgtcatgtcgtccattggaatagctactccctttttagtcctttcgattagatattttgaactttcatgaatctctctacttgcagttgatttttacttcattacgatttcccctatagtggcaccgaggccttacttccgataatcctccgggacctctttgaatcataagatgagttttgaagttataggccttgacttctttgttcactgaagtaacatcctttattctcagttagttatgcaaaaccaagtgttccaatttcagtattaatagcaaaagtcatatgtagtagagttataaata

SEQ ID NO: 12037 - DNA, 605 bp, Arabidopsis thaliana
tgatcgacgtcgaagacagctcaggtacgcacgaaacatgcatcattttgtagaaacgagtttcaaaaattttaactgatgaaatttcgaatttggcttcaggtcttttagagaatgatgtggacaatgaaatggaaactacaaatccttcatggaagtgttctcttccgcatgttctagtggctacaatttcgtcgtttctatttggttaccatttagggttggtgattgattttagcttttcttcttgaatattgttgtgattacttgtgttgagctattttttttggttgctacagagttgttaatgaacctcttgaaagcatttcgtctgatcttggttttagtggtgatacattagctgaaggtattttcattacttctcctgcttagtatttgtcatggcagtggtcatcacatgtactacttttataagttctgttttcttcttatgtgaaaggtttggtggctagtgtatgtcttggtggtgcatttctcggatctttattcagtgggggagttgctgatgggtttggaagacggagagcttttcagatttgtgcattgcatatgattatgggtgcttttgtgaggtaatttgggaa

SEQ ID NO: 12038 - DNA, 529 bp, Arabidopsis thaliana
ccagttaagaatgttgtcggaccaggtgggtggatcgtccacttcgtccttcatcttcctcaatctgacaaacgtccaatcagatgcacagaacatgataagagcgatgcaatccagagctattcctcctaacagcaatgcgtaagtaaggccaacatcaaatccactataatctttcttgctcttgtattgaaagatgcgtagagctgctgcaaggcatcccagggcaatgaacctgaagaggaatcctatccagttgtgcaagatctcggctttcgtgtatagagctgcgtagataaagttgagctcaacctctaagattcttaaagcttcttctgctttcagcgagtcaaagaatctcttgctctcagctcgttgttgaaatgtaaagatgagatcaaccacaagacctttgaagatattaaagtacttgtaggcgtactggagaatattgagtggagtgaaccgtcagaggctttccggagcatcgttcttggatctactcaggctcgcaaccttgataactgtg

SEQ ID NO: 12039 - DNA, 954 bp, Arabidopsis thaliana
tgaagaagccaactgaaggccctcaacaaatgattcaggttcggctttttccttgctcaccactgtttttatgatcgattcatgagcatgtatgtaatgacaggcatgttttccgttatgcttgatgttttcaggttgtcttgaataatgctactgtggagacggataatcctgatctcagagatcgtgcatacatatactggcgtcttctatccactgatcctgaggtgtgtgttaccttgatttcttatagctttctagtaatcaaccagtagagaatgaatatattcaggattggttattcaagcaacaagcaatttttatcagttgagctttctcttgagatgtatttggctgaactcatcatttctcttgattaggctgccaaggatgttgtcttagctgaaaagcccgtgatttctgacgactcaaaccagctagacccatcacttcttgatgagcttcttacaaatatttcgaccttgtcctctgtgtaccacaaacccccagaggcttttgttacccgcttgaaaacgacagttcagaaaacagaagacgaggactttgcggaaggaagcgaagcaggatactcatctagtaatccggttgatagtgcagcttctcctccaggtaatatcccacagccttccggaagacaaccagcaccagcggtcccagctcctgtacctgatctgctaggtgacctgatgggattggataatgccgctattgtcccggttgatgatcccataactcaatctgggtgagttatgtcttgattaatgaaactttctattgttgggactagtttattacgttaggtcaatttcggttgcctagttcatactgaaactcatcaaatcttatgaacttgatcgtagtcctcctctgcccgttgtcgtcccagcttcaagtggtcaaggtctgcagataagcgctcaattatcccgaaaa

SEQ ID NO: 12040 - DNA, 532 bp, Arabidopsis thaliana columbia
gtttttgaagtctaatgtgcttctagtggtttgttgtgatttatatggatgatttggctccttcaaataatctgacagagtcaagatgaatggttttgatagcagatgttactcaatcgtgttggctacactcctaagatcagccacagagagctggtagaaatggcagacaccggaaggaattggacaagatgacaaaaccagtccttgatactctacgaagctaccaggatttacctccggtaatcttcatctctggttctccaagcccttattgatctgcattgtcaatctcctctttgttattggtcattgctagtcctggttcacagtagattggttgttcatttctgtaaacaggacaaagctttagctgcactagcaatcgaagacaagaaaagacagtttacagccgcggaaaagtatctagaagaagtattacaatcagcccttgagacaaacgatgagtgatcgatataaaccagaaaatattatgttttgggaatatgtaacatatgttttgtaatgcaac

SEQ ID NO: 12041 - DNA, 427 bp, Arabidopsis thaliana columbia
tgttttttttaccaacaatggtccattcaattaaacgttaattgtacgactgtgtaaccttcttaatcatttcgactttaccaaggttgtttctaactccactccaatgactaatggtgggtatatgaacggaaaagcgaaaaccaatgttcctgaacccgccgagctctctgaatttatggctaaagtctctggtcttcttaagtaagtccacaatccaatgaatcccttactatcctttagtttgctttctttcgatgaactagtcaagcactaaacattttgatcttattaaggcttgtggattcaaaagacatagtggaacttgaactaaagcagctcgactgtgagatcgttattcgaaagaaggaagctttacagcaagctgtaccaccagctccagtttatcactcaatgcctcctgtaa

SEQ ID NO: 12042 - DNA, 604 bp, Arabidopsis thaliana columbia
gttgttggagacgattttacagagagctgagagtgtcttgcttagtccagttagagctgaagattggagcttggcatttcaaacttttgttaaaatgtggattcagcttgtgtatacaaagatggaagccaagaaagtgatggagttaatggtggctcggctttcgactgttgtgaaatcagtaattgagctggtgaataaggaagaggaagagtttttggtacaagggcttgaagattttgagaggttcttctcacgagagatgagtctgtatcattacactaacgatcaatgccattttgtgttggcttctatgattgagatggaaggagtagttagaggaactgaggccaaggagattgtgaggaagatcaaaatgttggttacagaaccggagatcaaaccacaggatggttttaagtatcgtagagaagagtttgatcgtggctggtatgattgtttgaagagtttatcttcgttggaagtgttaaagatctttgcttttactcaacttgaagataggtccagagagattgcaatcagacgagtcaacgtcttactatctgatcacttttcaaagaaggcacgaattggtatttcagag

SEQ ID NO: 12043 - DNA, 589 bp, Arabidopsis thaliana columbia
tacaaattttaagcaaaatgaaagagcagataggttttacttcacttgcttccccatcataccatctggtttctccttttccatttccctgagaaaagcacattcacagtgacataaatattaaactaaaaaccttattctcattaaatctattgtcatagatattactacttaaaaggagaaatacatgtcagaaccctaccggtactgaatgacagcatgctgcttgctgcaagatgggtgatccgtaggaatgtcggcaatccttctttcacgtccaaagaggtagcagctttggcggtgaaggcagagtggctctgttagtccaacacatttcacatgcacagaaacatacatcaagaaaactgattcagggcattcagaattattaagcaaacagaaatgggaaacaaaatgtaaaatcttatatacaatgttcaggggttcaaagtaagaatgacacgggaagccacagtcacaagcatatcagatcaaaggagctatttttcctctaagagtcattaacattcataataagattcattctaagaaaattgacaagttctaagaagtatcaagctatagtttg

SEQ ID NO: 12044 - DNA, 456 bp, Arabidopsis thaliana columbia
  unsure (1)..(456): unsure at all n locations
nnnnnnnnnnnnnnnnnnnnnnctaaagatcaaaggctttcagtgccggaagttgttcaatacctaacggtaacaaatgcgcgcgctgatcattacccagtagtttacgcaccgcttcaaactggcacagaaacagttgcgtagggtcgatccccaccgcgagtgcgcgcctgcgcaatcatgcgccacatgtgataaccgctgccgcagccgacatccagaatggtgcgtccggttaaatcagaaagatggggcagaacacgatcccatttccagtcggaacgccattcggtatcgatgttgacgccatacagtgagaacggccctttgcgccacggcatcaggttgcgcatcagcgtttcaatgcgtttaatttgccctgcgctcagtggctcttcgctttctgccgtaacgctatgcaataaatcaagacgatacggtttaatttcaggtaga

SEQ ID NO: 12045 - DNA, 594 bp, Arabidopsis thaliana columbia
tatatgagaagcttgaaaagaagcaaaaaagatcaacattacttacatggtctagcaataagacatcatcttcttcctctaaccgcgagaaatcaattgctctttgtccagttacaagctccagaagcataattccgtacccgaaaacatcggttttctctgacgatttccctgtggatatacattctggtgcaatatgacccattgttcctcggacctgagtggttacattagtccttctaacatctaccaacttggctaaaccaaaatcaccaaccactgcttcaaagtcttcatctagtaacacatttgcagctttcacatctctgtgtatgatcttcgggttgcaatgttcatgaagatattcgagtcctcgtgctgcacctaacgcaatctgtttcctcctgaaccaatccagaactggatccccgggtttaatctctgcatagtatatagatcacaaaatcttaaactcctgaaatcaaaagtttatagcttatgttccttttttacctcttaagcaatatgcaacacttagattctgcatgaaaggatacccaaaagtcgttcagtgtgtgttggacaaaagcgata

SEQ ID NO: 12046 - DNA, 533 bp, Arabidopsis thaliana columbia
  unsure (1)..(533): unsure at all n locations
nnnnnnnnnnnnnnnnnnnnnnctaaagccatccatatgcagcacgaaatcgcccagttcattttcatgcgcctgcaagatggcctgcaaacgtccgtcaacaccacgttgggtgacttttacacccgctaaaggccagcggatttcatcgatgtccagcgaatcgatgactcttccctttgaacgaagtaacgcgcctggctcaaaggtcagcgttgggtcagacagacttccacttagctgcgcaggtaaacgggcatataaaatgaggtccgcctgtttcgcttcaccggtcagctgcagaggcactgactgttatccatgcttaattttcctgggccaaaattaagcaccgcgttgcccttacccgcttgcccctgggtcagcacactcagtcgtccgctgaccagagcgttctcaagccctgcctgccagttgtcgactttgacacccagtcggccactcaaaggaaaacctgcatacggccagctccagcgaccatcgcttacggtcaattgttgacgagtaatttg

SEQ ID NO: 12047 - DNA, 421 bp, Arabidopsis thaliana
gagaaacataatcagaaactatgtttcttagcatacttatgtatccatttccctagatctaacgatcccagcagagcacaagatgacatatcactcaaaagggtaatctcattcggcttcaagtactttcctcgcattccacggaactaagataaagcctcgtccggtccgtttcttctcgcataacacgtgatcatagcattatatcaaacaacacactgctcaacaatccgatcatacacacaacgagcagaatccacatcttcacactcagtgtacatattaataagcgttggacaaacatagacattatcatcaagcccttagtttcatcgacaaacgatgcaattgtctaacttcttctaacgcctgtgccactgcacaagctttgagaagagacgggatagtgtagttgtcaggt

SEQ ID NO: 12048 - DNA, 327 bp, Arabidopsis thaliana columbia
ttccgcctttgtattaagcttctctatttttcttaataaatgctttgctacaaaagggtttttttttagtgaacgtgtcacagttaattaactcctacttttttaagacggctcttccattctgaagaacatccttatcacaaaggttaagaagtctcccagtcacttagaatttcattccaaaatctcgaacggaactaaattgcgccagatcaatactatatgatctgaacactatctatgctttaacattaggtcgtaaatctgacagcctgacctgtaacatcggaccccaattactacaaatttgacgagacagcgaatgca

SEQ ID NO: 12049 - DNA, 521 bp, Arabidopsis thaliana columbia
tatttattttggaatacacaagactataaagtataggaatataagtaacatgaacataaatcttcagaatagttactattacaaattaatatgtagaaattagaagccattaatgaaacgatgtcgtgtctttgtaacttacaaaccaagaaaaacgataatgggcttataataataaaagcccaatatatatcttcataagttttgttaacagtctttgtacttaattttctcctcgagagctaagattagaaatgacgaaaacgacgatgacgaagattcccaatcttccagacgatttggaatcggagatactctctaggattccggcaaagtctctaacgaaattgaaaactacttgtaaaagatggtacgttttattcagagatccgaaattcgcgaagaagaacttgggtaaatcagcgagagaggtgatgttagtgatgaatcaaaggttacactcaattagcgtcaatcgccatggaattcacgagggcgttgatccaccatggagtttcagg

SEQ ID NO: 12050 - DNA, 507 bp, Arabidopsis thaliana columbia
tttggatgcaatatttaattgttcttgcatccgaagtctcgaattttgatcgttaatttgaatgatatatattaggtggatgataagtaccagtacacatgtgagatcaaagacaacaaagtgcacggttggatctcaaccaagtcccgtgtcggcttttggatcatctcaccaagcggtgaatatcgctccggtggaccgatcaaacaagagctcacgtctcacgtcggacccacggccatcacggtaaagacatcgtccaaagctattaagcatagattacatttttggtactatatatagtagtattaatgttttcgttacttaactgatttgcatatgcagacttttataagcggacattatgttggtgcggacatggaggcacattacagacctggtgaagcgtggaaaaaggtcttgggacctgtttttatttacttaaactctgattctaccagcaacaataagcctcaagatttgttatgggaagatgctaacaacagg

SEQ ID NO: 12051 - DNA, 326 bp, Arabidopsis thaliana columbia
gatgtacgcagccacacctgaaacgtgtggacaagccatcgaagttcctgaggtaatagtgtagttcacacgcctattgtccaacgttgttgcagatggtgaaaccaaaggtgaataagcagcgaggatttccactcctggtgctgttatatccggctgcaattcaatcaaccattttctcttaggctgggaaacgaaagagaattaggtagcatcatacaaatgttataccttaagaatatcaaccgcgatagtgtttggaccgcgagaagagaatccagcaactttaggatctgtctggttaaagattgcttcactttttagaa

SEQ ID NO: 12052 - DNA, 338 bp, Arabidopsis thaliana columbia
  unsure (1)..(338): unsure at all n locations
nnnnnnnnnnnnnnnnnnnnnnctaaagaagctaaggggatgctttctcctgaaatgtatgaggagctttctggaaaacttcgtgctatgcggagtgagcttgaggttactcaatcacaattaagcaaaaccggaatgtcggcaaaacaaacggcttttgctatgcgcatgttgcctgcacaaatgacggatattgttgttgggttgtccactggtcagtcgccatttatggtgttaatgcagcagggcggccattcagctatgcaggagacaagaatcgccagcttacccgttacagcgatacccgctggcatgaagattccgtgcgtaaccgctgg

SEQ ID NO: 12053 - DNA, 606 bp, Arabidopsis thaliana columbia
gaggtgaggtatgccgaattgcttgaccacctgcagccaaagatgtattgtcagaagttatctaaatgtgtttaacgtacatgtcgctgttgaaatattcattttggtttcttgaagtaaaactaagagacagtataaagtcagctacctcagaacctgaacctttcccaaaagggtaataacgtttcccatcagcgtcaaagtggcacatattctccacaacagcaacgcaaggcacctactccgtaaaaccaaacaggaaataaatctcggaagttcatatctgtttgttgcagagttgagaagaaaaacaagttcacaagctccatataaaagaaaaaggagagtttatgatcaaagtctggaacagggaaataaccttaagttttgagaacatccttacaccttttgcaacatcaataaacgccaacttttgaggggtggtgacaattaccgctgctgtcaatggcgcaacctgataccaagaacattatagtcatagcatctaacagaagaatttaataatattcatcatatttcagttgctagcaaagttattcagttgttacatgcaagggaaaaagcattggcacatatatatttggg

SEQ ID NO: 12054 - DNA, 333 bp, Arabidopsis thaliana columbia
tcccgttttcgatcaacaagtatttgtgtgatattatggccttttcttttgacctagccgtcatcttccaacgggagagaagaatgaagaggaaatcaagagtaacaataagaagaagaagacgaagagacatgtgcaagagccacgaaccgatgccatatattcctttcgatctcgtgatcgagattctaacaagacttcctgccaagtcccttatgagattcaaatccgtctcaaagctctggtcatctttgatttgttcccgaacgtttaccaaccgtttgctaagggttccatcattcatacagcgtctatacgtgactttgaccttct

SEQ ID NO: 12055 - DNA, 1050 bp, Arabidopsis thaliana
tttagttttgtcgtttatcagcgtatctaaaagttttcttccaatcttccactgccttcggaactcaaagaaaattaaaatcaaatttttagtaatataacagccgctcactcacggggctgtcacctaaaagtctatcacaaatcatccacgtcaattaaatatccttgtggaaaggtctcaagccgctgtccttaacctctgcatcacacacacgtcactgtagcttctcactttcgattttaaccgcggttgataaaagcagaaatatttaaccatggttaggttttaacccaaaggtggtttaagtatatcccactactcagcatcagtttataaagaagtaaagctttgccggagatttagcaaacacaaacacaaaaaacaaaaccaactcagacgaatgtgattttttcttcttgagtgaattgttgtaaaaaaatgatgatcggagaatctcatcgtggttttaatccaacggttcatattcctccatggccactttctgaagatctaacggtgtctgatatttacggaagtccagacggaggaagtagtatgatggaagctttggctgagttacaacgttatcttccgtcaaacgaaccggatccggattcagatccggatctctcgggtccggattcaccaatcgatgcttatacatgcgatcattttcggatgtatgagtttaaagtgagacgttgtgctcgtggccggagccatgattggacggagtgtccttacgctcatcccggagaaaaagctcgccgtcgtgatccgaggaagtttcattactccggtacggcgtgtcctgagtttcgtaaaggttgttgcaagagaggagacgcatgtgagttttctcatggtgtttttgagtgttggcttcacccggcgcgttaccggactcagccgtgtaaagacggtggtaactgtcgccgtcgtgtttgtttctttgctcattcgccggatcagattagggttttgcctaatcaaagccctgatcgtgttgattcgttcgacgttttgtctcctacgattcgtagagcg

SEQ ID NO: 12056 - DNA, 639 bp, Arabidopsis thaliana
gaagtaagccataagttcacttgcgtttatttactagtatacttagctacccatttatttttttggttgaacccaatggcttacgttgcagcttatttgcttgcctttgaattcccactctattaatatttccctatctgaaggtacggattatgcgaagattgcgtcatccaaatgttgtattcttccttggggctgttactcgtcctccaaatctttccatcgtcacagagtttctgcctaggtttgtcccatcttcttcttgtgaaagttaattgcatatgagatttttgagtcctaaaagattctaatgtttttttgctgttttattatagaggaagcttgtatcgaatccttcatcggcccaaatctcacattgacgagcggcgccggattaaaatggcccttgacgtggtagaaaaatagattcatatatcaacttccatgtcccccaggcttatttcttcagaatagtcactaaattccagactattgttactttcaggcaatggggatgaactgcttacacaccagtacaccgacaattgttcatcgtgatctcaaaacaccaaaccttttggttgataacaactggaatgttaaggtaggaagacttttttcttaagttgccaacgaata

SEQ ID NO: 12057 - DNA, 437 bp, Arabidopsis thaliana columbia
ctcgaattggaagttgaacagatacgtgatgtagttatgcttcctcctaatgttctctgttctccatttcatgaacttctcttcctccattacaatcttatcactcgcagcctcgatcccactgcctacctcagcaatcaacgcattaactgcttctgcttcgcttttgtccacacaagtattagcctgctgcaacagctgttccctctgcctttgaagctccttgagttccgcagtgtagatatccttcctgtttttaatgacagccaaaagattgaacctgatctcgctctgtgagtacctctcaatccgttcttggatcactggttgaagcatttgcagccactcgataccagtttggtctcgggggcatgggccaagactgataggtcctccttgagcccacaagctcggacaagactccatcacaggtatgt

SEQ ID NO: 12058 - DNA, 583 bp, Arabidopsis thaliana columbia
cgtccttcttcatctcgttcattgacaagacttgggtcttcactgagaataacatcaaggatatctgctcacacaaatacttgattatctttttgaggaagcaaatgtgatagaaagaaaaactagaattagttttttctcgcaagcaaaaatgaataactggatgaaacacaaacctgagtttttggcctttagagccgcgtgtacaagcgactttctcccttctaactttgatgccaagttacatgtctgtccaggaacgtacatcattgcttccactagggttagacttccagcaattatagccgtaaacaaaggagatactccatggttatttgcaagaaacgaagcaaggtggttggcctttaccagacatgcagctgtcttcaaatggccgcctttcaaggctaagtgcagagcggtatttccatctatatccttcatagcatatagattcactctctccctctcttcttcagagagtccatctgaaatttcatttactctcgcaacaaaagcctcaacaacagctaaacggccagcagcggcacgccactgaagcggaatctggtcttggagtttg

SEQ ID NO: 12059 - DNA, 441 bp, Arabidopsis thaliana columbia
gtcttcttaggcatatcaccaagaaccttctcgagttcaagatccacagcaggtggaggtggaggtagcccttctttactgcacttcgctgcagctgtgctgtcaattaaagtacagcgaccacccccattaattgttccaatcacagccatcgaaagcctttccctcttacagattgattgcaaaatctcccggctctcagctttcaccaaaatcgcatcttgctcttgatattctgctccccatatgtccaacaccgacatagtatgatcacccacaacaatcgctcttatgtcaatctctgcaccctgtggataaataatttccttgacaacattgcagtttccaccaggacgttgatcatgaatgctgataataggattcttctcacgcatctcaatacgagcacgaacaacacggtacaacttctgagacatttca

SEQ ID NO: 12060 - DNA, 362 bp, Arabidopsis thaliana columbia
taatgaagacgactcaataactgaaagcgaagaatttagaaagtttgaacctgcaaatactttcaagattcctgatgaagttgatatttctcaacttagttagacaattaaccattttcattgttgattctatgcattcttcatctagactccaatttttttattcactctttcataaaggagctaactagcagcaactggtttagattggtaactatcttttttctttggttttgtttggttgttcacgtttaatggctgagataatgtatgtggatttatagtaacacagattctcgtttaacgaagatgtaatggagcagttagcaggacagtggagagacgccaaatgtgaaactttg

SEQ ID NO: 12061 - DNA, 837 bp, Arabidopsis thaliana
tgaatgtttgtttaagcattttagaaccttgatgtttgttgtctctatatttccatcgtataataagagaaatgatacatacacagttcatgtattgctggtacggtacggaggaatgttttcggtatttttccctcattcacttatttctgtcaatgacgaaatcagtttcagacacatgttcatatattttgtttaaactaatcatgttttaaactttctagatcagctctaatcaaacacatttgctaacaaaagataagttggaatgttaaagaatacgttaaatacatggagccacatcctccttacaagaaaataagctcaaacacatttcacagttatactctcatggagtgggcttatctctttgattttcacatcacataacactatcgatcctctcttttttacctcttctcatatatgttttcgtataaacagtgaaaatcaaaagtgtgaaatacaacgacggtggcgagtagcgacagttttgatctgttgcttagtttcttctttccagctattggcaatgtcatgagctacactcattgcatcgaacgatgcacctgagagtcctcttccggtgaatcccaccgcatacaatccagccttccctttccacccttttggaaatgggtttctctctatcccaatctcacccaagtcgttttcctgcataacaataaatcaatcaccaatcaacgtcttagtttttatcaaacttcccataactatcaataccggtattctatggtcctataaaatgttatcttttgagacaaaaatctgaaaaagataatacttttgtctaccttaagccatgaagggacattg

SEQ ID NO: 12062 - DNA, 2003 bp, Arabidopsis thaliana
tcaatcatccgctcttcacaagctcttttcttctccttcttcttcttccgaaatcgacggacacgctgagattaggaaacctcttattggtatccgtggaagaaccccaaccagaacaaccgcatggttcaaaacgacggtcgcagtcaccgttctattgtcgttttgctccgtcgtgctctgcgttttggccttcactggtaagcgacggactcatagaccatgggacctcatagacccgctcttttggcttattcacgccgttacacacctagtcatcgccgttctcgtcctccaccagaagagattcgctgctctaaatcatcccttatctctacgaatctactggatttccagtttcgtcctcacgtctctcttcgccgtcactgggattttccattttctctccgacgccgccacgagtctgagagcagaagacgtcgcttcattcttctccttccctttaaccgcctttcttctcatcgcctccgtcagaggaatcaccggcctcgtcacagcggagaccaacagtcctacgaaaccatccgacgccgtttcggtggagaaatccgataacgtctctctctacgcgtctgcttctgttttctcgaaaacgttctggttatggatgaatcctttactcagcaaaggctacaaatctccactgacgctcgaacaagtccccacgctttctccagagcacaaagcagagaggctcgcgcttctcttcgaatcgagttggcccaaaccgtcggagaattctagccaccctatccgtacgactctactccgatgtttctggaaggagatcctcttcaccgcgattctagccatcgtccgtctcggcgtcatgtacgttggtcccgttctcatccagagcttcgtcgatttcacctccggcaagagatcctccccgtggcaaggttattacctcgtcctcatcctccttgttgccaaattcgtcgaggtcttgacgacgcatcagttcaatttcgattcccagaagcttgggatgcttataaggtcaactctaatcactgcactctacaagaaaggtttaaagctcacaggctctgcgcgtcagaaccacggcgtaggacaaatcgtgaattacatggccgtagatgcacaacagctctctgacatgatgcttcagctccacgcaatctggctcatgcctttgcaagtcactgttgcactagtgcttctctacgggagcctaggcgcgtctgttataaccgcggttattgggctgactggagtgttcgtcttcatcctcctggggactcagagaaacaacggataccaattcagcttgatgggaaaccgagattctcggatgaaggccaccaacgagatgctcaattacatgcgagtcatcaagtttcaggcttgggagaatcattttaacaagaggatcctcaaattcagggacatggagtttggttggctatccaagtttctttactccattgctggcaatattattgtcctctggagcacgccagtgcttatctctgctctcaccttcgccaccgcccttgccttgggagtcaagcttgacgctgggactgtgttcaccaccacaaccattttcaagatcctgcaagaacccatcaggacgtttcctcagtctatgatttctctctcgcaggcaatgatctctcttgggagactggactcatacatgatgagcaaagagctgtcggaagatgctgtggagagagccctgggttgtgatggtaatactgccgtggaggtcagagatggaagctttagttgggatgatgaggacaacgaacctgctctcagtgatatcaacttcaaggttaagaaaggtgagctcactgcgatagttggaaccgttggttcagggaaatcttctctgttagcttcggttcttggtgaaatgcacagaatctcaggccaggtgcgaattttttttaatgtagtctaaagattcagagaactaacatttggaacatttgttgattcaaaacaag

SEQ ID NO: 12063 - DNA, 629 bp, Arabidopsis thaliana
ctgcttaaattgtcctcctttggttttaataaaggttttgtttcacagttcttatggacagaatataaccacaagtgtataccttggcgagaccttgttctgtataacaatttgtatttttgggttgattctcttcacactcctgattggtaacatgcaagtaagattcagagcttatgcatcactctgcaaaacttttcaatacagagacatttttttgtctttctaacaatagacttcatgatttttaatttggtggaaagtcttctctgcaatcgatgtcagtaagagttgaggaatggagagttaagagaagagacactgaagaatggatgagacatcgtcaactacctccagagcttcaagaacgtgtccgaagatttgtccaatacaaatggcttgcaaccagaggtgtcgatgaagaatcaatcctccattcattacctacagatttacgccgtgaaatccaacgtcatctttgtctctccttgttcgccgggtacatacatcaactcagtcatcaaaaactgttatggatttgattgtttttcaattcagaagtcacattgttgtggtaagtgcaggtcccgttcttctctcaaatggatgatcacttcttgatgctatat

SEQ ID NO: 12064 - DNA, 575 bp, Arabidopsis thaliana columbia
atttcccctttttggttggtaaaagtctgatttttttgtttaatttgcagtgtgaggtgttcagtgtctggtggaaatggaactgctggaaagagaacgactcttcatgatctatatgagaaggaaggtcagagtccttggtatgataatctttgccgtccagtcacagatcttctcccgttgattgctcgtggtgttagaggtgttactagcaaccctgcggtaattttatcatctctctttgtgtgtttggttttgcttttgctctgtgtttgttcatttgtctttacttcttcacttttaatacatttgcagatcttccaaaaagccatttccacttcaaatgcttataatgatcaattcaggtatctttttgtgattgtcttagacttgtggttgttaacaacatgctattaaaactttagagttcttctttatatgaaaagttgtctgatatgttaatggtatacctgacatgcactattaggacacttgtggaatcgggaaaggacattgaaagtgcgtattgggaacttgtggtgaaggatattcaggatgcctgcaaactttttgag

SEQ ID NO: 12065 - DNA, 550 bp, Arabidopsis thaliana columbia
tagtaacgcctgccaatgagcctggtcaatctggagatgatgctgccttgggtttatcctgtctgattgcggaaaaagaggatttacaacagttagcttacgaggccgatgcaatcaagaatattgttgagatcttgaagacaggtagtgagctccagtctaaacgtcttcagggtttgtttttgtctctagctgaattgtgctcaaagctagaggattgcagatgtagcttcctgtcattgcaggtgtgtttccacatgccgttttcttatatgatatctagctgaattgtgctcaaagtttagtattaattttgtatagtatgctaaattgatttgtctttttatccttctactaggtattagacctgctgactgatgcgctaagacacaaagatgctgatgtaagagctgcggcatgcatttgctttagaatacgctgctcgatcagtcaaggttagttaacattatacatctcgcatgttatcagtatttcagcaggttttgtattaagtggtaagttccctgagacatgtcatttagagtttgag

SEQ ID NO: 12066 - DNA, 377 bp, Arabidopsis thaliana columbia
tgagatgagaattgatatctgatttcccttatttgttctatacttttgcgactttttaacttggaaacggcctgtgttgcacgattgggtgaaattcctgtctcttagggtttcgtttgtatctccatgaagactactcctggtttgaggattttcaagcccatcatccctcacacacgtacgtatcatctcttccaaactttttattttgtattcgtagctatctgtcctaatttttctttattcttctgacgtcatttagctaaaccggactctagaatttatgtggaatatgcttggacaatgctatagccagccataagagccatcttcctcgacgagccacaagattttgcatgcagtgggcttttcaatgt

SEQ ID NO: 12067 - DNA, 518 bp, Arabidopsis thaliana columbia
atcaaaaataaacaagagggcctaaagaagaatcgtaaagactttacgggtcttgtttaggataaaagaaatgcctgccggtggattcgtcgtcggggatggccaaaaggcttatcccggcaaactcactccctttgttctcttcacttgcgttgttgctgccatgggcggtctcatcttcgcatacgatatcggaatctccggttagtgtctctctatttttcagattttacatttccaccccaaaagtatctatgtagtcatcaacacacccaaatcagaaataataattgtcgtttttgatacgaaaacattagagtacccaccccatattttcactttagtcatgatgacacacaaggctcaaaattacagaatcaccaacaatattgcaagtctttaaaattacaaaatcgccgcacatgttttaaaacagagtcatgtaaaccctcatccatgtctgataaattttctctgggatatctgttaatgaatttaaaatatttacaggtggtgtg

SEQ ID NO: 12068 - DNA, 323 bp, Arabidopsis thaliana columbia
  unsure (1)..(323): unsure at all n locations
nnnnnnnnnnnnnnnnnnnnnnctaaagccgtcaggcnatcgattccggctgcctaggggtttgtgccgctgatccgaaacgcaatgtggtggcgatttctggcgactttgacttccagttcctgattgaagagttagctgttggcgcgcagttcaacattccgtacatccatgtgctggtcaacaacgcttatctggggctgattcgtcagtcacaacgcgcttttgacatggactactgcgtgcaactcgctttcgagaatatcaactccagtgaagtgaatggctacggtgttgaccacgtaaaagtagcggaaggttta

SEQ ID NO: 12069 - DNA, 569 bp, Arabidopsis thaliana columbia
cgaacacgatgaggagtgagacgcggcgacgatggattaaacctaactttattccggctatcttttagatatcgagagcggcggctatctccggagttaaagggagctaagatcggagagaacttaacaccggtgaaaatggaagaggacgatgaagccatcgtcggctattgaggacaaaggagaggtggaggagaaaaagagagacggaaactattaaagaacaaaaaaaaaagaagagggagatgaggttagctacgtttattgtcttctccttcctgatttttattttgttaaactctttttatatgagtatattaatgtttctttcttttttaatacaaactatatattttaattccaaaatcaaaccttctatttgtagcaaagggtttgaagtcaaaatctcaatattttggaaagattttccccagaagttttaccggttgatcatgcggtagttaatggcaagttttttctggatttttctggttatattggtagatttaagactaaacgttcactggaaatatgtttcttgggttaatcgttcgactatggagtatgag

SEQ ID NO: 12070 - DNA, 596 bp, Arabidopsis thaliana columbia
gggttatgaacctgaatagcgagaagggcacaataggctaagagatactcaagccatttagggactttgaaactccggtgagccaagttgcgatgataagagacggtgataccaagaccaccgatggtgtaaaacaaaaacgtaacccaaagagccgaccaagtgaaataaaacggagcccagagagcaagagaatgaacagtgaaagaagctgagaatttcacataatctaatctcctccaccttctatcccaaaacacccatctcctcttcttcttctcctccaccgccgccggcgttgatggatttttctggtggttctcctccaccgttgatgtcaccgacatttcggatctctcttactcttctcttctttttaggttctcactctctaaattgttaatggagaagaataaaagtgatgcttctcttctaatgtatagtgattttaatttactgcaacacagtatcataaggaatcagtaaatgataaatatcatgatatttgttgtcgcggatgggcacgtaagggttgaggtgtactactcaagcaatagtgaaagtatattctgtgtaccagtataagaaccgaagaa

SEQ ID NO: 12071 - DNA, 309 bp, Arabidopsis thaliana columbia
ttttctcacctaaaactcttccccaaaaatttgcaaattcaacgactcgtctcggcgatgatggaacgaacctacggccgccgtaagccggggattccgaggaccctatcggactctctaaacgactctgtttctcagactgagtatctctcttcctcttcgtcgccggacatcgagcccattgattactctctccttcctttctccagtcaagagtcttcctctctctggcattcttcttccaggtcaaatttcagagaggattatccacagaacggaggtgttgtacggagggcgataagagtcagg

SEQ ID NO: 12072 - DNA, 599 bp, Arabidopsis thaliana columbia
ataacgggatggtaattttattcatttttttgtgtcccagctacttgtttctttagatggttttgaaggaaggggagaggtcatcaccattgcttccacaaacagaccagacattctcgatcctgcgcttgtgaggcctggacggttcgaccgcaaaatctttatccctaaacctggtcttattggacggatggaaattctgcaggtaacggcgtggtatctgtgtttatgtattcttaaacttgtaaatttgcaacaaaaaaaaaagaggttaaaagtagagttttgtcctcggtccaaatttatatttttgttttggttttgctgtttaggttcatgctcgtaagaagccgatggctgaagatttagactatatggcagttgctagcatgacagatggcatggttggagcagagcttgctaatattgttgagatcgcggcaattaatatgatgcgtgatggaagaacagaggtgggatcaatatttttagttcaaattagttatatctgctcttgttttttggatgggtttggtttaaatgttaggatcgtgtacatctggtatatggtgtgtgtgattacattagtattggatgtg

SEQ ID NO: 12073 - DNA, 502 bp, Arabidopsis thaliana columbia
tgaagaaaactaacattaagatgcaactacatgtattaggacataatacaaagcattgatccgcagaaatgggtggtttgatatggcaagaagagaacatgccaagacttctgtacttttgatataataaactagaagcaagtaactactcacgcttgaactaaaagtaacactgattttctcgatgatgtccacaaaaatttcctctcttctccgacccccaggatcattagccacaaccgattttgtaactgcagttccaggcattcttttggctccttgctgcatagcataaattaaaggggtcagtcacatataccaggaggaggaaaatgaaaagcaatcttactgtgaaaatggcagcaggatcaataggctgaaggcgggcaggagaaacacaatcggctcattgaatatataagatttcaaaacttcggtagatgtagtttgcacgtaaccaaaatcctaatcaaaagagcacagagtcttatttaataaaaaa

SEQ ID NO: 12074 - DNA, 511 bp, Arabidopsis thaliana columbia
gactcaaaaccattagtaagtccatcatcatctgaagagaatgatgatgtgcgaaaaacggatccaatacttttgaatgaacttgaagaaagagagtcacatgtatccatttcctcctcagcctcatcaaattgttcattatcatcatcagattcactaatttgtttcttctgagataaaagaaatcatcagctcaagatataaaaatgttgtagtacagaaaaggtttcttgtgtatcaagttacctgagtctccgttgccagcttgtcgttgagtctcatctacaaccgtgttttccaaatctactttctctgtctagacaatgacatagatacatcaatttattagaagagtttagacatacataggggatgttcggaaggttttaagtacctctaattgtctgagtgtatcaatgagaagccattgcttttgtttaagaagcaaaagctggctctgaattgccgagaactcagacctcgtgatttgttcgcagtcttgaatggctga

SEQ ID NO: 12075 - DNA, 953 bp, Arabidopsis thaliana
taacaatatatgttctgtatatttgaattgaaacacatttatattttttactggtaatcaccaattaaaaaaactaattgcacattaattaatatattaaataaaacaaaattaataaaacaatctagttatgagcatagtccaaataacccaattagtccaaataacccaactaggactagcgttacttgtcctagctatattccacatatcgtagacaggagccatattaggatcgaagaatccgaagctttgttcaaccgctccttgtttcaaatcttcattgaacatttcgaagaaaaaagttatcactggaacattgggccgccttggcgtacccttacctgtggttagtttcttaagcaacccctggttataagcacgagcgttctccacgcttgtgtatggatcattccctctagtaggccaaccggtctccgctacgtagaccttcacgcttccgtggttgatcttctctaatgccacgttgaaagcatccaacgttgcatcgaatatatttgtgtattggtattttccgtcggtcactaccggtgaagtcgaacggaacgttgcgtattccagtgacacgtggctagggtctgatgcgtaagcgaaataagggtaaacgttgaccatgagcggtgaatcggtagagctaagaatcgatacgatttcggttataagttcggttattgccggtttaaatactccggctgatggtgggtaagagttagcgagtgcggctgtggatatgacagtggtgacgtggatctttgagtttccgatttcggtcaacgcagcttttatatttttcatggcttgtggcacgtaacgtccgatctctccttctatcacttcgtttcccacggttatccaattgaaagctacgtttttgtatggtgctataaatgttttatcccaatttaaggcaaattggtattcttcggctaatg

SEQ ID NO: 12076 - DNA, 484 bp, Arabidopsis thaliana columbia
agtaaagttcggcagtgtggtttaaagcttagcaaaatcagcccgcgtttcaccatcgcagcgtccttcggtaacgtacacggtgtttacaagccgggtaacgtggttctgactccgaccatcctgcgtgattctcaggaatatgtttccaagaaacacaacctgccgcacaacagcctgaacttcgtattccacggtggttccggttctactgctcaggaaatcaaagactccgtaagctacggcgtagtaaaaatgaacatcgataccgatacccaatgggcaacctgggaaggcgttctgaactactacaaagcgaacgaagcttatctgcagggtcagctgggtaacccgaaaggcgaagatcagccgaacaagaaatactacgatccgcgcgtatggctgcgtgccggtcagacttcgatgatcgctcgtctggagaaagcattccaggaactgaacgcgatcgacgttctgtaagata

SEQ ID NO: 12077 - DNA, 604 bp, Arabidopsis thaliana columbia
cgtaactagagtctgggtttccttcctttgcatgaccacggattagattgtttaaggcatcttggtcttggacacctcttttcatcagctgcctgaaaagcacttctgcttttgccgtttggccattgttgcacaaatactcgattattgggttgtaagcgctgggctccatttccagagtatcctgatgcctcaataaggattccttccccaataagcgtatctaaaagcttgatagcacgattgtatgcactagccttgcattggttctcaatcaaaaccccatagtgtcccgcctctgctggaacattcagtgtagccatggctttgagcacctcagtggctgccgccatatcccctgctttgctctgagacaccaaaagcttaagaaagatcgagttatcttttggagcaatgtgtttcgccatcatattcttcaagatattcttagcctccaccattttccctgcatcacacagaccaggcaacaacgtcgaatacgtagtagcattaggctcaataccagaagatctcatctcctcaaagattctcaacccatcatcaactcggtccaccgcaagatatcgtttaatcatcgtggtgt

SEQ ID NO: 12078 - DNA, 528 bp, Arabidopsis thaliana columbia
tggtttaaggtctctgtggacaattggttcaggtttggtctggtggaggaagaggagtcccgtggcgatctcagcagcgattctgaaacgtagctgccaggtaatcggcggtgtgtttcctcgcatgaaaagccggtcttctaaacttcctttggccatgtattcataaacaagaatcccaaattctggacaagctccaagaagaagcaccatgtttggatgccttatgcagcttaacacttcaacctgagaaaacataaacatatgttactcaaagatgaaaactttcttgtataaaatcagaaacgaagaaagattttttttttacctctttctgaaactgtgatctcccttgagctgcgtctgggcgtagaactttaacagcaacacttgtgtgatcaagaaagcctctaaagacaggaccatagcctccttctcctaccttttgagactctgcaaaatttgaagtagcttcttcgatttcgtcaaccgtgtatttcctataccgaacaaatccgcgagagaatg

SEQ ID NO: 12079 - DNA, 811 bp, Arabidopsis thaliana
gtcaaaatttgtaggattcttggtaccacgaaatgagagagatcattgaccgacgacgtgcctctgaatctgccaaactttttaaaagccaaattgtctcttttaaattcattgattccataacttaagtaccaacgtggaatattttatagtcaaacggtttaatgattcattggttgacatatttaaaaccaattgtgctttgtttatatttgcagcatccgtatgtgtatggagtgcttgtatttgaagccatggccacatttatcggtcaagtctccgttctctcgcttattgctctctttggagccgccacaactgccttggtaaatatctaatcttatctttgaatactcatttgtattttaattgactcaatggtctaaaatcacatttcgttgtgtgtagataacaacggctaggaaaggggttacattgttgctgtcgtatttgatattcacaaagccgttaacggaacagcacggatcaggcttgctgttgatagcaatggggattgtattgaagatggttccaatggatagtaaagctccggccaagattccggcgagaccagcggttaggatcgcaggaggcgatggtgatagagaagaggacgaagaaaggaagtcattggtttgagaatgtgccatgtatttatatatattttattcacaaattcaaagggtttatagaataatgttggatgaaggagacacaaaatagagtgtaagttgtgtcagagacttgttattagatctaaagtgaattgcaaagattgactgttaattgttactatgatatgaataatttt

SEQ ID NO: 12080 - DNA, 975 bp, Arabidopsis thaliana
ccattattgaaaagttatgtagattaaaacatatatacatagcttttatttatacatagctgtcgtgtacaacaagaaacctctgattcttatacggcatattgttactacttacaaaccctgtgccacagctatacttacccagggaaaaaaatactttgatatacgcaaaggctaatccccgtaactcaatggccgggatccatttatctaaccctattcacaaatatatatacacatttatcgtgcaacgcaagaaaccgctgattttaataggtaggcaagagttcttacaagccttccctcggatttctggcagttgtgtgtctccggacttccttaaaagctgccctaaccttgaaagctgccttaaccttacaccacctggctcttggagatcccaaattaacgtttgcaaaatgaacatcgaacattccagcttcttccgtctcagacacggtaagaaacatcgtttcaacggcttggtgcgtaccaggtgaccagcttgaggtcatgtcatcatggtgatgataagaaaacgcgttctcatcctcctcgttattctctatacaaccttttgtcacaacagtttgtgattttccgtgtacttgatcgagttcacttactttgaagctgtttccgaaagtcggtaagaactttttgtcgatatgaaacctcgcggttgatgagttatcaaaactcatcaggacatcagggtggaccgttgagcttgaagctttgtggcaaagagccatcgaagagcttgatggatccaaacttcctatattttcgaaaaaaggtacatcaatttttttattaattagtctatagtaagatatagatatatcaaaagacttaacaccatgaccattacatattgtataccttgaaagtcgatgtgctgcgatccagaacatgttacgacgaatccaggatcttgcgggcactgtaaggacatttgtggatgcccacaaa

SEQ ID NO: 12081 - DNA, 1319 bp, Arabidopsis thaliana
cagaacacagagatagaatcattcattgatgagaaaagctggccttcatgcaaagctagtttcgggtaacaaggctcatcaggcatcttactcttcatcagtttacttctcgaactccacctcacgcttcctccatacatcctcagatcaataaaccccaaatcctcaaactcattcaccacacaaatcgaattgctatcttccatagctattgcatctctcactctcttctcgtctatcgccataggagacccaatatccgaccatgaccaaaccatgttcttgtcccgaaaatccaacaaactaatgtaacagttgtcctttcttggaaacaatgtagccacaagaagacagttcttaccattcagccattgaagcttgtcagcatcaccaagtgaccaaccaggactctcgtagaagaaatcggtttgctttccagttatctgatcccaaactccgattccatactcattactccgacctttgcagctcgcaaaaatctcataatccggcgaaaaactcaaagctccagctgtataactcttcacctgattctcatgacagacctgaaacttataccgaagatcaccggaagatgaactgaacagtcccattcctccatctcctcttcccaatttctcacaagcagagagtacgatgttgtctgaatcaatccagccaacatcgtttactctctggtaatcaaggttgatcggagaatgttcttccaacatccaatcaaaaacatgaacaacactcccgtgcgcgacgcaacaaccgccatcaggacctgccctgatggcggttccgtctccgggagcaattcctttaacagaatccgatagacgaagacggttaccatcaaacggaccccatttagcggtccgtacatggtcaagtaaaccgtagaaagaagcttctctatgaaggagacgctcagggatgttggccggaacgttaaggtctcccgtacggagaagatcaagaagaactgcgaagcaatctgagtttctgtctacgaaaagaatggaatcttcaagtggtgaaagattccattcgtcgtcgaacaatgctccgaagaaagaatcacgacctgcgtttgctaacgtcgtcgccgtcgtttcgaagagtcgtccaccaacgttgaatttgatcctgtcttttgagatacccattaatggaaaattaggtgaagacgatgtaatagagaatgcaaaaattttccaggaaagcttcgatttttcaatgaaatttgaaaaattgagctccgggcacgagaaagaagatgtttctgactaatgggaaatcaaaatttatta

SEQ ID NO: 12082 - DNA, 948 bp, Arabidopsis thaliana
tacttgctttccagtactttgatcccaaactccaatcccatactcattacttcttcctttacagctcgtaaagatcttagaatcaggactaaaactcaaagctccagcactataactcttaacctgattatcatgactaacctgaaacttatacctaagctcaccagaagatgagctaaacaatcccattcctccatctcctcttcctaatctctcacaagcagagagtacaatgttaccagaatcaatccaaccaacatcgttcactctctggtaatcaagattaatcgttggatgctcctcaagcatccaatcaaagacatggacgacactcccatgagctatgcagcatccaccatccggaccagctcttatcgccgttccgtctccaggagctatgccggtgacggaacgagataggtggagtctgttaccgtcgaaaggtccccactttgcggttcgtaagtggtctattaagccgtagaacattgcttctttgtgaaggagacgctccgggatattaggcgggatgtttaagtctcctgttcggagaagatcgagaagaacagcgaagcaatctggattcctatcgatgaagagatccccgggttgtgaaagattccaattttcgtcgaataatgctccgaagaaggaatcgcgacctgcgttagcgagcgttgtcgctgtcgtttcgaagattctgccaccaacgttgaatttgatcctgtcatttgataaacccattatttctgatttctgaaaataggtgaaatcaatgatttttatggattcgaaccaaaagcattaatgacaagacaaggaagccatgaacgctcgaactcggattgaaaatattcgaaattcgatcggattcgaagaaattgaatcctgggaaaggataacgaaatgaaatctgatttatgattaatcaaattgaatacgatgatc

SEQ ID NO: 12083 - DNA, 656 bp, Arabidopsis thaliana
tttcaaatagtgtcatcaataaatgatgtgttatttattctgtagtcgagagctttagcatgtcaaagttgccacaagcaagtatagcccgtttattagagttttctgctttatattttagaagctagcttattagaggttcacgaggattgcctttgtgcataatctttgtggccagatgatttggaaagtataaaaacaaaaaaggcagatgttggtaaagcataaacttatttttaagcaccctaattattttgtcatacggcaggttggttgtacgcagcctcgaagagttgcggctatgagtgtggctgctcgtgttgctcaagagatgggtggtaaacttgggcatgaggtacgttttctttttgttagtcgtcttaacatttttccttttggaaattgtttgttacacatttgtttaagcatacactgcaagaagctaaatctttggtggtgcttgacacaggtcggctattccattcgatttgaggattgtacgtctgagaaaacaattctgaaatatatgactgatggaatgcttttgcgtgagttgcttggtgagccagatctgggcagttacaggtaatcaacattcctagccaatttgtcttagcatggggcatgtgatatattctttacttactaatagctga

SEQ ID NO: 12084 - DNA, 748 bp, Arabidopsis thaliana
ccatgttcatccataggttaagacctcaattttgatgtaatctcatagattcgtaagatcttgtagtaagcaggggaaacagagagtgagagaaagagagctcaccacaccaacattaactttttcaggactaggatcagcgagaaaagcttcggtaactccgaggatcggatctttaggagcaggctcaacgctcttccaccatgaagacatagatctcaaaccaccgaaatgaccggagatcggagtcattcctcgcttcgaagctgcgtttcggatcatcatcgccaaagccataactctatctctctatctctctctgtttctatctcttaacgtcaaaaaatcagaaaaagagagtggtaaggagtttatatatagagagagaagtagcgactcgtacgaagtttttggcagatgaggacgaaggagagtcgcacaagttgcttagaaaatggccttggtctgtgtgtgtgtgagagataaggtttgattttaataaaataagctttactctaatgataaatactataaaaagtaataaatgttgcttggctctatgtgtctgatttattcccgttttagttagtcttcaacacctgaatctagtaataaaacatttatatttattttagaatcttacatgtttatggtagttaattttttaattttgactgttttatcatattatttgtaccttgagtcaattatgacaagatgatttcattagaatgttttgtgacttaag

SEQ ID NO: 12085 - DNA, 533 bp, Arabidopsis thaliana columbia
cttatgagtagtagtagtactagtaccgtttccattcttgtcctgttggatatctctccagacctcatcaactgtctttttactgagatctcgaggtaacgtcaagcttccctgacgaacaagcccttcctcagctggtggcaagacagtcttgagaagtgcatcaaggttcatgcttcctagtggttttccagaacttcctaagtgggtttgaacctcatggagctttaagctatagagagagttctgcctcgttaatgactgagatataggctcttcaatgtttcctctaatagaacccatatatgtagcctttacacagaaaacaataacaatttagtaatcctggttcaatctaaacaactaaaaaatagagaatctctaaggtactaacaaacaatcagggaatttgcatgcagtattggagtgcttaaaaacgcagataacaactcaactagagaaatgagaggtggcaggagattgtgaataaggtgacaaaagtttaaggatgatgttgagagtggcttaagttt

SEQ ID NO: 12086 - DNA, 531 bp, Arabidopsis thaliana columbia
tatatagaggatccccgtgacaacaaacacgagcagcgaaactgcagaaagaggggatcagtctagtttagcaaattctccacctgaagccaaaagacaaaggttctctgtttagtcctagaaaagtatgggagaaggctactaatgtttcctctttagcaagtatccgattgttttaaaagtaattttagagggatacttgcaaaaagaagagaagattcagttatctaatctctgcaccaactctctttgtccttcttcttttgattatttctcgactgtctctcctataaaaaagatatgcctagctgagagtttgaaatccataatctttacaaggcacagagttatttgacatctcgtatagtaagaaaatttgcggagaaataagcttatagaaagtgaaggttatcggaatcttcctactccattacaatcaaggcccaattggacctcaaatcctaaactgaaaaagtttataatgaatttcattaaatgcccctaaaatataagcaaaagtttcaataaaga

SEQ ID NO: 12087 - DNA, 478 bp, Arabidopsis thaliana columbia
cctctagtacgccagtgtgctgtaaagcttcgataaaccagccaaatctcatagagataagagtaaacaaaccaacagcagcaaagaaatttatcagtactacagttctactggaaacattcatttttgccaccttttatcattgcccctatgtgtatagtacgggttaagaaaatccgcaataatactcattctgaagatggataagggcaagttgctgtttgatgattttttctcaaactggtgaaaaaacttgatgcacgtcaaaaaatgacgcatatttgcgcgcgttttattcatctggctggacgcccgtacatgtctctctatcaacacatgcttgttttttatgcggttatggcagcaatcgcatttcttatcacatggtttctttctcacgataagaaacgcatccgtttcttaagcgcctttctggtgggggcaacatggcagatgagtttccggtggcgctgttgtt

SEQ ID NO: 12088 - DNA, 429 bp, Arabidopsis thaliana columbia
aaaatggatgtgtccacaacgagccaagggttccatgtgatgaaaacagagtttcagggtatgaatcagattccaaattacaggaaatagaagaactgagatcagaaaaagaaaagatggctgtggatatcgagaggctgaaatgtcagttacaagaatctgagcagctgttagctgacattagatcacagtttgattcagctcagaggtcaaacagattggcggatactcaactcagatgtatgactgagtcatatagatcacttgaatcacgtgcagctgatttagagatcgatgtgaaccagcttaaggaaaagatacagaagttggagaacgagcttgaggatgaaaaatgcaaccaccaagaagccattctgaggtgccatgaacttgaagaacatattcaaaggtatcatctttaccagaata

SEQ ID NO: 12089 - DNA, 497 bp, Arabidopsis thaliana columbia
acctttccttagtttacggaatggaggtagtcatcccgaccgaaatcaaagtcccaagtgcgagaggaatcagaaatccacagagtgaagctgcgaaccgcaaaatgatggttgatgtcattgatactattgatgagtgtcgcgatcaagccttagtccgcatgcaaaactaccacaacgttgcagcccgctattacaattgaacgtctaaaacagatcattcgaggtgggaactctagttctacgtcggtttcaacagaaaacgacagagaaaggagcaggcaagttagggatcagctgggaaagtccttacagaatcacacacgtagtttggaatggagtctaccgcctcgtgaaatgtttttacatttaaattcatcatttgtcattgaactacgttagacttgatccccacctttgagtacgtaggcagcccgtacattgggtccagtctctaaattcttaaaatcaataaaaccgagttttgtcgtatacta

SEQ ID NO: 12090 - DNA, 611 bp, Arabidopsis thaliana columbia
cattaaaaaggaaggaaaattgcactctatagccatagaacaatgaataattagtagaataatcattagattcaaaatcaaagagtttttttttccttcattacataagtggtacggaaattcaagttacagataaaaagtttcagaatacaatggagagtatgtttagagtttcctatcagatggcgagaagtccagttccatagatgtagaaagacaatatggaacataaacatcacaatttcttgaaagctaagatgagataactttcaacaagattaaaaaagattggaagacacggttatatttctcctctgtagccaccaaaaccaaaatcgtatattctagaactagatatggccacattcttgtggtgctccagtgatgaaagagtctcgaatacgatgttcgagatcactacgacactacaataagtacagtccttgacaccacttgcatttagcaatggtctctactttttatattggatcattcatgggtaacagacaggggtagaggcaatatgtaaggtttgttaattttggaaatttgacctccatcaaaaaatattattggacctcatcagatatatatatatatatatatatatg

SEQ ID NO: 12091 - DNA, 522 bp, Arabidopsis thaliana columbia
gggcttgaattgggcttaataatgttacgacgtttacatatcttctagagcttcatactttgtagctttatgttaatgatcgacattcatggttcacgaatctataaatacggagtctcggcattgctagattgagtttacaggggagtcctaatctccgaggtccatctgcaccaataaactctatgaacggcccaaatttggtccagttatcataccaaaaagtagtttagagttcatggtctttgccaaaaggtagaaattagaatgaatttctaaacccatgattcattttgtttctatggtatcatttttctagctttttttctttaatattgtcataaaaacaattgaagaatgaagagtgcttctgcatagttgagtacttgagtaagtgatatctaattaatatcaaattatgtgaaaattataccatcttttatggagtcgtactatatatgtatatatgtgtttttgctatcttaatagatgtttatgggtctgattgggaaccaaaagttg

SEQ ID NO: 12092 - DNA, 571 bp, Arabidopsis thaliana columbia
aaatcacctcttagaagtgaataagattccctacagcttggccgagaggtaatgaggagtgtcccaatcagtcttgatgtgggttcggctgatctctctcagtgaacggcaaccacttagtgccattgtaagctcaaactcgtctcttagcatttgtagcatcttcctaactcccgcttctccatccgctgcaagcgagaacaagctcggcctcccgacctaacggaacaagtaattaatcacatgtcctttggatatttatatgatcagtgataatactcatatgcagcaacgggacacacatttgtttcattgtttggcttcatttcgacaaattaaaaacaacttaataaaacagaggatatatttgggtttgttttgaaaatttagaagtttggtgcaaaatgttaacaatttgtaaaaatcaagaagagataatcaaggttattgcaatgaaactgaaaatgaaaggagcgatttgaaaaccgtgagagaaaacaggggaaatgacaagagctaagtgtatatgatgaatgacttacaaagacacatgaagcgccaagagccaatg

SEQ ID NO: 12093 - DNA, 560 bp, Arabidopsis thaliana columbia
caaatccaaaacgagtaaataatgtgaatggaactggttctatcccccgatagtctataagaaatttttgaattttcgctagacggagtgttgtgcacgtaaatgcagacaaggccatcgcagctctcggagatgtcgagaaaccctttgaactcttggaattccaaacactctttagtttcaacagaagcagacgtggtctccaactccaaggccattgtcttaaaaaacagagcgttgtctggatgatttaccaaatcatcacagacaaaaaggagttttggagattgtgttttctgatgagacatgtcttacctcgaaatctttggacgtgatcagagttctctagtgttttgacactgattggaatctgatgagagattttaccggaagcttcactatgatttcttcgacgatttcgtgaagtatatggatcttcttagactctattcttcttcgtttgttttctcttcctgagaacaaagaatttctcttcttctttgttgcgagtttctgattcttctcaaactatgtcatctctcttctttttacctcatgaa

SEQ ID NO: 12094 - DNA, 732 bp, Arabidopsis thaliana
gagtgcttaccacgccgcaagttaggtaaggtagaccaccccataaatagacgagggtccaaaatgttaagatgtggagaccaattgtgtttcgaagaaacctatagaaccattgttgcttcaagtccatcacgttgtcacgtcctccgcactgttacattattacaacatcgtacgtatagttcacctttagttacttactgatcttctaagtgagttctcataataacttaagatcgattcacatatgttgggtttgtagagactttaaaatttttgttaccttttctctgatgtaactggtgtcgaatatccaaaagacgtgactgaaccagaatccttcgataggactatgtgggtcacggtctgaatctgtgaactggtgatggaactatgtgtactcacccaatctattggatgaccctgggaagaaaagatgattcaaagataattgtggatatatattagttctattaatatttttggtcaaaacgatatatgtttacctgaagcgcgaaaagggcagagtaagcgaatggatattcaagccatttaggaagcttaaagctcttgtgagtcaagttcctatggtatgaaaatgtaatgctaagactagtcactatagcgagaatcacaccgaaccggagagcttcccatttatagttaaacagagccaacagacacaatagatgacaaccccaacagccgaagctcgtatatcgatcggcatcc

SEQ ID NO: 12095 - DNA, 467 bp, Arabidopsis thaliana columbia
tgctgtaaagaaatatggtcaggtggcgacatggctggcgttaccattaagcgagtttgatcagattattacagacgacggtttgccggagagtgccagtcgcgcgctggagaagcaggatatctctatgctggtatcgaaaaatgaataatggcctgcaataacaccgggttactcatgcttcacagaagaagcatgagactagtttattttataaaatgacagacgcgcgccgttcggcgatccggaatcaatataaatctggctatcgaacgtctgaatgttatcaaacatcatatgtccaaatatggaataatcagcgccgtttatttgttgataactcgccagtacacgagttatgcacacgatcatgaggccagagtgactcgcactccgggatatccatagcaaagagatattcactgcccggataatctgcatgtgcgatggcatatgcaatgcagacg

SEQ ID NO: 12096 - DNA, 579 bp, Arabidopsis thaliana columbia
cttcttctcttcacacaaaatataaatcaaccaagtgtggtttattgaacgaggccagatatcaagagcagccatgtctttaaccaccttaaccgcttccatggtcaatctagagtaacagagacattgaagcagcttctcataagagtctttattaggattaatcccactcttctgcatttctaacatcagagccaaagcatcaagaggtcttttaaaatcacataggcccttaagcagagtactgtacataacttgatccggctcgcaatttgttccctcaaacaaatctatagcagactcgatatcacctgcttcaatatgagatttcatcagaatagtgtaagttactagatttggaacaatgccttccttttgcatcgattcgagatggttatatgcttcgtctagccttcctgcagcgcagtatccggttataattgtgttgtggaggtataaattggggattatagactttttcactttcccaatcacttccattgcaaagctttttgatccgtagttgcctaaagaagaggggattgatactaaaggctttgtgcgaatgagacgttgaag

SEQ ID NO: 12097 - DNA, 585 bp, Arabidopsis thaliana columbia
  unsure (1)..(585): unsure at all n locations
ttaccaaaacatcctaatattgttagctttaaggaagcttttgaggacaaagacgctgtctatcttgtcatggagatttgtgaaggaggtgaactttttgaccgcattgtctctagagggcattacactgaacgcgccgctgcatctgttgctaaaaccattcttgaagttgtcaaggtgcaaaacaaaatttgtaatctcctttttttgtgtcggttttttggcttcttgtttggttctttatgtttgttgttttgtgaaggtgtgtcatgaacatggagtgattcatcgtgatcttaaaccagagaacttcctcttttcgaatggaactgagactgcacaactcaaagccattgattttggtctctccattttcttcaaaccgggtactaattaattatcataactctattataacatcataaactttgaatcttgtgtcatcattttcttcaaaaattcggtttctgtaaaatggatattgcagcccagcggttcaatgagattgtgggaagccttactacatggctccagaggttttgagacgaaattacggtcctgagatcgatgtntggagtgctggtg

SEQ ID NO: 12098 - DNA, 549 bp, Arabidopsis thaliana columbia
tgtgctcacttttaaaaaatcatcttccccaaccccacaaaaggggactattttggctccaaatttggctgcagctctaacaaactctgctttctctggccacatcaacttgtattcttctccctgttaatgagtaaatcgtgattcagtaccacatctaacaatgagaggagcaatacaacacaagggtgatatcctgatatatataaacaccaatattcacatgtccaaagtatctgctgccatatatgataccccactcaggaaaaccaacgagtatttaactactcgccttacggtgtagagcttcgcggatgcctcctggaaacaacagaatatgggatttagcagacaagagattatggaggtgagtgccgagatggggaccgaccccatcatcctgagcatgtcataaacagacacatcaggtaacaatccatctctcagtctcgaaaacatcatggggtgcacaagaggccgcaaattgatgttcctctcgtgaacaaattgtcctgggagtgatattttgtcctcgccagtagcatgtga

SEQ ID NO: 12099 - DNA, 317 bp, Arabidopsis thaliana columbia
  unsure (1)..(317): unsure at all n locations
cgcccgtgtgcttttacggggatccctactttctcagatcccgcctctcgggcttttctccacgcccacctgctgcatcggggtctgcgctgcccgcccgggcccggtgacgatggggctcttactctgtcgcgcgctggttgtccgggtcgctaccggggttcctttgcgcaggatttccgtttcgacgacagctctagcgctgaacacggtccccgttcaagctgggttctctgccgcctctggtcctcgttactcaggtgnaccacgcgtgcaggttccagccttctgccgagttatatctctacaccgacgcg

SEQ ID NO: 12100 - DNA, 1281 bp, Arabidopsis thaliana
aaatgttacattgttctcatgttttctatgaaaatctattggctttagatgtgaagcgaagaaaatcgcctgtcacatacatatgtctgtatccattttaattgactacacaaaaaaaggtctgaaatcaataaaaagtttaaacaaaaataaattaaaattgtattactttcttacagctattacaaaaaaaaatccccaccaaacacaaacacaaacaaaacacacttttgggaaaccccacgcaataaccacgcactctcatctcatatttaacaaccttaatttctgatcacataaaaccctaatctatttctatccatatctctctccctatatctacttatatataacaaataaacacataagttgacatatatactatatacaagtatattaattatacatatatggctgaccctaacaatcctatcactgaacctaaagctataatccaatcttctacttcatcgtcagttactattgtgccagttcccacgtgcggtgacagcctctctgactctgccacgtgtgaaaacccttgtccacttgatactatcactactactactactactgtttgttttgcggctccttcttctactgcaagtggtaatgatattaatactttaatggccactgacaccgacatctctcgccggaaaaagaatccggtttatcggggaattcgttgtcggagtggaaaatgggtgtctgaaatccgagagcctaaaaagactacacgtgtctggcttgggacttatccgacgccggagatggctgctgccgcatatgacgtggcggcgttagctcttaaaggtggagacactctcttgaacttcccggattccctgggatcttaccccattcccctttcctcttccgcagctcatatcagatgcgctgcagctgcggctgctgcgactaggggtgcggctggagcggccgtgaaggtaggtcaaaagaaggaagataaagtttatgatacggcggaatcttcaactatggggtttgtggatgaagaagagctattgaacatgcctggtttgctagcggatatggccaaagggatgatggtggctccaccgtggatgggatctccaccgtcagatgattcgccagagaattctgatggagagagcttgtggagctattgatcgattgaaagcagtttaatatcttttttggatcctttgttcacgtttatgctagtcatctttgtttctttatcctatgattgttagagatgatttgttaaatatataatcgtaggggatcctc

SEQ ID NO: 12101 - DNA, 558 bp, Arabidopsis thaliana columbia
cttattagccacaatgtgtttgttaatcttctttctttgatttgtacttattagctcggatgtcgatgaaggcggagaaacagttttccctgcagccaaaggaaacgttagtgatgtcccatggtgggacgagctctcacaatgtggtaaagaaggactctctgttctgccaaagaagagagacgctttactcttctggagcatgaagcctgacgcgtctctagacccttctagtttgcatggtgtgtctttcttgaaacttttttaaatctcaaggaacccatttgatatctgaaaccaaacctctcaaaatcttttctgattggtataggtggttgtccagtgatcaaaggaaacaagtggtcatcaactaaatggtttcacgttcacgagtacaattgacttgaataaaaaagaagatagatagcttttgaagatgtaaagctcttaaacctcactttagtgatgaaagctttgtattgtctcaagattgtttcaatgtttctgtcgtctttggcaggtctctatgatctcaccaacatgtactaatatgtgtgt

SEQ ID NO: 12102 - DNA, 508 bp, Arabidopsis thaliana columbia
  unsure (1)..(508): unsure at all n locations
tnnnnnnnnnnnnnnnnnnnnnnnctaaagtgtcgttaaggccagaatcggagattattatttctgaagggagtttgtatggactagttaataaaagcaaaaaaatcaaaatatatggcacagcagatcttgtttttgttgataacaagataatgaaccttcgtaaaataacttatttgcaatctaagctagaaatttttggttcttctattatggatatattaaagtatatatttggtttaggtctgctagcaatttctataaaattcattcattcttactttaagaatgatgtgaatgaaaatttattcttgtaacgcatttggctccaattggagcgtttttatgactatttattaaaatatcctaagttaagcctgtttttaaagcaggcttgagcgtgaagcggacactcatacctgctttaaagtggcgtttttgtcgttacccatacctatattttctgttgttaactgccagaactgagcggttgacaagccagaatatg

SEQ ID NO: 12103 - DNA, 524 bp, Arabidopsis thaliana columbia
atagaccttgagaacaatggaagagccaaaccagacatcaccagacaccttaaggctgtcgagctcgactatactaggaatggacttaaaccggctcaagaaagtagccacctgttagacagacacactaagtgaggctcaagagtcaagatagacatgacaaatgggacttgtcaggaaatcattttcttcatttaccttcttgaactcgggtcccaattcaattgacgggttcgaggggttagttctagctttgtttcgagtgacaaagccatcaactaaggtgtagagatcagactgtggaagaaagaaaacttgaatcattaatcaaatgtttcaaaagatatttgtgactctgttgcgttgttaaacgtggtgtatagagtttacgtggacgagcagcaagtctgaacttgcctgcactggcaagaaccgtgagcgaggtacattaacaccgatagcgttgtcaaagaactgttttgagacagaatcacacgaataaggagttaagatcagattagagt

SEQ ID NO: 12104 - DNA, 555 bp, Arabidopsis thaliana columbia
gaggatctacagagatcctttttctattagagtatctggtacaaggttgtagcacatatttcgttcaagtgggggtgaaaattagatgcatcgttttaaggctcaactcttcatgaacgatattctctactctcaaaaatggtttctgacctctgagttccttttgtttctcagggaaaacttgttgagaaggattttgacatgcaaaaagctgctaacggttctagtatccgagttattcaaagagtctataaagcaaatgtatcagaaaattaccttgaagttcatcttttctgggctggaaaagggacctgctgtattcctgctcaaggcacttatgggccattagtctcagctatcagtgcaactccaggtatacatacagcagaaactttcatgatcttcgtagagtccaatgtatcttctaactagcggcttttattctctgcagatttcatacctactgtaaaaaataagttgcctcgaaatcgaagaaaaccattgttatcattgtaggggctattgtaggagcagggatgttatgtatattggtga

SEQ ID NO: 12105 - DNA, 880 bp, Arabidopsis thaliana
cacagttaaaattaagactgttttaaaaaaagaaacccttaataataatcagtcaattaagctgtttaaaatttgtatgaatttatttcagctggttaagccatataaaaatccaactaatgtgtcagcgtttttttttttgttttttttgtcgttgatgcaaaatataatatctttggaaatataataaaagaaacaaaacaaaagatggtctactaaaagcagttgaatcaaaagtgaagtctctctatcttctctctctatcaagctcattgtctctctatttataacaacacttcacttccattctcaaacagcaccatcatctttagacagaagcaaagccaaaaaaaaacttactcatcataagatatctttaaccaaaaccctaaaagaaacctcctttcaaaaaaaccatttcttcatcatcatgtcaacctccaaaaccctagaccataataaaccatttgaaacatcccaaacgcaaatgggttttgctctgatccaccaaaacacatccgccaacacaaccaccaccaccacaaccggcgagagacgaggccggagatcaaagcaagcggagccagggaggttcctaggagtccggagacgtccatggggtcgttacgcagccgagataagagatccaaccaccaaagaacgtcactggctaggcactttcgacacagctcacgaagctgctcttgcctacgatagagctgctctttcaatgagaggtactcaagctcgaaccaacttcgtctacactccaactgatgtccacaccatcctcacaaaccctaatctccactctctcattgtctctccttacaataacaaccaatctttcttaccaaactcttctccacagttttcatcg

SEQ ID NO: 12106 - DNA, 531 bp, Arabidopsis thaliana columbia
aaaaggcataagtaactctagctttctttatcagtgtgactggtgttcatcccaatttttttaatttgtaggggaactgcagtcaccatgaagaagatgttagagacggcttttcccggtttagatgtgattctcgcaaattacccaccaccagcaccaaaacgccttctagctaaggttgtgccggttgttcagatgggaagttattggtatgatagttgcaggtgatcgtatccttcccatgattggaattacgaacccacctgcttggttccactccttgagggccaacagatttggatccatggcttccacttggcttatcggaaactttctgcagtcttaccgtcaaagctcaggcgcctttgaagttcactgcaacggcgaaccggttagtaattaatggtttaagattatttccagatatgtaagatcagtttgtactaaatcctgtgtttctatttcaggtgttctctaaattgaaagaaggtagattccaggagagatcgagctgagagatctcatcagtaa

SEQ ID NO: 12107 - DNA, 411 bp, Arabidopsis thaliana columbia
ccctgttatgccgcaaaatatcattagcaaacaataacatatagtttctgcaaagacttacgagggacaacggcatcatgttgctgcaatagctacaaaagataactaagacaaagtaaccagatggttaaagtttacattttaccttgcatatggtgtcaaaacccacgtttgcctccacaaactgatttttgagatctccatttgtagtaactggaacaccaaccacctgtaatttcataggagcttaattaccgtagcatttttataaaggaatttaaaatgaaactgtagaaaaagaaattaggaccttagttgagcattttgcagcagcaaaaaattcagcgagatgagctgcatctgtgtttgatattacgccttcaaaaaccacaatatatattcttggtttag

SEQ ID NO: 12108 - DNA, 602 bp, Arabidopsis thaliana columbia
cctgctcaactttctcgttagcaggtaaaaagatcagaaagcaccatgagagcatcttgtctctgcccaacattgataagctcggcaaacacgcaacattcatacatcaaagcatgagtcaaaaaggtaagaatttgcaatgttaccatctgtacgcttcaatgcactctcaggtttggtgaaaatcgccatgattcagacagggttggaccctgtgcactagcaacagagcaaaccccaagagccaggcctggattcagactaaagtcttaataaccagcaaactcctactaacctgaaacaacgatgatttcaatgaaatattaatcatcagatcaaagacaagattgacattttgacaaacccaccagctaaaatcaatggaagcagaatcataaagttttctattttacaattaaacaactaattctccaaaacccataattcagttcatactatcaaaacttttgagcgagtgtagaaaacatacccagcggtgaaatggttgatgattcggtgcgaacacttacgagaccaatccaaagatgccaaagattcaatcttgcgggagcagaagaccaaagagcgagagggacttagag

SEQ ID NO: 12109 - DNA, 599 bp, Arabidopsis thaliana columbia
tgcatgtatattattgtgaacagatcatagaaataccttcaaaaccttgacagccttggcacctggtctaaatgcacgaatcaatcgttcaaatgcatatagtagtacgggaactgccagatacatccacgtctgtccaaaggtaataataacaaaggatgctttcatcaacaaaaattatcatatgatcttttcgtctgattttctgaacactccgtgattaatcaagacgcaagaaaaaatatatgtatacgtaccgtcttgtggtaccattcctttgagagataaacaaaatagccatgcacgatgagaagaacataaacgatgacaaacaaatggtgtgagtaccaaaatgcgttgaaaccagtcaatcgtttcaacgattttggtaggtttgcccggtttcgtctgaaccacgactgcgccaagacgtaggccactaacataagaaccaccatggtaacaccggtccacccgtctgtccctttcatgaaccatccataattttcaggcctctcgtctccgaaaaactttttcattggctcaaactctacattttttgcatgcacaaacgcgggaaatacatgccaggtgagata

SEQ ID NO: 12110 - DNA, 384 bp, Arabidopsis thaliana columbia
tatgatatccctcgagtttgaagccatatttgacaacatgtgtcaaatcttcgatctccactatgtttgatagccgataaatgattccgaatatgtttatcaatccacccgactagccgacttgatggattcagggatgcaccatgtttacgctcattgcactctcgccaaatagtatgaattgagacctgcagtagacaacaagctagaaagcctgcactgcgatcgtgccagttgtttgagacgacgttactgatggtgtgccagtccgtggaatagcttgtgttgtagatggtcgttgttaatggttctcaccatatccgtagcataggaacattctgatattgaaacattctgacattgtttagtgtgacggctcaacaa

SEQ ID NO: 12111 - DNA, 510 bp, Arabidopsis thaliana columbia
atgacttaaaccaaaactagattatggcaatacgcgttaccttgtttaagagaattaaactagttgtgtaatagccggtagaaggttagagtatacaaaagcgattcaaagaaaactgggagaactgagagatttatgcattgaataaagaaataaggagagttcggccgtttcacaagaaaaacaatatattttctttgggctctcactcaacaagttagactttgttgagaagtttgctcgccagttaagatgaataaggaggcacggacttgaactggagaaggagatggagcaaccccaagcccagcgttactaccaagtccaagccccttatggtgtgcattcgccattggaccaggctctggcgaatggaagacgccttgaaactgcatatgagacgattggactggagcagagttaaagcaccgtgaggtgtttgtccagccatgttgtaatgaggagaagactgaaggcctgaaagatctcttggttgcctgtccattggga

SEQ ID NO: 12112 - DNA, 872 bp, Arabidopsis thaliana
actctagaggatctcatattaacaaaaaggtgtaacatttatgaagtttagaaacagaaggatcattagttatgaagacatcagaaggatcattcaatttgtacaacacaagatcctgaacctactactgtcagaaagaaaagttatcctaaaccacactatagttggtttgatattacaggtcacggacctaagtaagtactatcttaccaaaaaaccaaaaactaaagtttcattatctcacactatccctttcaaaagtccacataaggttgacaagttcttctaagcttaaacttgaacaaaatgttaccttgaggtcccctctcttcccaatacttctccaccctgtataaaccatcatacacataatcctttcctctgttgtccaatcgtctttcgccacggatcactcgcaccggagtcttttccttaatgctattagctaaagccaaatttccaccaacaagcttctgatctttgattgctttatgatccttgctcctcatattacctccttgaccacaatagatcatcacatcgttgatgaatctatccccgtaatcattaccttctgatgaaacaatgcttgtagctacttccttgtttcctttatacatgtagtcaatcccactcatgatgccaaaatgaagaccgattacactgagtgctgctttgaactgaattttatctccaaccttgatcccggggactgatccaatcctcttttgagagttaacttgcatccccatttccctcagaatagtccaagtttggtaatctatcctgctcttggcagtctctgatccactcttcttgctgccttgttacgatctagctcatcaaacgacaagtgtgaaaatacgcaacac

SEQ ID NO: 12113 - DNA, 1844 bp, Arabidopsis thaliana
agtaagtcttgtgggatgacgtagtcaggacctagggttagagtgtggcatggcctgaggaatggggttatgtccctagtaacctttcatcacacggtacacctacatgtctctaaaccaaaaccttttatataatcccatagattactacatgctcaaaaagcttagatgttattctgagaacatgatatattcattacaaagtgcaacattgaaaagatctgaaagtgtggtggcctcttaaaacacttagggcaaagccactagctcaaatgatatgggagtatttacagtatttatgcaccaaatttacatagttccaagttccaatggcaaggtcaatgatagacttatttattaaaaaagttagcctcccctttatagaatttcttcatgtttttttttttgttaaatacattagttcagaaggacaagatttcaaaatcgagccatatacgggttatttaataaatccttttttttttcttgagattctcatctgcggaaactaacaaactttacgggttgaaaacattttaaaggacagccaggttagataactaaaaaaaaagtgtgaatattttaaccaaaagtaaaataaaaaatgttttacgtttgaaaaacaaaaatcagggtatttggtagtatacttgttgtagtatcctgttgatgtattcgtatttctatttgtggacgagttaaaaggggaacatgtgtttctatcatagaaacgaatcatctataaagtttagactatcacataatttaattattttatatatatgctaagtgcgaatcatatagtcaagtagaattgagtcaaatattatgtagaagtaatatatagttaagatgaaataaccttacaacccaaggagcaatggatataaggttcttgaagacttcggtcacaagaagtgcaatagttgccagctcctttgaattgtctattttgtggtctcttcttgatgaacaccacttttgcactatttattgtataagcctatccacaattcaacacccaatccatttatatacatatatagatatgagataatacatatatgtataatagattacttacttgaacgttagagcagtcgatgagtttctgaagatcttcaagccgaacaacgtcgtgatacacataacggcgaacttgaaggagtctatggaatctatgagagggtacacagtgagggcagagactggtgcaacaatcaagacaacacacgttcctctcgttcttcttcgccgtctcatggtatggacatcccacgaagaacttctctgcgtatagcgcatccaaccatgccggtttctgaattccctaccaaatgatttacaaaatctctaaaatatttatctcataaacaatcttaaataagtaaataaaacttcataccataattcaactgtttcctacatccaccattaaatctataattaagtaccaaggagccaagatgaggataaagggtacaaatataaggaattcggtacgatgattgaggtaatttcactacttaagatggtatagaattgaagaagtagtaacctaccatgaggactcaactgaaagtcagctttgggagatggaaacttttggccactactcactacaaagagtaatattaggaagagaaaaaggattctttaggggagtacttgatgataggatttatggaggatcacaagggagagagaaagagagaaaaaaaaaacttatatttgattattcctcggagatataactcttttacacattttaaatatcatataaacttggttgttgtttattagtgttggtgagatgagagatagagggaagaaaaagagagaga

SEQ ID NO: 12114 - DNA, 479 bp, Arabidopsis thaliana columbia
ccgagaaatccgattcaaatgtttttggtagaatcaagatcactgatttaacatcaatttctctactttctcaacgaactctttttaaccattaattagattgaatctactaagagctacacaaaaccaaaacaacatgacgagaaaaagaaaaaaccaaaacaacagacagagagtgagaaaaacctgattcagctcatttatattcatgatttggggatcgaattcatcgtcaattctactgctgaaagcccttttgatcggagaaaccaccgccggaaatcgacggagaaacacggcgcgacggagcgtcgaaatcattttatttcaccacaagagatcaagaacagaacccaagtatgtagggttctgctaaaccggtaaaagaaaactaacaaatcaataaccgaaatttgtcttagccggtcgaaccgaactttaagaattcttaggccaccacattgcacaattatattgga

SEQ ID NO: 12115 - DNA, 564 bp, Arabidopsis thaliana columbia
cataaagcccttctccggaggtagcacatgtgctctgtatgtacctgttcaacaaaccccaccaacgatttacatcagcttttcatgttacgatataggtatctggtaaataaagagatttggtttggttttctttggctcaccagtgtcgttgacggagagagtgaagtccaagcttatcggttatctcagcggcgttcatcgcatttggaagatcttgcttgttagcaaaaacgagaagcacagcatctctcaactcatcctgcaacagtcaaaaaggaaacaaaatgatgccaactgcttcataatgtaacattagagaaggagatttttgtttgagttttacttcgttcaacattctgtgaagctcatctctggcttccacaacacggtcacgatcattgctgtccacacaaagataagtcctgagtgttctggaagtagtgccccacaatggacgaatctggatgagcaagcaaacaaaaaaggttatattggaatagtgaaagtcccattcagtaaaataggacagctcatggagaatcaaggatttagctatagtaa

SEQ ID NO: 12116 - DNA, 886 bp, Arabidopsis thaliana
tctcgcaaggcctcgaacaacttcagcaatctctcatcgatactctcgccgcatctccagtcattgacggaatgcaacaaatgcgtgtcgctctcggaaagatctctaatctcgaaggctttatccgccaggttccattttctcacctatcttttttttttttttacttcatttgctcgaacaataattacaaacgaatgcaaacgagagaaaaaaacaccgtgtgaaatatacacaaaatttgacctactatataactgtagatagtttttgactaaacaaaatttgcaacgtattttggtttatagttagagaggaattcgaatatattttttagaaatatattgggtaaattttaacgttttatatatatactagatgtacaaatgtttaaaaatgcggaaatacgtgcatatattttgcgtacatatatgaacaaacgtatgtgctggctaaattatctaattgaaaaaaatacaaataatccagaaacagacaatacgtgaaagcaacattagatgttctataataattatatgttgtattggtctttgatttaattattccaagagccaaatttctttcaccaacttggttgtaccttttatatataatatagctgaaaaaaagacaaagagaatatgttagaagtattctccatctctttcaatgtttagtattgaactcaacaaaaatattttaagaaaatttcttgatttcaaacattatgatcgaattgattgatattgatatgcattgactttagtaatacccattagcccaccaaggtagtaagtatgtatgcaattataattattagttactaataatattaccatcagaaatattgaaataatcttaaaatgtcgaaagatgtgattactaa

SEQ ID NO: 12117 - DNA, 569 bp, Arabidopsis thaliana columbia
tacgttcgataaccagctaatcctgaaacttaaaccggtgtattccaatccctggttcatttaattaaaccggtgattaatcgggtcggatattcttccacattaaatacccgttaccgggtcggattctttttgatccggacggagcagactcgattggggaacaattcattcttctgggtgtgttgtgtttgagtttttggatcatacgaagaagaaatcggcgggagaagctatgtcgaggctatgggcgagatttgcgggattgttcagtagcaagagttttatcggagtagacaagactggtaacaagtacttttccagaatggaggagattgacggattcggcgagtattgttcttccaacctcttatttccttaaaaaatctttttttttgtttgatttatgttggaatttggttattgcgtgaaatttatgtatctcttaaatttgtcaagttgctgaaattctttggtttctcggtacgatttgatgaacagctgtctttgcatatcgcgagttgcagtgaagcaatggatttagaaaattaatatcgtattgtttaaag

SEQ ID NO: 12118 - DNA, 417 bp, Arabidopsis thaliana columbia
caggtcgttccgatctcgcttccaagtctatacttccgtcgatcctccgtcttcttcagcttcttccttacccatcttcccgccattatctgaatctctctctgaaggtccttcgaaacctctgcgcaggtgaggtttcgaatcagaactctttcgtcgatcatgacggctctgctatcgtctccgacttgcttgattccgccattgcggatttcgagacagttaggttcggattacaggttctagcgaacgttgtattgttcggagagaaacgtcagagagatgtgtggctccgattttacccggagaggttcttatcaatcgctaagattaggaaacgtgaaacatttgatcctctgtgtatgattttgtatacttgcgttgatggaagctcagagattgcttcagagctttgta

SEQ ID NO: 12119 - DNA, 603 bp, Arabidopsis thaliana columbia
caagatttaacccaacataaactcctcattcctcaacattaagcaactttgatttgtttccaacacaaatgtacatttctttgactatgttttccttacacctgaagaaactgaacagtagcagaaccaagctagctatgaaaacctaaaacaagagaagacacagaacaacacaacacataaagaagaagaagattcttcccagcgatttatctgcctgcattatccgccttctcatcctcggcccgctagtccctgcgagattgtaagtgtccggatacgcaaatctatccatcactcgtgttccaaacaacctcgtagctaccatttctccaaccatcaccatcaccggatccaaaacagcagagtatgataaactgttcgagctcatcacccctgagacagggtagtaaccttcctgtgggctattgaaatgaacccgttgtgataaccgcagatcagtacttgcataaggtgaattcggcatttcaagccgataaaccggtcctacgggtcttttaggcacactgtttttaccttcctcctgagtagtacaacggcatctaccatacaaaggaaccaaagtagaatgagaactttaga

SEQ ID NO: 12120 - DNA, 586 bp, Arabidopsis thaliana columbia
  unsure (1)..(586): unsure at all n locations
gatatccatgataagactggctagttgagacatcatgagtattggatcagctcccaagtccagtaactctctagctttcttaacggtctctgccgtgtcagaagacaacgctaattccaagagttcaagcaatttatcatctgaaacaacaccaacctgcacaaacaccagtagtcacatttacattactcattggtccaagttttacccaatgcaaaggaaaggaaacatagaacaaacaaaaaaacttacaagctcatttacaagatcaacggtgattcgttttcccatcaaactcaactgctctaacatggtttcagcatctcgaagcgagccatcagcattcaaagcaatcaggtccaacgcctgtgattccacatctagattttcatctgaagcaatcttccttagtctcacaacaatgtcaccatctctgactttgttgaagatgtacttctggcaccttgactgaatggtccgaggaacattgtcaaggtcagtcgtgatacatacaaagacaaatttctgcagagggtctcaagaaacttgagtanagatagccaagtcgtagatggtaataaatgca

SEQ ID NO: 12121 - DNA, 1097 bp, Arabidopsis thaliana
ttttattataaagacaaatgctctcacactcttggggacactttcacatctcatcctctcactctctctctcctttggattcttcaggtactctctctacctctctttctctctctgtctcagtcgctgacttatcatttcctgtcgttagatctctcagtacttggttcatagttgtttcatagcacgcactagtgaactatgtgggttttttaattttaatcatctcagtcttggagaatttcaaacaaagtttcaaactttgctcaccaacttttatttatttattttggtggtagaaaacagactttgatggctttgtaggaatactagatgtgtagatctaaagattataaccattttctgtgttcttgttctttcagaacataacttcatgtctttttgtctctctgttcactagctctctgtttccatggactccacactatcttcttcttacagatttatttcatacacatacactgatacacatgtgtgtatacgtatgtgtttatgtgtgcttattatactctttttggattcaagaaactaatctttagtatttttgacattctggtagatttatgctcacttcttaggccttgttgactttaacagtgatggattttgaaactctggttgatttgattttctttttggtttgatgcagtgaggagaggaaatgtcggatcttcagacaccgcttgtgaggcccaagaggaagaagacttgggttgattactttgtcaagttcagatggatcattgtcatcttcatcgtccttccattctcagccacattctacttcctcatctacctcggggacatgtggtcagagtccaagtcctttgagaaacgtcagaaggaacacgacgagaatgtcaagaaagtcatcaaaaggcttaagggtagggatgcttccaaggacgggcttgtctgcactgctcgtaagccctggatcgctgttggaatgaggaacgttgactacaagagagcccggcatttcgaggttgacttgggggagttccgtaacatccttgagatcaacaaggagaagatgactgctagagtggagcctcttgttaacatgggacaga

SEQ ID NO: 12122 - DNA, 518 bp, Arabidopsis thaliana columbia
gatataggtctataatctttcatttccttggtctcgaacttcttagggatgagagcaagtatggtagagtttaccccttttggtaagaatcctttttcaaaaaaagacttcaccgccactataaattcagcacctataatctcccaagtagctttatagaactcagttgtaaaaccatccgggcctggggacttatcactcgacataaaaaacagaacagtcttaatctcttcccctgtgactggttccatcagtctacttcgatcctctgctgtacacctaaatggtaacaaaacttgaagttcctccaatgtagctccctcaaagtcatttggaaccaactgcaaaaactcacggaaaacagttctgcttcttcttttatttcttctcctttttttgttacactgccatcttgcctttgaatctcacgaattgagttatgcgctactctcgccattaccgctcgatggaatgttttgttattcttgtcaccgacttgcatccaatggagctttgac

SEQ ID NO: 12123 - DNA, 531 bp, Arabidopsis thaliana columbia
tgtctcaatgagactaagaagtgcatccatgtatgcttttctgatctgttggttcttaggacggaaacctattgctgtgtccgggtgtcttttgaagatttggctcactgattgtacctgcaagcaagaacaacataaactacatgagaaccaagattttaaggttaaaatctgaaaacaagttaagttagtttgtgttcttacttgtgaagcaagaacctgaaaaccattgacatcaatggtttccagaaaatcactaatccaccacgactcataaaaagattccttattgttacactctgtaccaaaattttctactgtcttcgaggtgtaaccatggacttccattggtggagagatgaagcatcatcatcatccggatactcttcaactgtaccatcctcaaacagatcttctttcgcggtatcatcagtatccgcttcggaaactatgacattgttacatttcataccacgatttcctactgaacgaaaagctttatccatgcattcaattggttcaaggacatat

SEQ ID NO: 12124 - DNA, 568 bp, Arabidopsis thaliana columbia
tgtatatacgccctttgcgtgaaaagactaaaagaagcaagacaattgtaagtagtccatctaatcctctttttgtgctaaacctaccagaatgatctgatttatatttatactcatcagaacaatgacctgaatcccatctggaatgagcattttgaatttgttgtggaagacgcgtcaactcaacatttagtggtcagaatatatgatgacgagggtgtacaagcatctgagcttattggttgtgcccaaatccggctttgtgaacttgaacctggtaaagtgaaagacgtctggttgaagctggtcaaagatttggagatccagagagatactaagaaccgtggagaggttagatcggctataaatttcccctaattaaataaaccctgtgattttgtatctgtacatggctaatgaatggacgttattgttgattctctgtaattcaggttcccttgagctcctttacatcccttatggttcgggacacggcattgtaaatcctttgtcacttcatcgatgacgtccttagagagggtgctcaagaatgatacaacagatgaag

SEQ ID NO: 12125 - DNA, 575 bp, Arabidopsis thaliana
cattaactttcaaaacatcaaaagggagaacctctccaaaatttggatacggaacttctgattcagttgaatttgtcctcgagagcaaaggttgtgctattgtcggattttatggatggtataagactgggtctgggtatactacggctcttggtgcatattattatccgatgcctctacctccttcttcggaaaagctagaagcacaaggtggtgctggaggagctccttgggatgatggcagtaatttcgaaggtgttagaaagatatacattgggacaggtgagattggtatcgtttccatcaagtttttgtacgaaaatgacattcatgagataatagtgggagatcatcatgggaacaagaacctacttcgacatgaagaggtgattactactacttcagcctttatccaattatacaaagcttattgtatattagatctttgatgttattcttttggattatcttgtttttttttaatttagtttgacctggactatccgagcgaatacctcacatcagtagaaggtagctatgatgtagtacctggaagtgaagaagatgaagttatg

SEQ ID NO: 12126 - DNA, 456 bp, Arabidopsis thaliana
taatttttaaataatatattttacatttataagtttttacttttctgaaaattttaaattttaatgaattatttcttattaaattatttacgattttaaaggaaagatagtattccacaattttctggaatacgcaatttttaaattttacggttttgacgggaaaaatacaattctccgattttacgattttgacggaaaaacgtaattctgcaaattttccaccaaaatcgtgattttattatattggcgagaacacaattttacggttttgacgggaaaacgcaattctctgattttacggttttggcgggaaaacacaattttccagccaaaatcgtgattttattatattggcgaaaaacacaattttacagttttagtgagaaaacacaattctccgattttacggttttagctggtaaatcgttatttttttgtatgggtgaaaaaaat

SEQ ID NO: 12127 - DNA, 836 bp, Arabidopsis thaliana
gataagatcatgaagttgtagttaatgtgaatgtgttctagtgaaacaagaatagatggtgtagcgcagtagctagtgtacgtgcgggtatctctaagggttataaagttttaaattaggcgatgcaatgccttcatacatacacgcaaatagatgagggtaaatatattaaattgacttggttttcgaccatttcttttactttcgtgggaaattttggcggttatcgatgcaagttaccaaagtcacaaatactaatgaaatttattttcccttgaaagaaaggtactctctggtgttaatgtatgtgttgctagcacgaggggatgatgtgagtgcgtgtgactaattcactgaactctgtttgcatgaaataaccttaaggacaaggaaatgcaaagatggaattgtttttaaatgagtttttattagaaacaagaactaatggtgtagtagatctatattcaggttaaggctttaaatggaggagtatttatatcactccagacccatcttccactagccgcctcgctttatcccaatgagggccaagttttctcaacgtaaaaccgtcggaaaatcttgcaccaggcggcaattaccccgttgggtttcttgagcacgtgtttcacgttgctgtaaaaggtggtgaagttgaatcagtgaagggcttgtgcgacggtgactaaatcgactgatgattccggcgccactagctgctcgatgacatcgttggtggagtgagcttataatggacgttggattactttgtattttatattaaattaatagatattaatattctgtcacagcttaaaccattttttccccagttg

SEQ ID NO: 12128 - DNA, 641 bp, Arabidopsis thaliana
cgaagctcctccatcaccaccttgtgcttctagcttttccgaagcaggagaaagaggcatcggaaaagaatatgcaccaagagccgtaagataactaggagtccaccatccatgaaatccgacaatagcacaatctttgttctcaaggacaaattcaactaaattagcagttctgtctccaaatctttgagaggttctcccttttgatgttttaaaagtcaatgatgctaccctatcagtactcatggtcccgaccacagacgtgataaattcatttggatagtcaaccacaaactgcaataaaaggagcttcagataagctatccaacaatatatgtatatatatggtcgagggatgtatttcattttattttctgttaaacaacgaatatatagttataggaattctgacctctacttcttctccagggtaaccatcttgcattccgtggtcacgcttttctactttgccatcgttgtcataggttataccgaggcacgttatataaccacaatctcgaaaacggaaagctttctaacagcctggaaagcaccatgatcccaaagtgtgcctagagcagtaccttgccatgccaattttgtaggagtaatcggagtgaaatatgcacaagagacttaga

SEQ ID NO: 12129 - DNA, 549 bp, Arabidopsis thaliana
tctagagcctgtgacggtgcagcatttctttaccacgggaagtattacccgttgggtgttgctcctagtgaagttcagataaaagatgttgtggagtggttgcttgcgaatcatgcggattcaaccggattaagcactgatagtttaggcgatgcggggtatcccggtgcagctgcgttaggggatgctgtgtgcggtatggcagttgcatatatcacaaaaagagactttcttttttggtttcgatctcacactgcgaaagaaatcaaatggggaggcgctaagcatcatccggagataaagatgatgggcaacgaatgcatcctcgttcgtcctttcaggcttttcttgaagttgttaagagccggagtcagccatgggaaactgcggaaatggatgcgagtcacgcgctccagcttattctgagagtctctcttaaagaatttgaggcggctatgagctctaaagttgtcgatggtgtggttcagcatgtagggatatggcgggggacaggcgattgatgagttaggtgcagtgcacgagagatgg

SEQ ID NO: 12130 - DNA, 505 bp, Arabidopsis thaliana
ggggataagattctttaaactttattacgtaaaaattcatcgacaatgaatatttaaatatgggttcttgaggcgcttatacaaaacattttgtgattgcagtttgtgcttgattatccaaatgaatttatcacgtctgtggaggggaccttagcagctccgaaaagtgttaacatcacgtggattacgtcattgacattcaaaacatcaaaaaagagaagctctccaacatttggatcagctagtagtagaaaatttgtgctggagaagaatggtagtcctcttgttgggttccatggatataatagtgttgggaatactcttaattctcttggagcatattatcgcccgattcctcctactcctgatgtggagaaactaaaagcacaaggtggtgtggaggagcttcttgggatgatggtggtactttcaacagtgtaagaaagatctacattggactaaacgaaaatgttgtaggctttgtcaagtttatgtactacaaaag

SEQ ID NO: 12131 - DNA, 582 bp, Arabidopsis thaliana columbia
tgtgtaatactttgaatggcagctgctatggttccatttaaacgacttgaagacaagtttctattgaaatgcacattcaaagtgttagtgatcaagattactaacagatcttgaagagtgcgtgcgtaccactaaatttacgacttacaaagaagtgattcttggtggttgggagatatttctgttggtgcagtctaaagcgtcccacctaagctgctgagggaagcatggatcgccttgccagttgattctactcaatccatagctggctgagatgtttttcatagcaaccactgacataataaaagaatcgatgtgtttttgatttatttcgttactaacataagaaagcatagacctggaaaagaaagtcacgtaccgtcgctttcatctgtttcggaccgtggaaactgaataactgtgtagacttccaaagcattaagtagaggtggaagagttgatcttttggttcttatcagctgaaaattacatgcccatccattgcaacttatcggtgacgagctttggaaggtctttatacttagcttatctgggacttcagggccagcacagataaatttt

SEQ ID NO: 12132 - DNA, 550 bp, Arabidopsis thaliana columbia
cgactcatcccgctgtgggagaacaccaacaataatcattaattacgtaccaaaaatggagagttttgttggtatcgagaaactcctatgattacatatctacattctgtgtatttgtatgtgcaatgattggactaaagagcagaaactgtattccaaagaagtacgctcagatgctctgtctacaataaaacatgttctatatttatgtgacttcatacaagaacatgaccagattctgaattttagttcgtaacctatagattactcttacatacagatatacaacttaaacattttttcatcaaaattctttagcagtaggtttatctcacttacagagctaacgtcctgttatttttgtgaggctcacattgttgatcgatgctcttgggtcgctttgtcccgaggattcaacttctgaagtgccccttctaggtataaatgcaggttgctttggctctggaaggtttgagttctcgctacttagcatccaaatcacccgttgcaacgctcggcctatcatttgcgtgatcttgtacacacaata

SEQ ID NO: 12133 - DNA, 411 bp, Arabidopsis thaliana columbia
agtcgacccaggaaatgcaatggggtggttcttgcaaaccagcgctctcgggtttttctcaatgcggtttttattgaagagagcgaaagagcaccagatttaaacccagccttgtagggacgttgtaatcaaaaaaagttttacatgacttgaatgttttcaagattgaaaaacacaaaataaaagatctacattaatcaggatattccaatttctgaacaacttatggttccgaaagtacctcaacataaaataaaagatctaccttaaacagaacattctaatttctgaacacctatggttctgaaagtacctcaaacacacaaaataggtcggtcaatttatcaaactccttttgtctgaacagaactagaaagtctaaccaactgtagaaataccatcagaactaga

SEQ ID NO: 12134 - DNA, 558 bp, Arabidopsis thaliana columbia
ttgtaagaaaaatgaagaagtattattcttcatccaatttttccatgctgcaacagattggatgttctttggtttcaaactttgtaattgtgtcttgcccatctttcgtactttagttaaaagcttggacttggaagaccgccacaaacaatccatgtgcttaaacacagaatcttattgctatccatcatttaaattgaaccttgcctgtaatatttttcaaatgcaaacattactttataataacttaagatggaatactctatagacaaaagatgaagtaccttaatctcctcccaaagtctgtctttggtttgatcatcaagtttcctccaatcgatctaggagtacaggtacatgctccctgactagaggaccaagacacgatgaaagtgttacagaccctttcccaacaggttcacctaaagcagtgaattcaacatcaactttatcatcatggtgttttgcactccacgcatctttgttggtcttctgatttcctcgatttgacatttgcttcttgtgttcatctgctacagttgatggctggatagttta

SEQ ID NO: 12135 - DNA, 487 bp, Arabidopsis thaliana columbia
gaatgctactcagaaaagccagaaagttttcgttcatgtgtctacagaaattgctgctcatgaagttgaggaaatcggtatgtccaaaagggaaaacagttcttttgatgatttcatcatctcggttgagttttaaagaaatgtgttttgtgattgttctgaggaagattttctgacacttacctgcgtcattcttgttcttgtacaggcgtggagcatttgctcagggatgtgaaagacacaacaatcagtaccctcgcgactgaggttcttgtctttacaatacatgaaattttcattatcttcccattaaatgtctgttgaaatcatgatgggggacttgtaggatttgtattgatgttcttgcaaggttacttatggacataatagttttctgctcgaggacataaataactttatagtattttgcaccaggtcactgcaaaacttactgctttgaaggggttggatgcacgtcttcgggaga

SEQ ID NO: 12136 - DNA, 531 bp, Arabidopsis thaliana columbia
ctcatctctttagaagacgaagctgcagccgccggaatcatcatcatctcattcttccgacattcctcttgcattgttgttgttggcggaggagatttcttgagaagcaagtcaactttcgcgtactcctcacgctcttgcttaatctctttgagcatagccgcaacgtctttcatggtaggtctctcatccggagacgagttcacacacagcaaagcagtgcccaacacttgcatcatctcatccgcttcagcttcggttcttgatctcaatgtcgagtcaagaacttcgaggctacctctattctgcctcacccaatccactaagtgaatcccttctggtaccgtagggtctataggttgttcccagtcaacacttcaagaactaccacaccatagctataaacatcactcttctctgtaatcttcatgctatatccatactctgcacacgacacagacttctaagtttcaacgcaaaatagaaaccaaaacgtaagaaaacatctaactacacttttcatgattgtga

SEQ ID NO: 12137 - DNA, 695 bp, Arabidopsis thaliana
tcttgttctgtgaagcgtgaagacgtgcgtcgtaagaaagctttaagggatccattgagctacacactttttccctttcgatctcgtctagattcggatgagctttcaagaagatgtctatagctctgtagagatcgtcgtctgattttctagcggatttcgggacaagattcgcaatcgcgttgaatttggagattgttaggtctccgtaagtagcgatctccgctaagtaagaatcaactgttttagctactctttgtagtgaaacagagcagactcctctgttgaagtctccaccgttgaaaacaccaacgtttttctctttttccacgaaagcagagatgattcttctgacactatcgagatctagtaaccgttcgccgtcgtaggtgaaagacgggatcaaaagatcgtcgacggagacgtgttctagaacgactgagattcgcttctcgagctcgttcttgcaggtcaaggaagtgtctaagaagaccgcgcaacggaggagagaacagaggaaattgactgggaacagccctttgtctgaaggtaaaagagagacgatagattgaacaagatctctctgttgggatctttcgtcggattcgttatctccgggatcggaatatttgactcctctgcctgaatggtctctgacgagatctcttaaggatttctctgtgtaggtgatgatt

SEQ ID NO: 12138 - DNA, 570 bp, Arabidopsis thaliana columbia
tgtcacactcccactccttcaatatcatgtccttgcacgctcctagaagcgttttacttttacaaaacagggacgattttgttgttagagcattgatgatctcaaagcttgttgtctccaagtggattcttcggaaaccgctgtcccagagatatttgaggccttggtatatagccaaaagcccagctacgacttcagggatgctcttatggcacctgatgtacccaaacacccacttccctgattggtcacgcactattccagccgatctggttagatcagacagagggtttgatgttccttgtatattaagtttcaccaagggtggtgtccatatcttctcgaaaccaggaggtacacttgcttctcccttcaccttctccggtgatcttgagggagttttttgtgattctgtaataagcttcagagccacacgcggggtcaggcattcattgtctaagtccatgtcaacaacacccccatcatcaaaatcattatcaatttgagaagcagtttctggaacaagtcctagtgagttcttggtctggagaaaaaaaccccaaaggaagt

SEQ ID NO: 12139 - DNA, 599 bp, Arabidopsis thaliana columbia
gattcctacctctccatttgcgcggtttcatcttctctctggctacaaacccgctccccggaaatggcttaggctgtgcaaatgggtacgcacacatttctggacactgtctctcactgttgcccacccaagcatacggtacggttgcacccacaacgcttgggaaagtgaagtaatgatacccgcaaatcgctctgcagaactcttgcatctctacatcatccgaggtcaagactaagtacaagccgtttacagcgtttagtggtaacttggaagtcaaggcagttctgatcacagactgaacagagaagcgagtgagatgagatccatgagagtacgttgagtcgtggaactctccggataagacaagagtgtcggtgatgttggaacctgtctggtctctgtatagcctcactgtcttccagcagttggatactgacgggtactgagccggctgcggtgcagagacagagtagagaaagtctcgcgattatagattggtgagttgggtccatcggccgtaccaaatgatgtagagactcgtcacggcgaggatatgactggacgcaagtggtattgaaggtcacgagatcggagga

SEQ ID NO: 12140 - DNA, 506 bp, Arabidopsis thaliana columbia
gatacttatatttatttttgaagaacctatccatcacattctctctctcttttcttgaacttcttatctctctttttttttacagttctcctttctcaaaacatcacattgtgtcttcagtttcagtgccgtaaattttgttttcctcttcattttctgcatacgaaaagttcttttgggtatttgtgatttgtcatctccgaaacgtttctctctttaaaactttttttgaccgttctttataatttgaattgaaagagaagatgggaagagctgcgagatggttcaagggtatttttggtatgaagaagagcaaagagaaagagaactgtgtttccggcgacgttggaggtgaagccggtggttctaacattcaccggaaagttctccaagctgactccgtctggctcagaacttaccttgcggaaacagacaaagaacagaacaaacacgcgattgcggttgctgctgctacagccgcggctgctgacgcagcggttgcagcg

SEQ ID NO: 12141 - DNA, 572 bp, Arabidopsis thaliana columbia
cagaagagctgaccgggaaagctgaaacaggaaggaaatggaattagaatactaaaccagaaagaaagggcgcaaaataaaaatgaagcaacataagaacctatgttaccatatctttgccctcaaatttaggttcaagattgaatccaatgaggttagccatcctcaaattgcgttctttctcattttcaagttccatatgggatgcgctctgagcccgatcaaatggtggaatggacaatgccgccaagacaacagatgacgctattagctgcaaatccttttggcttaaattcttgttgaaatttttctgcagactaaacagcttaaaccatgcataagcatgataaagatggctagaagaaatccagaagatctcagtcaatttggaataataaaccatcaataaagatgacttgggcgtttttttgaccatgcacattaatccatagatatcttcaacagagcgaaaagcttcctgcaaagatacatcacgaaccatactaacttatttccagtaattatacagaggataagctatatacagcaaactaaatatggaatagagaagg

SEQ ID NO: 12142 - DNA, 567 bp, Arabidopsis thaliana columbia
gaggttgtcctgattactcatggtttcttgattctttcaggccttactatcttgtccgacgggctctattcgcactcaaactccacctgctgacataggggaagctcaagagacctttccacttgtagtggacaaagacacacttcctgtactttttaatcccttaagctttcatttttttaggatggttattaacaagtcaactaactctgattagatcattgtaagcatacgtaggttttgaatagatttagatacaatgaccttaagttcttaactgatttagctccactgaggactcttactaccttgttcttatatgttgtctgctgtccttgaggtttataaagtttgagatttgcattatgctcagggcgtttttcattgtggatttcattccaagaaatcgtatggagcaacttcttacctgatccttcatcgtgagggaaatatacttgttgataggtatatcccttgggaggaggcatcatgaattcttattttctttgttgtttagtatcttatacattgttgatgcaatgtatttcttgatatacttcgttgtgg

SEQ ID NO: 12143 - DNA, 533 bp, Arabidopsis thaliana
attcttgaatgggttcaagattacctatttattcaaacattgttgttgttggtcttctctctactcaaaacattcttaagcaatcttaaccttgtgaacatcggtgacttaggttcttcttcgtcgattctctcggataaattctcacttgaattatccggaatgtccaccacaaccgccgtcacttcttgtgatctggtactactagattcttgttgatgatcgttatacgaagctgcaaaatttccagaaggagattcttcagtaacaacgaggcctgcacttctaacttgattctgatctccccaaaccagtacatttgtcggaaaactcagaggttctgtcgaaaactcatgaacaaagctctgatcttgagatggattatgctgattagtcgagtgccctgattcaaagttttgattttgaggtaaacctcacttcctccatgtgtcgtatcttcacggaaccaacggtgtttctacagagaggacaagtggaatgagactgaaaccacatatcgatacaatcacatg

SEQ ID NO: 12144 - DNA, 646 bp, Arabidopsis thaliana
tttttcattagtcgatagatataaccaattaaccatataaataattttcttatgataacgatacacacacactctgtcttgagtttgatcttctacaagatcttatttacttgtttttattttcggtaaaaacaaacttacaaaccaaactcaacatgaaaaaaataaaaataaaattggtaaacaaaacaaaaaagaggtagaaactgctatatatttagctaaaataaaactcaactcatacagtaaattgaatcatttactaaaattttgccaaaaataataaatcaagcaactaacttttaataattaaacaaaattacaagtcacataatataatttccataacccctaaattaatttgatgttcgattttttgatgaatcattcaggagcattcgaaacagcacagagcggagaagattaggttacttctcctgcgccaccggcaacccaatcgacgattgctggcgttgcgaccgcaaatggcagctccgtcgcaaacgtttagccgattgctcaatcggatttggccgcaacgcaatcggaggccgcgacggtcgtttctacgtcgtaaccgaccctggagacgacgatcccgttaatcccataccgggaacactccgtcacgccgtgattcaagacg

SEQ ID NO: 12145 - DNA, 560 bp, Arabidopsis thaliana columbia
aaacagttccctgtgctttgtctgtgtagatctcacttgtcttccaatgacttgcagtgactttatagtttctaatattccctgttatactttctaccactttttcaggggactcccaaagttgaaccgaatagtgatctacaacatgttgttgaggttggtgatgccttgatagattagcctctactcattcaattgtcctgaatccggagccatgaacacaaatttttatctcattgtcgctaacaaggtcttttgttgtcttgtagataaaaacgcctgaacaaatccagagaatgcgtgaaacctgtaaagttagtgttattttctttccttcctgtaatgccagtggactacatttcccactgagcttttttcaagatttttatttgaaaatattctgttatcagattgccagagaggtcctggatgcagccgctagggtgattcacccggtgtgactactgatgagattgatcgagtagttcatgaagcaactattgcagcaggtttgtgtctgttatgattcactgtttactttaatcttgtagattttctta

SEQ ID NO: 12146 - DNA, 566 bp, Arabidopsis thaliana columbia
  unsure (1)..(566): unsure at all n locations
nnnnnnnnnnnnnnnnnnnnctaaagacaggtgtgatattaattcccaggccaacgtattatatttgtcatacaatgacagcccaggccaactttccgcttttcctttgacatattgcagcataataaattgcggtaatgtcagtagggggatggctgttaacatcgggatacctacacgttcgacacgtactttccaccattttttcaagggatagcgtaaaaaaagcatgtaggaaaagtagccggatataacgaaaaatacctgcatgcggaacgagtggatgaagtcattaaaaagggtcagccacaatgatgattcggcgctattcacatgccatgtatggctcgaatagattaaagaaatatgaaaaggtatccctaacaacatcagccaggcgcggatggagtcgaggaaatattcaagttgcgcgggtactgggttcatatatggttaactaatctaggatttttcgtcttatccctgtcgggttatgcctttagcgttgttgccatagtgacaccgacctgaccgcgccaggccgaggcttcaaggtttttatgcat

SEQ ID NO: 12147 - DNA, 525 bp, Arabidopsis thaliana columbia
tgcagcctatcactctttctccaacaggcttctttactacagtccaggtgtgattcttcaacagagagtccatctcttcatccatgccgactttccatagttctcaatcatcatctcttagagcttcttgataattccaggttctctggtgtctccatctactgtggtgaccaaggcttcaacattaaatgattcttcttcatcatcagtaaactcactgtaataaccctccacatcaaaacgttttggagctctgatttctcttctaactctgtctctaaccaaatggtagctgtttggtgtttcaggtaccgtttcttcattgatctccgcgtcttcagtgtggtgatggtcctgagcaggtgagtgatccccagggatcatgtttcttccaagagatctccacctaagctcaaatcaccaacatcttcaagatcaatatcaagagacctgcttgatgtgtccacttcctcagagtctttgttcttctgcatcacatctcggtagactgcattctcttgaaat

SEQ ID NO: 12148 - DNA, 537 bp, Arabidopsis thaliana columbia
ccttcatataaaccttacgctcccacacgtcttctctaaaatctcttaaagcttccttcacaatctcaaaagccatctttcaaatttcaaactcagagagagagagatgtgtccttctggtagaatcgcgattccgataaccaccaccgcgaatccaaatttccgaccagctttcgaaatcatcgacacagatcacgacggtaaaatcagcagcgacgatctccgtgcattctacgccggaatcccttccggtgaaaacaacgacgagacgatgatcggaacgatgatatcagtagcggacgcaacaaagacggattcgttgagttcgatgaattcgagaaagttctagaaacgacgccgttttctagatctggtaacggaggagacgatggattgatgaaagatgtgtttaaggtgatggataaagacggagatgggagactgagttacggagatctgaagagttatatggattcggctggtttagctgtaaccgacgatgaaatcaaatctatgattcgattagccggtggtgat

SEQ ID NO: 12149 - DNA, 578 bp, Arabidopsis thaliana columbia
  unsure (1)..(578): unsure at all n locations
cacagtagctggaacaccagaagtcacaaggcgataaactgcagctgagcaatccatcttgtacgtctctgcaaatctctcaatgtttgggaccatatctttgagagatgcagataatgtcttgaagtgaacaatgagtttctggcactcggtttcgtattcagatggagagattagatcacgaatataagccttctcgagcttctcagtagctttgatgatagcataaagctctgcgaaattctcatacatttctctctcacgcttatcattccataacttgacctccatctttcagaaactgagagctaaataacttgatgagctttcactattatagggaactttggagaagagaatgggacacgcgcaaagacgaaaacaaaaagcaaaaagcttcctagctgatatcaaaatcaatagtaccaagttaataaatcacactaaggagattaacatctaaccaaaacaagagaaatgcaggtgatcatagaagatagaaaagaggaatcattaaaccaaaaagcttaggaggttactcaagaacagaagacattgatgancaaaatgagagagag

SEQ ID NO: 12150 - DNA, 1070 bp, Arabidopsis thaliana
tcactctctctaatggcgcttccaagcactgtctcatctccttccttcaaatcaactccaccttatctctccgccttcaaccctaaacctctacatcttccagctacttaccggagcatcaaccgtcgaagtgtaaactcctctccttccgttgctcatcctcttccttctccgaaaaacaccacaacaacgcgaatccacccaaatcagatgacttagtcgagcttcctctatttccactacctctcgttctcttcccaggcgcaacaatcccgcttcagatcttcgagtttcgttaccgagtcatgatgcaaacgcttctccaatccgatctcagattcggcgttgtctactccgacgctgtttcaggctccgcagctggaatcggatgcgtcggagaaatcgtgaaacacgagcgtctagtcgacgatcgattcttcttaatctgtaaaggtcaggaacgattccgagtcaccgatctcgtccgtacgaaaccttacctcgtcgcgaaagtgacgtggcttgaagatcgaccgtccggtgaagagaatctggacgaattggcgaatgaagttgaggttctgatgaaagaagtgattcgattgtcgaatagattgaatgggaaaccagataaggaatctcaggatctgaggaagaatcagtttccgactccgttctcgttcttcgtcggaagcacgtttgaaggagctccgatggagcagcaagcgttactggagcttgaagatacggcggctaggttaaagagagagagggagacgctgaggaatacactcaattatttgacggcagcttctgctgtgaaagatgtgttcccatcgcagccatagtttaatcggtatttagatatttcttctggtctccgtttcggtgttttcagttattattggatacattatatttgatcaatgtgtaaagtttcagaaacttaggtaatagatagtggagatgtgtttcataggatcgtttggattgatcaagaaatgggtttttacttgattgcctctatgataaaagattactctagtgattcaagtggggatcgttactag

SEQ ID NO: 12151 - DNA, 606 bp, Arabidopsis thaliana columbia
tgagtcttggaagcccaactgagaaaattgtttgcactaggacgtctgaaagctttcaagggatggtggctctaccgcagaatccgccacaccaacctggtttatcagtcaaaatctcaaagccaaaacatactgaggatctctcaagttcaacaacgaactcgcctttgagctttgttacaacagatttagggttgggaacaatctacgcatcgaagaaccaagaaccaagcacaccagtatcagttgaaaggagagactttgaggtgatcaaagagaaacaattgttgtcagcttcgagatactgcaaagatttcaagtctctcagggaactactctctcgaaaagtcggttttcagaacgaagctgtgaatgcgattagcgaaattgtttgtggatacagagatgagtccaggagaagaaacaaccacgtagcaaccacaagtaatgtttggcttgctcttcttggacctgataaagccgggaagaagaaagtagcattagctcttgctgaagtcttctgtggtggacaagacaacttcatctgtgtggatttcaagcacaagacagtcttgacgatagattcagagggaaaacagttgttga

SEQ ID NO: 12152 - DNA, 431 bp, Arabidopsis thaliana columbia
ctctttctgattcaccatcacacaactatataatatatcacacattacacatacaatgtatatatctaagtttttccacataaagccatttacaaatattcaagcttactcagtctcacatttaagcaacctctctctctctgattctctctttctctgagaaaaatctcagtttctcagagctctcaggttcttttattcttcttcttcttcgatttcatcccccaaatctgcatgctctggatcttacgaatgttgctttgtagttttatgatctgagatcaaattttaacaaatccgtcaccggagacgaaaatgcgggttaaagagttacatccactttgttgtattactttggagagtctcacgggattaatagccagtcaccggaagaaccggctgcaacggctttaactaggtcaaggagttta

SEQ ID NO: 12153 - DNA, 648 bp, Arabidopsis thaliana columbia
gtcagtttacagtataattttcaattcctatgacttgcaggtagcttgcttgcttgttataacaatacagtactctttatttacctgttcagataagataccagaaatgccaatggttgccccaggtttcacgaatgaaaggatatgatccgccagattcataaccgggttcaagagtatgtttgcaatgactacatcaaactgttccttttgcaatggtatttctcttccagaagagctattctcaataggtgcaaggtgcagctccagtttctccaacggaatgttgttcagagctgcattatgaattgcagagtttattgctagaggatcaatatcaacaccaacggatgatgcagcaccaaactgcaaatttaaatgagcgatgcacaaagatttaaataagatgatttatgttgtaatgattggtttttgaaagatcaaaggcgtgagatttttaccttgagggctgcaattgcaagtattcctgaaccggtaccatagtcgaggaaagcttctccgccttttatcaaactttgtagaagcaatagacacagcttagtagtaggatgtctccagcccaaacgcaaatccagggttcagaattatgtttactgcttcacgaccttgcaaaggatagtgaaagag

SEQ ID NO: 12154 - DNA, 549 bp, Arabidopsis thaliana columbia
gttaccagctgagtatgtgtatgttaatggacaacctctttaccctgaagagctggttacacttcagacttgttctaatcctcctaagaagctgaaaccaggggactattggtatgataaagtgtctggactttggggaaaggtgaggaatatttactgttcttttgagttttgtgtcttagtttctattgtttcttatatatatatatatgatgttggggttctacaggaaggagagaagccttatcagataattagtcctcatctgaatgttggaggtcctattagtccggaagctagcaacggaaacactcaagttttcataaacggtcgggagattacaaaagtggagctacgaatgctgcagttggcaggagttcaatgtgcgggtaaccacatttttgggttaacgaggatggatcgtatcaagaagaaggacagaagaataccaagggatacatatggggcaaggttcgttgtattcgtattaaatctatattccattcgattgtgtttcccctttgatttcagattgaaactttttgctgc

SEQ ID NO: 12155 - DNA, 579 bp, Arabidopsis thaliana columbia
tatccaagagttgcttgttgttcgggtgtacgctcatagaacttgatcgttagtgagggatctaatgatggagcatgtctgtcatatgttgtaaacttgtgtcataagcagataaaataaatataactacattttattatggtacttccaagttaaatatccttacgggttctcaatgaaactgtttccagcaggatcatccaaaatgaaggtgaatgatgtctctgctttagcacaagctctcagtttagacaagaattggtctattgcttcagctgttttaggatccactttctgtttcaagcaacatatatagtttaagattcctgactataaaacaataaacttgacatctaaaaaaatgtggagctccaagtcagaatttaccctgcgttcttcttgaagggcactcagttcatcagcagccctggatagtatcccttccacgtagaaagttatacaaaaaggggagctgggagcgtcattgacatggaactcgaaaatgaaaaaaacaaagatcttaaacgccattgtataggcttattctcaccaaaaaatgagttacaggaacaagatatt

SEQ ID NO: 12156 - DNA, 670 bp, Arabidopsis thaliana columbia
gctgctcatgtggttgatggtgaagttgactcttcagcagcacgaggcctaccttatgcgcatccatttctttttagtcaccggttagcttctcaaactccctattgctctcaacttcttgcagagtgttttacaatattcttttggaattgggcattgtaggtctaatcaaaggtcctcaccagcaattaacagttaccaaggaagcagcacccaaatgcgtgaacagcatcatgcttataatcatcagaggcaacaacatcatgccaatggtcccactctcgcatcacctctcatctccatgacaagaaggggattaccgccgccgccacctcccccaccaatgccagatcagaacgttggattcttcatttatccaggtggacaccatgaaccagaaaccgatcaaattcatgcatgggagagagattggttccacatttccctgtcccatcgaatcatcgcacgatccctagcttgtggcatagacacttctgagagaagttgtgtcagaactctacagtcgcctgggagaattctatcaggcttaatgatcaatgtataaaagaaaactggggacttgtttgatcgatcaaaacttgtttatgatgtaactataactggtttcgatgtacattgtgagctttcctaagacaattgttataattaa

SEQ ID NO: 12157 - DNA, 916 bp, Arabidopsis thaliana
caaaataatctcagagttctccgtcaaattctgatttgggtattgtcaattaaactcagaagaattttgagaagttaactctaaaatctcgcataaaacacagacacatttttacaatttttcacagttcaatcttccttttcgttttcatgattttgatctaattatttttgtgtttttgattaggtatcagagagtaagcccagattgtcttcctctcacaaatggaggtaagaagccttacttacgaccatcaccatcaagagcaacaaacgaagacaccaccaccaccaccgtcattaccacaacctcaatcgccggaagaggatttaacggcggatcatgcacaaccaccaccaacaacacctcatctctagacggagtccccaaaggattccgattcagatccactcaacagcagcaacaacaacaagatcctagtcctagccgtcgcggcggtgatgtactgttacagtggggacaacgaaaacgatcgagagcctctagagctgagatccgatccaccaccaccatcacaaccaccgccgatgattcttcgtcttcttcaggtcaaggtaagatacaatcaaacaaaccgcaaagaagatcgatgaatccttctatgccacctccaccaccagctccgccgattttctcgggccggagtacaaaccctagaaacggtttcgttatcggcaaggaatctttcttcccttccaggtttagcctcaaatctttcttcattcaattaaatttccatattttgatatatttacttaccttaaatgttttagaatcgagtttgatttgtctttatttacctttaatcgtttagattttgttactgtaaattaatccatatgatcgtgacttcattagcttccatatatttacatttttgtcatccatgttatgt

SEQ ID NO: 12158 - DNA, 1149 bp, Arabidopsis thaliana
cttcacatttcagttctatacccgtgagcaagcactcaattttccagacttatgttgactatttttaggcaaggtaaaaaattgcataagtctcgaaacttttggtgttcggcggattggttagtagaaactaatgcacgtcagcctctgaggttccgtgtaatagattctcatgttgtcctttaaaaatgaaactcttccctttgattctttttgttcccaaaacacatttttctacatcttagagtcttagagaagaaaggcaagataatcaatctcatggcgatgtcgatctccggagctgtgtttaatggtttgggttcttcgttcttgatcagtcgaggcaagagaagcggcgttggacttggcgtagtagctatgagggttggccggaaaaatgtgatcacttcacctaagtgcaagaagtcgtgggttccgacagccgtcaaaggtgatggtaactcaaaactcgaccccaaatggctcgatgatgcctcgtaagtctatatcgttaatactgatttttcgttatactattataagagatattatgatagaaaaatcataaatgatacattatgatttagtaatatgtttcaccattactttttactttttggtcaattgttttcaaatttctgtcaattttttatagttatttttttagaaataaaatttgttgatttttttttgtttgataatttattctcttgagagtttttttgttaactttatgaaatattacacataaatttggttttcataaaatgggaacactaagtatataaatttggttttcatacaaaacacatttttatttgttcatgtgtaataattttgtaaattgtcacacacacacacaaaagacagaaagcttccgactacgtgaaggagaagggaagcgaagtgggacatgcgtctgctcagaaagggcaagatgttaatgatcatgtagatagagcaaagtactatatgtttgagaaagctagtgaagcaatcgacaatgtggctgaaattgctcagtttgcttcggagtttgtgacggagaaaggcaaggagacgaagaaagaaactgcttcaatatcggagaaagccaaagacttcattgttgaaaaagccggtgaaattatagatatagcgacggatgtg

SEQ ID NO: 12159 - DNA, 456 bp, Arabidopsis thaliana columbia
caagtgaactgcaaccaatgtaacagaagcaatcacaacatattgttgaattaagaaaaagttacctcgagctgtgcagctgcctccttgtattgtctttttgacgccatcacctgaagctgttcaacagcagagactgccatagcgaggtagcgaaattcattattgtgtttatgatgtacttgggccacaagcatcgtatcactatttatacatggcttcgttacacttgagctattattctgatttcaggtaaccatgattaaaataatgaagtaattaaacagagtaaactattgctaactgacctaacattgtgaggcggtgaagggcagtgattgtcgtggttatgttcttctttgcaaaatctaacttcttaatgtcacggcatatttcttgaaccattgcttcactttgctcagctttggattttatctcttgaatcttatgagagag

SEQ ID NO: 12160 - DNA, 516 bp, Arabidopsis thaliana columbia
ggccaaagatgctgctgcggcctccttaggctcatatacctctgcactctatgccctgtgcgatcctcatggcaaacccattttgcccccacgaaatgagatcctggagaccagcaatacagccgaaaaagcagttgttaaagctgttctttatggctcgggaaacgcctatgctcctagcttaggcctcgcggcgccaaaaggtaatatacataaatacattattattgataacatgtctacataagatttcttgaaatttccatattacaaacagctccgtattggtacattttatctctaatggttatgtgctgaaagtgtaactagatccaatttattttggtagagtctgactttgaattttggaacggtcgttttgttaatttgttcacaaaacctttccaaaatcatttgtcatttttggtatatatgcttaaatgaacatttagtttggtttactcaaatttagcaatcccaaaattttggaacttggaagggaccaaatatctttga

SEQ ID NO: 12161 - DNA, 504 bp, Arabidopsis thaliana columbia
ctcaagctacagaaagcttcaggcgaaagactaaaacaccttctcttctccaatggcaccaccggcttgtcccctctgtccattgtcatgaaacataccaccaccgcagttaaattatcaaatgagttccgccccagagcctccatcactagctctcgcgcacatcttgttggatcgttgtgccggtttaagccacgcctaacaatgctaaccgcttcttggctcgtcaagacatcccaaatcccatcgcacccaatcacaagaaactcatcgtcttcagttagagttatctgcttgatttctggttccgagatcagtggagattgagagccgtgtggcagttttaaatcccagtcgcccagagctcgggttacagctaggacttcatttaggtaaccgtcattagtgatgaaaccgccggattcctccactcttcttctctcaagtagattaatcggtttatggtcttcagacatgtctatcgctctgcctttcctgcataga

SEQ ID NO: 12162 - DNA, 1293 bp, Arabidopsis thaliana
cttgtttagaaccatgtaggcaagtaagtttacctagagactttatggataggttttcgttgacgatgatgcccattaaataaacgttgtaatccatcatcacaatcattcgattctctcctaattcccttgctgcttcttcttctttccgtatgtgcatcttcttaaagctctggctttctaacaaagcattccagtttttgcaagttaatcgcattgctctcaaacaatgtaaaggaaccctagagacaatgtcctctactagttcctttggaagatttgacattgtcgtcctcattgtgtttttgatacaagggatgttcagaaaccttttgcgactcataaaggttgtagaacaagaaagaaaagtagaaaccctaaattaagttgggctaattaaaaggcttcagaatctagtcgggctttttgtaaaagccctaaatgatattttctcgtttcctaagaaaaaacagcatgcagtctacgtttctatcccgaaaacgctaataagtgagtactaatttcgttttggtcatacgaaagcaaaaacactttgtcttttaccacttcttcgatacttcccaagttcaccgcaatggccaccgcttcaatcttccccgccgccgtgaccgtcaccagagatgtgacatctcttcttaatccatcttctctgataatcggaaaatcattatctccttcaaagttcagctcaatcaaatcctccgtttcattttcccgcaaaaccctaactccaattcgatactcttcatctcccgccgatcactcacccgccaccgccgtggaagcgatcacgaatcgatccaaaacctccttgaaatctcgtctccgtggaggagaaactctctacggtctctttttactctccttctcgccgacattagccgagatcgctgctcacgccggttacgattacgtcgtcgttgatatggaacatggtcccggaggtataccggaagctttggattgtattcgagctcttaacgccgccggaacatcagccattctccgattaccggaaaactcaccaacctgggctaaaaaagctctagatctaggtccacaaggaatcatgttcccaatgatcgaatctcgtaaagacgctaccaaagcggtgtcgtattgccggtttcctcccgacggtatccgtggatcggcgcacacggtggtgagagcttctaactacggaatcgatgaagggtatttaagtaattacgcagaggagattctgattatgtgccaggtgaatcaggtgaaggagtgaagaagctgatg

SEQ ID NO: 12163 - DNA, 488 bp, Arabidopsis thaliana columbia
aaagtttcaatcttttgatggtcttcttctttgtatacagtacagaaaaagtgaacttgttgaaagtcgagggccaaacgaaagttggaggtactcttgtttgtgtttcgggtgctatagcgatggctttgtttcgtggtccagccttgtttggaggtaaagatgcagcagattcagtgaaaagtgtaattattgatagaagtcaccagagcttaatgggtggttagtctctagttttcttggtcttgggtttgatcaatggcacattggagttttatgtttgattggaaactgtatgtgtatggctgcttttctcgctgtccaagcaccggttttgaagaagtatcctgcctacctttcggttgctgcgtattcatacttcttcggtgcatcaataatgatcacaacagctatcttgtttgttagagagcctaaagattggagcttaacacaatctgaggttcttgctgttatattcgcagtaagtt

SEQ ID NO: 12164 - DNA, 604 bp, Arabidopsis thaliana columbia
ttctatcaccgagaacgacatcggagacttgagagcggcggcgagcttcaccggcgctggttaacggcggccctctcaatctccagtattctcggttcaataaaagcttcaaaaaaagaagaaaaaatcgaaaattcacgaaaatatatattaatttcaattttccatatttgaattcttccagatcttatggttccttgttcttcgttctcgtggcggtttttgaattgttgatgcgacgatctcatgcccgttctagggtgaagaatagtagtagtagtaaatccgatatggatccgattaagttccagatccgttctgggaaccgagcaccgtcttcttcatcgacctatacgctaacaaaaccgaattcgaaacacgcgaaatcgaatctcttgttaacagttggttctatatctgtagtgttgggggttcctttctttgctattcaattttgttctccggcggtaatctgagaggatcgcttcgttatagcgtcgtgatcgacggcggaagtacagggacacgaatccatgtgtttgggtacaggattgagtcgggtaaaccggtttttgaattcagaggagcgaattcagctagtttg

SEQ ID NO: 12165 - DNA, 693 bp, Arabidopsis thaliana columbia
caaaagacaatttacttaaacagttctatctattacactcagaaattgacgcgactgatagataattccaattccagtcaaacaaaaccttcacaactcaattattcttccgattttggtttctctcttccaatcatccttcaagctcatctttttcttctacccaataacgaaagtctcctcctttactaatgggttgcttcagcagtaaacaccggaaaactcaaaacgacggcggagaaaaatcaatcccgatcaatccagttcaaacccatgtagtccccgagcatcgtaaacctcaaaccccaacaccaaaacccatgactcaaccaatccatcagcagatttcaacaccgtcttcaaatccagtctcagttcgagatccagatacgattttaggtaaaccattcgaagacatcaggaaattttacagcttggggaaagaattaggtcgaggtcaatttgggattacgtatatgtgtaaagagattggtactggtaacacttatgcttgcaaatcgattcttaagaggaagctaattagtaagcaagataaagaagatgtgaagagagagattcagataatgcagtatttgtctggacaacgtaacattgttgagatcaaaggtggcttatgagatagacaatctatacatttggttatggagttgtgtctggtggtgagttgttgag

SEQ ID NO: 12166 - DNA, 582 bp, Arabidopsis thaliana columbia
  unsure (1)..(582): unsure at all n locations
nnnnnnnnnnnnnnnnnnnnnnctaaagatctgcgatgcccgctgtttcattcccaaaccaagtatgattccggctgtggctggcccagtttctacgaaccggtaagtgaagaatccattcgttatatcaaagacttgtcacatggaatgcagcgcatagaaattcgttgcggtaactgtgatgcccatctggggcatgtcttccccgacgggccgcagccaacgggcgaacgttattgtgttaactctgcctctttacgctttaccgatggcgaaaacggcgaagaaatcaacggttgaaaaaacgattcagcaacttattccacaggagcggaaaaattatgaatcttgatgacattatcaacagcatgatgcctgaggtataccagcgtttgtcgaccgccgttgaactggggaaatggcctgatggcgttgcgttgaccgaggaacaaaaagagaactgcctgcaactggtgatgctgtggcaagcccgccataatatcgaagcacagcatatgacaattgacacaaatggtcagatggtcatgaagagcaaacagcagttaaaagaagattttggta

SEQ ID NO: 12167 - DNA, 692 bp, Arabidopsis thaliana columbia
aaacgttcttgtttctagggagaagcgtgtcaacgtgaaaggatactttgtttggtctcttggggataattacgaattctgcaacggctacaccgtcagattcggacttagttacgttgatttcaataatgtcactgctgatagagacctcaaagcttctggcttatggtaccagtcgttcttgagagataccaccaagaaccaagatatcctccgctcaagtctgccctttaagaacggggataggaagagcctcacatgaaagaccaaaaccactttatgcccatcgagatcatcttcatgtctcttctttctacttgctccatagataaaaggagcttctacctactgtattaaataaaagatgatcaaacttaataaatattttgtatactacattatgccatgggatggggaaaaatgcgatgaaaccaaaattgaactaaactcgaaatgcttagttgtttatcattttaaaaccaaaactaaaaaaccgaaactgaaatttgtttaaaaactaatttttttttgtttccttaaaacaagagagcaaaaaaaaacgaaccaaaaattgtttagtgtaccagatacaaaactatttgtttcaactttaattcatttcgaatttataggggaagacgggtatgatgtcacataaagatgatgtaagttcaagatgtttaaggagatgt

SEQ ID NO: 12168 - DNA, 630 bp, Arabidopsis thaliana columbia
gttttcagctcgtgttattgtaacaatctggtccacaatcgtcgcaccctacaaggcaagatgtcgattctgttactgttgtgcacaaatagtctcataactagttcaagtgtttgttacaaagactaaagacaaaactctctaaaaccattcctaagcaaaaatgcacatacacatacatgaatgtttattcataaaaagtgtcggtgaaaattacataccgataataacaaggcaatttcgagggctttgggatcagtaaatgtaacaaatgcgattcgagactgtccaaattctctgcaagtacaaatatttgaaggtaaagttgaaatgaaacatagaagagagtatagaaggagaaaatttgaagtttacttttggatttcaatgtgttctatgtcgcctgagaaggagaaaaactcgtgaatctctctctctgtggctagatctgagacattatttacttgaacacttctcgtcgtctacatcgaattcggagaaaacaaaattagtaagcagaaacttttgtagctcaaaatcagagtaatattattgtcacgtgcattgttgtagaagaactcttgacgactgcgagagaataataattttgacggaagagagaagaaatga

SEQ ID NO: 12169 - DNA, 468 bp, Arabidopsis thaliana
ctaaagccgagataacgttttgccgtttgcgccagtttttgctgttgttcaacactcagtccgccttcaacgctgcgaacaacgtatttgcccttttcaccatgggcgatccactgcttgagcggggtgtatttcaccgggccgactgcttcaaaaacgtagggctttttgttgcgtatcaccagcataccggtgtggctataatcggtatgggtcgccagttggatcgctttactttgcgatgagcgagagatctgaaagatgatgtcgccggtttgtggctgccaggcaaaggcaggtacagaaaccagcaggctgaggatcagcagcctgtttttcatagttaaacgtccatgtataaaaagcggtgggtcgcagacaacgtgctcgttgtttatgccggatgcggcgtgaacgccttatcctggctacaagttcgtgcaaattcagtaaatttcaatatgacgt

SEQ ID NO: 12170 - DNA, 748 bp, Arabidopsis thaliana columbia
caaatctaaaatctaaatccgagtttaaaagtatgtacttaattatctcaataatccctgcaaaacagtgtttgaattttcagaaaatgagatatgatgtactaaatatatcttctaagcagccgccaagaataaacgtacaaacatacacttccaccagttttggggaattcaaaccaaccaaaagcatatatttcttgtaattaaactactcttgtgattgttggtcgctgtatggtcaaaactatgcatccaatgaaaaatagacctgctagtgaaatggaaccaatccttgctagttagtatcaaatgatgatttgtcaggatcaattatatttatggaattgctagttattgatcatagtttaaagtattggcacttttaatctatataaggagatagaacgtggattgctaatgataaatatacttctactaatggagattgtctatgtgcatgaacacgaaatcaggggttggatcctctaaccatttcatcagttttctcatcggcacaattcgttggagagaaagacatcaatgggaaggattgtttcattctcaagttatcaaccgaccaaatcgatttatcaaaacgcagtggactctacgctgagatgatcaaacacgtcgcattcggttacttcagccaaaaaagtggcctcttaatttgccttgaagactcttccttaaccaggtacataacaataactgatttaatttaactttggtttagttagggtttatg

SEQ ID NO: 12171 - DNA, 578 bp, Arabidopsis thaliana
gtctcggcgatgttctgtagatgtttatgattcctctcttaacattaaacaaagccgccattttttgttacagacatcagaacacgactctgttacattacatatactctcacacaagtacctcaggatcaagttagtgtccagagaaggaacaggtggcttgtcaggttgattcccaagtgtcataaggactgtgacatgagaaaagtctgatcactatgttgagtcaaaaaaaaaagttctttgctttacatgtataccccaagtttcttagattaaaaccagtgatctacactctttcattcacaagaaactaagaaagctacttatagaggagtttttcattgttgttgaacagactccataggaagatcttcaagccaagtaacgacttcttcgatcagtggtctccttctaggctcatgatcaatgcatttgcaagcaatctccaacatctccaaaaccgttctctcgtgcacatattcgcgtattgttgtatcgataagctcagcttcacgcttctcagccttcatttgaacacccgagacacaaatctctgcaactttccctttacagac

SEQ ID NO: 12172 - DNA, 552 bp, Arabidopsis thaliana columbia
cataattcggatagcttccttcactgctaaataaatccgtaatcaatcgaatatgattttccacaaattttctggaatcttagtttacaacaacccggttcagattatccaagtagatttttggtttgccaagaaacttgaatagcttctggatcttgagatccaagaaactcgggcttaggtttgagtgtttgaccaagccaagaaacttggatttgtttattattttgaacaattttaagttcatcccataaaacaaagtatagtagtagcttgcgttttagcagtaacgatgctgcatattcaagaggttataaaatgttaaattatcttgtttatttgtctaaattagggaaaaggaatgaatatttttggcttaaaaaaaattgttttgttttgttcaggtgtatgtgaagagactagacgatccatcgtcgaggacgttcgaaaagtgttcatcagacacatacaagatatcgggaccgtgtatgcgcgacgtttgttatctctacctcctcaggcaaggatccgacggctggaaaccagagaatg

SEQ ID NO: 12173 - DNA, 569 bp, Arabidopsis thaliana columbia
ggactgaactatctccttgcagagaaagacggaaaaaacccgagtgaagactttcggatacccgggaaacagcagtcggttatctccttcaccaagaaactgactcctggaatcaaagttggttccaaagatgggtttcccaccaaagtactcttcaacggccaggaatgttcactcccttctgtactacccacgagcaacagtcacaggaaacatgtatccacctttcttctcatcctgacaccatttttggctctactgtttcttcggatttaaaagttccagtgaaggactttcctcattagccagaaaatatacagttttcttgattctttctaaccagatttgatgcagaattacttctactactagtggtgctttgtgcacagtgtgattcttgaatttcgtatgatcagattttagtaatcagtatgtatacatacaaatattgaacagacaaatccctttgtgttttgatcttgaattgctttgatttcacgttgtggcgttgtctaaattaagtttgttcgaattattctaagcatttactcgaaatacatacttacaaa

SEQ ID NO: 12174 - DNA, 433 bp, Arabidopsis thaliana columbia
ttctatctcaagtcatggacctgaacttgtcccggatgaaacccgggacaagccaagactgctttcgactcaacgtgagtgacgcaacacagtcctttcgggttcatgagggtttcgatcacacggtcaaccttaaggttcttgcaagtgtagacatagatgttttgtgtcaggaccaccacaacgtgttctctcgctagtttcacagcgataacttctgatctaatagtgagccgcttaacagctatgtcgtctgcagtcgagacgaatactttgttaggagtgtacttcggaattggtataaccatggccagcaatagcgaataagtttgaaaggtagaccgtctcagcaactttgaagcctgattcgtgcgtggcacgagctgatgcttttctttatcaatggtcttgcagctatatacattgaaaccgt

SEQ ID NO: 12175 - DNA, 897 bp, Arabidopsis thaliana
gatttttctctccattgcaagttgcggctagggttaagtctactgtctctgttatgatgagatctgtatgattcctctcttccagactgatttttatgagtatcaacagccctcacaacatgtctcctttggccctggggaaaattatgagctctaataacagactgggaactggttctggtttccagcaggtttgctttcctcttcagagaattttggtcttcctgggagtaagactggtaagatcttccttccgggttgtgttttggtgctacaaaattatctttggggagataatagtttctagcagtctcttttgaatttgcaggcttaacttgtgaaagacacttgctttctttagcttttgattcttgcagaccatgacagtcctttttttcatgagagaggcgatgacagtggagacaatggtttttgaggttcttgtactctagagtcacaacagcttactgccatcaggaaagccaacaacagtttcttttatcagcggttgcagaccgtcaatttggactcttatctttgcagctgagagagtaatctccatatccataatgtctcccagttcctctccaatagttttcagcatttggggttgccaaaagtgctttggaaggccctgaagctcaatccagaaggggatctttgaggaaaaagatgcagatatcactggttccaacttttggaggatcaccatccattggtcataatggtaaggcctattttccagtaccttttgcatatcttcctcaaattcaaagctgaactggaaacaacctcttcccagatctgaacctgcgggctttaccctttaggttccaccggttagagaggaaagaaacaaagaccataatctttagccagcagggttggtgagacgat

SEQ ID NO: 12176 - DNA, 452 bp, Arabidopsis thaliana columbia
taactatcgatgtaatttcaaaatgcatttacgtctaccttgaatttataacaggggcattaatgtttaaataagaatgtgtgttaaaattattgcaaagcgtcaattcttctagcaccttctcccggttcaacgctaatagatactagtacattacttacaaaaccatagaaaacgatgacatatagtataattacacacgcttctaacaaacgtcattaaacgttatttagccatgatccccttaagactaattaatctctcgtcatctcgttcgtcgctctgtagatgctctcaagagaccgaaacttcttcttcttatgtatgcctgtcctcgtctccatcatcgccttcagaaaactctgtccgatcgtaacattcttgatcctccacacgccgtcgttttgcggctcttcggccatatgatctctaacctttgaactaacaacatc

SEQ ID NO: 12177 - DNA, 488 bp, Arabidopsis thaliana columbia
tgatcatttcgagaatggagagtgggactctggtggtttctgtaaccgaacatatgcccgtttactgaaggcagcgaaggagagatgaagagcgaggatgtatcgatgcgtgatatcgagcttgaagagttctataagactactactacacaacaagagggttcgaattcggaaattgtattacttgaggcaacttcaatgtcgcttctccgagcagatggacatccgggaccgtaccggtatccaaatcctttcgctgggctgaagaacaaggagctgaatcaggttcagaacgattgtcttcattggtgcttacccggtccgattgattcatggagtgatgtaatggtcgaggtgatgcttaaccgggaacggcaaagacgagaatagcctctcgacttcacgtgctgttgtgttctagttagtttgtgtgtttgctcgtaaaaaagcccatttattattggaccttccgtgggtccaaatgcaag

SEQ ID NO: 12178 - DNA, 578 bp, Arabidopsis thaliana columbia
atccccatgacctttttcaagtaaccaacgtaaagctgtagaccttctgtctccattcccagtggggaatacagtctcacgaatctcaaaattgtaggatgatctctctggtctattgctgccaagagcttcttcttcgcaataccttcaagctgctccttcgacgcgtgaagctgttcgctctgatcggaaccagaatccttgtactgcaaatcaatctggagaaatctctgtacaaatttcgcagcagattcgtaatcctcggattccaaagcagtcttcacgccttcgatgcaattccctcgctcaacaatcgcgtcaatgcgggagagagtaacattaacacgagattgagcaagatcgagctctcgtaccttgccactgacttgatccgcgagatcacaagtcgatcgaacatttccgagcatgtgatctgcatctgctttcacgatatcgagaatctccgccgatctctgaagctgaacgagattccgatcaagctccgtccgctgcgatagaagcgtgtcgagatctgagtctaagcttcgctggtaacgatacattcgtgaagagacgtg

SEQ ID NO: 12179 - DNA, 497 bp, Arabidopsis thaliana columbia
ctagaggacattcataaaaaatttgagatgcaatgtctgtggatgttatgggttatacggttcatggaatgccgcctccttcgggcggtacagtcggtttttcgatggttatgaatatcttggatagttactcgaatctttacactgcttcgggaagagagctcgggctgcaccgtttgatagaagcaatgaaacatatgtttgcagctcgtatggatcttggagaccctgagttcgttaatgtaacaaactctatgaaccaaatgctctcgaaggctcacgcggaagaaatccaaaagaggattttcgacaacacgacattcccacctgagtactatatgaaccggtggagccaactcagggaccaaggaacgagtcatttctgcgttgtggatgcggatccaacagtgtgtcgatgacctcaaccgtgaattaccgttttggtgctggggtgttatcacttcaactggaattgtcttaacaacgagatggatgat

SEQ ID NO: 12180 - DNA, 619 bp, Arabidopsis thaliana columbia
caacagacagataataccaacaaaatcctgccaatccggagcctaccatcaccgttggccaaagcaatggccatgattgcagccatttccatgacccatgaaagtggattccacataaaccccaaaaacttcagaagtttgctttcctgtcaattttcattgcacaaatcaccaaacactcagtaacaaaaaaaaaggagaccaactatgtattttatctgagagctacaaatgcaaaatcagacctttttctcttcgagcttgttggggccaaagatctgaatcctgtcctccccttcctgcgttgtcaatccttcccttgaacattttagctgctggaaaacttcctcaatcggaattttttcctgaaaaaatcaaaagcaaattcgatcagatgaccaaatccaaacaactcaaactttcacatacacaaaacaagtttctaaaccttaaaaaggagaaaccttttcttaagtaaaacagaaaactttgatgattttgtaccgtagataaatctctctgttcataagtcaatagttggaaaaagcgttgctagtcggtgcaatgaatattttggcgggggaatacggtggtgagtgggacgcacaccgcacgtgat

SEQ ID NO: 12181 - DNA, 601 bp, Arabidopsis thaliana columbia
gtaagaggtggaaattctaaggcacattggaaatccaaggaaaagttacatatcgtacaacgatagaaccatccgctggagatcattaccacaccaagtgcatttatcgaatatgatactggattttggcttaatatttttaggggtattcagaattttctatatcaaaacgataccgaaatctatagtattcaccatagttggtgtcggctatgattccggtttcatagtttataacggtgaaaacgagagggtgttgaggatgataagggtgaattatcttacttgggtactcaagacaattcttatggaactccagatcgcatatggtgcagtagtaatacaaaggacgctcacgtatctcccaaggaacgtcacttttcccgcacccaaagcagtcgtgcttaaccttctgctcggatctatgggagaagttgtgaggttgagccggatcagacacaacgcatctcggcattacttctttatcactgctttggccttgacccatttatattctgctttagtttgtttttgtgtttttatcttttgagcacgcttaactgcggagttgtgatgggatcggtgcattagtgctggtatg

SEQ ID NO: 12182 - DNA, 599 bp, Arabidopsis thaliana columbia
gtgaatgttatgagagtttatataaatattgggaagaagaaaagaagaaaactagtataagctttttatttatttatatctaaggtcacatataccccacttataaaaatatatgaaaacaggagtaaaaaataaaaaagaaacttcaaaagctttaaaatatatgaaagacaaaataaattgattgaaaaaagcattgaaaacattcaaaaacttcgtaagttttaaaagtctaatccaatcacccttaaaatgtatagaggaatatatagtgtttacaaagaaatattaattctagagaatggtaattacaacggattctataatcgaatcaataaaacattctaatcataatggaggatctttgaatattcttgacaccccccctcaagatggaggtgcaagggcaacgctaatattgtctcgaaagttaaggaatcttgctcttggtaacggtttagttaatgcgtcaacaagatgatcgttggtgttgcatgacaacgcgcaaacaccattctgaatctgcctcgaatgaatggtagtctcaccgagaaccatgtagagttgctcatctttgctgcaagaagatccatgagtag

SEQ ID NO: 12183 - DNA, 609 bp, Arabidopsis thaliana
aactattacactcatttcttattgaaattcaaagtggagtctaataaatataatatttttttcgaaggagttcgttacatttgaccaagtggtagtcaagaaaatgtgaaatcagttaatgaaaaaaaactaattctgtgatcatgtaacaaattagactaatattcaacgattagtacttaccctattaaactagagtcgtcgtcggtgaaaagctcgtttccgaccataattccggtaatcctagtggccggaacatagggtttaatgtgagaatctacccattgggtagcttgttgaggatcttgtagtaatggtaaaacctgattttcgatggtgacgatgatctcgatgtttgaatttgcaaaggcactaaggatttgagggttagtgtcgtaaattcttgtttttgtgatccttaaagatctcaagaggttaatgactttatccggtgaaggcaaattgttcccaacttgtccgtaattgatgccaagagacgttactgtttgtagtatattccctatatttccaaacaaagaatcgaacttttagaaaacaatgccaaaaatctttaatattccattaaacaaacattgaaaaaatgaattc

SEQ ID NO: 12184 - DNA, 1215 bp, Arabidopsis thaliana
gactaaccatctctttgagaagattatgccctctgaaacaatatggttagctacgtgtaaatcttgcattatatgacttgtttttgtgatgtgtgacatttccttgagggctgaagttttggttttgatccagaacaggtacatagacgaagatcagttggttgtgaatatgaagaaggtggatggggaattgaagtggcctgatattgtcgagtcctgggagtctttgactgcaggaatgatgcaacttcttaaaggtgcatcaatctacattgttggagattcaactgaaatcaaccaaaaagtgtctcgagagctagccgttggccttgggtatgaattcagattcttctcagtgggtgaattcagttcccgcctttcgttcatgagctcagtatgaatagtatttcagagtcttatacacttgttatgatctgcaggtacagtcctttagattcaaaggaattgctggaaagcttttccaagcaaacaatcgattcttgtaagtttgcgtttggatcatggtcatcatctaacaagaatcttcctcacttctcaggaccctgttgtgtgtcttcattttagggattcttgcagaagggccggattctgtagctgaagcagagagttcggtattggaaagcttgagcaggtaaaaagtcatgtctagtgttcaatctctttccagttaccaagattagccactgatctccatgtctttgcagccatgtgcgtactgttgtctcaactttgggaggtaaacatggagctgcggggagagctgatcagtggagacatctttactccggatttaccgtttgggtatcacagactgaagccacaggtcaatttctctctacatccacttaaaatgaacccttctgaacagaaaacgagaatcactgcttatacattcaagattggttctgaatgtagatgaagagtcagctaaagaagaagcgaggagaagtaagcaagagagggagattgggtattcaaacgccgacgttgtggtgaagctccaaggttgggacccgacgcatgcaaagagcgtggctcaggcttccttgagtgcacttaagcaactgatcatctcagacaagggacttccaggtaataaatagaagaaacccatttgtaaattgatgctttaatctgataaatgttttggagattaaatgcgtcttttatgatattgaaggtaagaagagtttg

SEQ ID NO: 12185 - DNA, 494 bp, Arabidopsis thaliana columbia
tgctggtcgagtaatatgtttcccggtttaaggtcacggtgcaccaaaggctccggtttcatctggtggaggaaatgaagaccggttgcgatttcagatgctatacgaaatcttagctgccaagaaaggattggagagtttcctcgtctgaagagacagtcgtctaagctaccattggccatgtattcatagactaaacatccgtattccggacatgcaccaagcaggagaaccatgtttggatgtctcatacaggttagtacttcaacctctcgctggaactgagaccttccttgtgccgcgtctggtcttagaacttttatcgccactttagtatagtctagtgttcccttgtaaacaggtccatagcctccttctccgaccttgcgactaggcgagaaatcttctgtggcttcttcaatctcctcaatagtgtattttctgtaccttaaagaagacaccgccctcttcttttcatctacggtttcaatgtg

SEQ ID NO: 12186 - DNA, 1711 bp, Arabidopsis thaliana
tttgtcatatgtgttggcctgcaaatttgtgttgtttgttgaaaggtttatgtgtgaagtagtgctagtagaatctaagtttgtttctgactaagagacatgaagtcatgggttgttatgctcattcatatcctgattgagatacaatttaaagaaacttagttccaaagattctgaacattcaccggtacagtgtgtctgcaaatggtattctgtctcacttcaatgtctaaacacgttgtctcaaaatgtatcgtttgttagatactcctttcaagacatatgatttagcctcgcatgtgttcgttgatccaagttttaccggtttgataagtctccagtcttagcaataaatccagaccggattcatgaccaatcgcagatttaccggtccgggtcaagttttaaaacattagtagaaatgtgtttcaccgaacaggaagacttatctgatagcatctcgttgcagtggataaatggcaaaatagtaatatacgtagattctgcttttatctgaaccacatagtgcagatggatatcgaacagaagaacatgatatcgagaagacacgtggcccaatgaaaaagccacgcaggctctgtatagccaattgcaatctggttttagattctcatctcacaaatcttacttatacgatcagtctcccacattcacacttccaccaaacacctctcgtccacatctttctcctttggtggcaaacacaacgacagatagagagaaacgatggcgtcgaactcgcttatgagctgtggcatagccgccgtgtacccttcgcttctctcttcttccaagtctaaattcgtatccgccggagttccactcccaaacgccgggaatgttggtcgtatcagaatggctgctcactggatgcctggcgagccacgaccagcttaccttgacggttctgctcctgggtacgcttcgaacccttttactctgttttgttgctcagtttggaatcagaattgtttgttagattactctgttttgatgacatgatgcaacattgtacgttttgtgaaagattcaattttttttatgttattgggtattcatatttcagaaagttgtctcctttcagaatttgaattccctttagttgtgtattcagagattctagatagattactggaacctcttttgatgacttaagggttctgatttcaacattggaggttgtttagaaagtttcagtttttctaagttattgggtacaacattgtgcagtgactttgggtttgacccacttggacttggagaagttccagcgaaccttgagagatacaaagagtcagagctcatccactgtagatgggctatgctcgctgttgtaagtttcaatatccaatctttgtcttatcataagggtttagtcttgttaagtttaatctaatggacttggtgggtggtgttgtagcctgggattttggtaccagaagcattaggatatggaaactgggttaaggctcaggaatgggcagcactaccagggggtcaagccacttacttgggaaacccagtcccgtggggtactttgcccacaatcttggccattgagttcttagccattgcatttgttgacaccagagaagtatggagaaagaccctgagaagaagaagtacccgggatgcgcatttgaccctcttggatactcgaaggaccccaagaagctcgaggaattgaaag

SEQ ID NO: 12187 - DNA, 613 bp, Arabidopsis thaliana
gttcctacagttggatggagtccacgaccatccactatgtgagaagcaaaattgcagagagcgactaagcttaaagacagaaaaatcagacctggaaatgggccatagatgacttattgggccgcaacaaaagatgaggcccatccagccaaaccctagggttgaagttctgaaagattggagtgatggtcggcggtgaggcgtagagggagaccaccagccagcttttgagctcgtcgtgtgccgtcgacgttctcaccggaaaatgcacatctgatggtccaagagatactcctgccatcaacgaaatccggtgagaaggaactaatggtggcgttgctagtccagatctagagcctaaagataaatcgatgaagacttgctctgatgtttgaggtaaagagccgctgaactgttgtggatcttctgattttggtttcagggacagagatggatccaaggtctgagacagatcggagccaaagaaaaccctcagggaagaagaacacatgggaaagggaatttggatgtttggagagaattgaaatcatggaagaagaatcaaacgagaccaagcttatacagaaccaagagaggctgaatagagttgata

SEQ ID NO: 12188 - DNA, 481 bp, Arabidopsis thaliana columbia
ggaccactgtcattctagttaatcctaaaggagaataaatgaacttgtcaactataatgttattgcgtagaatatcaatagtacagttcacaagcatgaatactatttgaaaacccaaatgtaccactgtatctagaacaaacatcaagcacaataaaaaaaatcccatataaagggttcaaaaaagtcacctctcactgcgacgtccacaagggatgcatttaaccttcacgtatcctcctggatccattcctccacttttacttgtatctggcttgagaagcgttgcagcctcccaagataatgatgtaattatatcaagccagccctcttcatcaccttcgttgaccataggtagattatcaacctccaaaagttgtgctaccaaagccctaaagtgcccttcaacaacatttttcatagcaccactggacttgtccttagagtggaaatcttctcgttaaagctatttgatgggcga

SEQ ID NO: 12189 - DNA, 579 bp, Arabidopsis thaliana columbia
aaaggtgctatttgtgacatgtcccagcctgtcccatctctccataagtctcgggccgtacacaacatctgagccagggaaagaggtacaatagagtcatcagcaataggcgtttcagacaaccacctatccgtccagaacctgatttgtctcccatctccaattacccagtgctgttcccgccaaataacgtcccgtaaacccactcctacacttctccaggttgaggaccagttactctttgctacagtccaatttcgatcatgaacatctcctactttgtacttactcctcacgacttgtgcccaaagacttgaaccatcatttaaaactctccaacctactttagctatcaacgccttattcatcgctgtggctgaacgaatgcctaaaccaccctccctccttggtaagcacacacgagtccaggcaactaaatgttgtttcttcttttccagagtacttccccaaagaaaggctcgagacaccttgtccaaaccatctaacgtcgactgtggcagtttaatagtactcatggtgtgcactaggattgacgtcaaaactgcattggtgagtgtg

SEQ ID NO: 12190 - DNA, 514 bp, Arabidopsis thaliana columbia
gagtgaatatggattgaaacgttttaagaaggatgattgtgttactctaatttttgtaacaataaacgttattatatttttacagttactccccataactttgtaaaaagtaaagaaaagccccaaacagagagaaacgaccacgtaagagtggtttggatcactaaactcgaatcgtcatcttcatcgatcgatatgcgacacatcatcttcatcgtcatgttctgtcttgcaaagttcaaacctttttacaaatcagacaaaacccaacaattaatgaaacaatgtcaaaaacggctaattttctcagcctgagatccaatcctctacctccgattttctcctccaccggaaactctcctttcctccgagcttcctcggctctgaatcttccgacaactgcttcgaaacctttccacagttggattcgtgcttcttcacgtcgccggttggttctcggtggttttggcggcgcttctttgtggatgacaacaatatgtccggtaaatttggc

SEQ ID NO: 12191 - DNA, 703 bp, Arabidopsis thaliana
ctaatatatttccctatattccgaaatctgaactagcttcttttggcatttactttcaggagaatatgtggacatgataaaggctggtattatcgatcctttgaaagtgatcagaaccgcattagttgatgctgcaaggtacacaaagattgaaaattggttgtccaattttgtattttattgcaatgttttgctaatttattctattggttagtgtttcgtctttgttgacaacgacggaagcagttgtgactgagattccaacgaaagaggtagcatctccgggtatgggcggtggtggcatgggcggcatgggtggcatgggcggtatgggaggaatgggtttctgaggagaactataaaccctgagtagggttctttggaatctgttgtgagagatgctacggttggttcatccacaagacactaatgtattctttaatcatgattggtagagagagaccttcagattttccgtgattttcaattcacaaacgatttataaactattttgaagaagatccttttccgattcatgcaaatttcttccaaaaataattcagattagagagttcagtgaaacatcaagtaggttgtgtttgcgcatatggaggagattccttagttctcgccaactatcaccaaacccgttatatcttattaacacgatatttagctgtttatttatatgtggtcaagtaca

SEQ ID NO: 12192 - DNA, 398 bp, Arabidopsis thaliana columbia
tgagcggatagctgcaggactccaatgagggtgaagtgttttcaaaagaccaacgacaccggagatgtgaggacaggacatggaagttcctgattcggtgttgaaaggagttcttcgattgtcagagtctaagtctgtagggcccgtggttccgtgaaggcggctatgatgttgacaccgggtgcagtgatgtcgggcttgaggatccctggtgtgatggtgtttggtcctctggaagagaaagaggccatgaaaggagcaggctttgtgttcagcgtacgggtaggtgctttgatgtaacctttgggatcttttgtggaacttaggtaagaaaacaaagtttcaccatctttgtagtccatttgtgaagcaggaagaacatgagcgtctgagaatga

SEQ ID NO: 12193 - DNA, 1006 bp, Arabidopsis thaliana
ctgagtcttcttctccttcatggatcgacgattgagacttttggagtttcaaagacggaaatttcggcgcagatgttatcggaaagctgactgatcttctccgaatcgtcgccggaaagctgactgatcttctccgaatcgtcgccgggaaatcaaggtgttttggttaatgataaaggatgtgactttacgacgtttcgagttacggaagagcaaacccacgaactcattcttcgtctcgtggtctatctacacttcacttcactgattatcacaaaaggctctctttggtggctgcaattgaaatttgagcgaggaagataagatgacgtcatattttacattaaaataatgctcgtgacgtggctatcttatacgacgacgtttcattgcatcatgaactcatattgaattccaagtttgtttccaacattccatattcaaagattaaaaaatgtacatagataagagttttgagttttgacccccaaagaaaaaaaaagttgagataaaacgaaatcttttagtacatatcatcaaaatatctaaaacgaaaacattatgagaaaatagtaacgaaatcttttagtacatatcacccaacctccaataggatcatgagaaaatagtaaacaaaaacgcaaaaggtgataagaaaatatttcccaattgaattggaagcaaaagcaaaccctaactaaatttgcaagcaaccgagtcactacttctttcttctccttgtaaactctgttttcttctctaagtatctccaactcttccttcattgtctcatcaccatcgtcaaattcaacaatttggtctttttcagtttcagcttcaacatcagacgactctgtttcttcacacacttccgatcggatctcgtcgcatgatgatgagttatggctgtccgaattcagagaagaggttttgatcaagagatcatgcttctgcgccaaagagcgatgtgaacggtataattcctcgagcaattcaatgagctttg

SEQ ID NO: 12194 - DNA, 317 bp, Arabidopsis thaliana columbia
catctggcgttagatggatgaaacgaggaggctttcacaactgtctgaagagcctagacgagtaagacttgtctgatcaaacaaagcatgtggggattcggagtctatgctaatcctatcagtagttgcgatgtaccatttgggcatattgatcgcattgacgagtatctttgacttacacgttttcagttacatctcactagagtaaggtgcatgttgtggactttagtgagggtgggcctgttcgatgtgcacgctgtagagggttacataaatccacatcgatgaagtccacagaccaaggaaggcagttcatc

SEQ ID NO: 12195 - DNA, 572 bp, Arabidopsis thaliana columbia
tgataaataagtgatttcttatataaaaatgtgttagttctttttgcaattttcaagaaatgctagtctgcgaattaagaagatattagtctgcacctaatttcttgagaatcaaccctaccaagcttgtagcttatacccgaattatgagagacatgagccaaaaatagaagatgcattaaggtactctttgcaactgttagttccattcgacataacagctttttagccttttacaacatttctttttttctttcacaatgaaatttgtgcatctgtatcccctctatttttattaatcttctactttgaccccccaatggttctagcagccaaaaacccctcggaaaatctcagagaaaaataaatatatatggaaaattaaacattgatgatgttgatcgattgattgatttacctcacaaactcaagagaccatcattcttttgtgtagtcttcctatgagaaaaaagatgtatttttttaggtgtggtgactaaaccaaggcctgaccgaacccgttgatatgaccgtttgagtgaacccctgaaccattaggtataagctgaggt

SEQ ID NO: 12196 - DNA, 548 bp, Arabidopsis thaliana
gtaaagtgacgaggatgagtaaaactccggttaaagtcagagaaccggctatgataagtggaagagtctggaaacgatgatggccgtcactaaccgtaggcgtcggttgcagcggcggaatatctggcggagagaggcgagatggcattttagtaaatataggaagttacagaagtgtcatttaatccggagtttccattgaagaagaagatggtgagatgttaaaagattttcttcagctacttggaacactcgcgtagtaaaaataaagagatatacttgtgtgacaggcgagcgataatggtaatggtgacgtgtcggagaataaatgggggatggtgactgtgatttgtgacagtcatgtgagcggatattattgctcacgtcgtttagcggaagaccggtgagggatagatttgagtcaccgagtcgtgagattttaatgagggagcgtgatttgcacgcggcgcgttgaggtgagattcacgagggttttgttttgaaaccttcttctccttctgaagaggtccacggtgggacctacgaaa

SEQ ID NO: 12197 - DNA, 1212 bp, Arabidopsis thaliana
  unsure (1)..(1212): unsure at all n locations
tgaacatggaccataaatttaacttgtacagtactctacataaacggtaaaaaacaataaagcgcttggaaaaagagagtaacaccagaaagcaaagagctttgaagaaacccaaattcaaaggtactcaatttcatctgactagctctgaccccatttcttcaaaccaaagaatgatcacaccaaatccaaaatttcccctataaattacctatctcacataaatataaagtttacttctcttacctctctttcctctttttatcatttacttcataaactttctagatatctgcaaagcccttaatttgaattcatcactaacccacatgcccaaaactttagcaacacacaaccctaataaatttttgttggagggttcgatgagttaattcattctttattgtttttgatcttctgtgttttcccttaagaaagtgattatgtgtttaataggtttgttgggagatgtgtcagtgacatcaagaagacgaacaacaattcaaaaccgtattaaatgttgtctttttgatcactcaagaagaaaacaacaagacagcagatgttttcatcattcttcacaacaagtttcgttcaagtctgatccgatgttctcctctagctttctcagattgattcttttactctgtctcgtctcttcttccttctcctccaccacttcttcctccaactccactgccgccgatcaaactctccggccgcaagaagagctccagaagctaacactgattagacaagaactcgacaaaatcaacaagccggctgtgaaaactattcaggcaatttctctattctcaaatatctcaatttgataaatgtatatatatacagacatctttgtttactttgttactctgtttcgactctgtttttgctctgtttttactctgttttgttaattaactgacatgcaagttttgttactctgttcttactctgttttttgctctgtttctttccatgtgttatgtttgcagagctcagatggagataaaatagattgtgtttcaactcatcagcaaccagctttcgatcatcctctcttacaaggacaaaaaccattggtaaatattatttccctcctcttctccattttatctcttttcattagtattcttatcaaagatttcaaatgttcttatttaggaccgcctgagatacanaaggatcagcgaagatgatggacatatg

SEQ ID NO: 12198 - DNA, 485 bp, Arabidopsis thaliana
acaaattctcctccagcagaaaattgcacagcgtccattaggttctggttccagattaagcaccctattccatggatataagcaaaggccaagcaagaacaattgtggaggcaactttggtggcattcttcagcatccacagaactttcatattcgtaaaagtctggaagctttacgttggtaacaggatggaagatatttacatctttgccagtagagtttccttgacaatgtagttccgtaagcctcgcacaaccaccagtccagtttcctcttttccatgtctcagtggaatgaggaacaaatcctttcaagcatttgcactttaaaggtactgacacaatacacaacccaaatggtccacatacaccgtaaatatcgcatgaattggctggagcatgtagcttaattccagtccgttccattatgccgaaaccttttcattgatccttctgatgatataattatacgtgaaagtttgaaac

SEQ ID NO: 12199 - DNA, 1011 bp, Arabidopsis thaliana
caacttacaagatttgtatgttccattgaacaaaactctcttcaatatatctgaacccctaaccattatcaaattaaaaaaaaactactaaacattctgagctaagcttctaatctcgggctcctccgcgtctgcgctccaacgctacatttcatcgagtcaaacgttaaatcaaggaagtacaacgaacaaacaagaacgcaacaagttatgaacattgggatgggaccaaagatccataggaataaaggcgaggagaagtagaacgctcgtagtcctaacgaccagaagtaactcccacggttaaccgttgcagccacataatcttggtttatcataagactaccattaccacgaccacctgaagaaacagccatgagctgtttaaaggggacattgataaggatgcttgcatggctgtaataacgaattgattggacattgaggagaaacgcgactaggaaacacacgaggattgcgaagaacttgagcgagaaggctcggtcgcttttgtctccaaacacaaaccagactgatcgctctcctgtagcgctagtcattagtaccgcgattagtgaacataacattattgcggttgatgctaatagagttgatgccattatgttgttccttagcgtttgaaccgctaaaacgccgtttttggatgagtcctgtttacaatagttgttaacggaacataagttagtacaagaaatctcaaatccaacaaaaagtgaaaaaaattggtggaggaaataatgtaattataaacattttaatagaaaaaaagtttcccaaaaatgcaaagcatcttttgagtgttgttagctttcacacttgcggattcatttagtaaggaaatgttcaaaatcttgcattaacgtaaagaactttaacataattatgttcacatagaaaagaaaaaatctgagcaaaagaagaaagaatacaacttgatactgtttcactttcaatattagtatccatttatgaggtgcatgcatgatgatt

SEQ ID NO: 12200 - DNA, 1041 bp, Arabidopsis thaliana
tccataatgaagcttacttcatcagagctttgaatattatcacttcaaaactaactacatcagagcttgcttctatcccccaccaaaactaactacatcagagcttgcttgtgtccccatattcaaatttgattactgacaaagaatcaacaagcaaagctagcattgattaaagaaaaacgatgataacgtacccataaatggattcaccacctcttccagttcctgtaggatccccaccttgcacaatgaaatcctgaaacagatcaatagcaaagcaaaacaatttccttaaaacttcatcacaatgatgatcttaagtacaacgaaaagtagactgaaacacacagaaaacataccttgacgattctgtgaaacagaacgttgtcatagtaacctctccgggatagctcaaggaagttccggcaagttctcggggagtgtttgtaatacatctgagtaaaaattgacacacagatcaaaacattgtaaaccctaaaaccccgttctaaaatcctaaagtttaagctcgattcgagaaaaatacaattggaatgtagaattatagagaatgaaatctagatctcaagttcgtgtaagctctatatatgaatgtcatggccggaatgtgttatcgttgatccgataagcgaaaaagtgagagagagaaacatcgacggtgaaaggacccatggaggtctcgagcgtaagctccggcggacttccttcaggtcttgccgacatttttcagctgacggagagagagagagataaaagcatcgattcgtcgggaaccgaaggagtgtatgatgcgacgctacactgcttacctttatcgggtcggatctgatcctttattatcggtgttatgggtcggctctaattttctataacctttgggccttttagtgtaaataatattaagagtgtttattatagaggttgaaactattggaaaattaagttcggcccaattaaattaatgtcaattaaacctttgggcattattgatgtttttaatgttcttcatattgtcacttg

SEQ ID NO: 12201 - DNA, 929 bp, Arabidopsis thaliana
tttctattaccgaaatcggttaaagtaaaatagtagttgtcggtgagagtgagctgtacgcgtttcttcttctccttgtgcgctttctggatcgaacgaagcattttcctccgacaatatatttttaagtaatgacaatgtttccgcattattgggtttaattccatttttaaattagggttcttcagatcgacaaatctttctctttctctttccccgatcggaatcatgctaaagatctgaactttttctcagatccgtgaataagtaagtacggagagacagaaacatactcagactgatctgaggaaaacaaagttgatggtcgcaaacctgtaagtgaaatctatagagagagacgttgaagaagaaaatgggtcaagatggttcgccggcgcataaaagaccatccggaagcggcggaggacttccgacgacgacgttaaccaacggtggaggaagaggtggtcgtggtggtttgttacctcgaggtagacagatgcagaagacgtttaacaacatcaagatcacaattctctgtggtttcgtcacaattctcgtcttacgtggcactatcggtgttggtaacctaggaagctcaagcgccgatgcagttaaccagaacatcattgaggagactaaccggattctagctgagatccgatctgattcggatccaaccgacttggatgagcctcaggaaggtgatatgaatcccaatgcgacgtatgttctaggtcctaagatcacggattgggatagtcaacgtaaggtatggttgaatcagaatcctgagtttcctagtactgtcaatggcaaactcgaatcttgcttttacaggatccctcctaaccttgtgataccccattggtgatcatacttttgaaactgtgaagacaagattgatatgtagctcatggaatgagatg

SEQ ID NO: 12202 - DNA, 952 bp, Arabidopsis thaliana
tgaacatttggcatattgtgtttgagcagaataaaaaggagaaatttagtggtgctgcgaagaatagtgcggtgaaagcacagcgttatatggactctcggtctgatgttagacaggttagtgttgttgtgttctcggtgaatttgttgtctaagcttcattttcctgtcacttagaagattttttcttttgtggtgttgtgatttatatcatattttcagggtgcttttgctaagaagaggtctaatttccaaggaaaccagtttcctgtaacaacaaccgttgctcgtaaagccgcttctgctactccgcgtggtagaccttataatggtggaaggatgactaatacgaatcaatcaaggtctagattgctacagataattctctgatctgtttgttaacatgggctctttttatggtcttcgattatttctgctactaggagaagcttctaagctgcttatcatagggtgtgtctatggaaggaaacacgggtttgtatacttgtgtttcaaacccgtgtttcaaacatagtaattcccttcctggatgatggatgctcatcagattgatgactgtataaccctggctcaaaatagcgagtcaaaaccatctagttgagtttaaggaggatatttggaggaggagttaatactttaatggggtggtaggtttgacataaaggaaggagtttaagctcattcagattgaggagagacttttctggtcattggttttggagtttgcttgaagtcagttttaattatcagatttagccaattggtgcaatatgttatcgtgcttaattcttaaaactcagttgcattcatgtcagcttcctaaatgttgagttctgtcttcttgttgtgacctaaagagtatagcttgagtcagttggtctattgttgggagattgaaatgggtagatgcacggttactaagacagcatgag

SEQ ID NO: 12203 - DNA, 518 bp, Arabidopsis thaliana
gaggtttgcggagtcttccatggttagaaggacaaaatggggagagtgaaactatggtcttccaccggcgagagagctctaatagtggcggctctaggcagtctgcgtcttacatagcgtctcaggaagtgtccggcccgcgatgagatcacctaaatgtgaatgtatcattgtctttagtatgatttggttttggttactttgttaatagtgataggccttgttcatataatctctactatatatgataattattgaaaaatcttgacatagagactacaaacaaaagtgtttcctcttgtttatgatacaagaagagcattgataataccacagactctagtaaaacagtcttatcgttaccgaagtttgtaccaatgaacactctaaaggagacgaagattgcaataattgggtggtctttcagagctgatgtatcattctagaccgttgcgtttgtcagatctttcactgccgcaatttcttgaggcggcatatacaatatgaccatgttagaa

SEQ ID NO: 12204 - DNA, 349 bp, Arabidopsis thaliana
tgacaactagatttccactgtctaaaagctctacacgagacccgttagatgcaagagcttttccactggaccacacaacaccatgtttgccattaaataactgaagacttccgttgctgctgataaccagatttgccgcagagtctgtaacaggcttttctctatttgccacccacacaaccacccggggaatgatacccttgaaggagattccgacatactgattttgggagttattaaaactgaagaagcccagttcataaactccattggaggagctgagagtttgtcctattgacaaagggctctcttccgttatctctgcaggtctacaacttataaagatgct

SEQ ID NO: 12205 - DNA, 609 bp, Arabidopsis thaliana
tgcgtgaaggtttgcctctttcaacaaatgaaaagtatcctgacccatttacatcctgtgttaagatgaatggacttgtgtatgattcatccatttgtggtgatccagtgaaccttgttttagcccatggaccggttctataataacgtgtcgagcctctcataataatcccctgtgatggcacttgcggtgtaatcagagccacaaattcgccaggcgatggatcggtgtaacttttccaagcagtcaatcctcgcttctcaccagcgacgagattatacatcataattgacgtagggagcagagtattaccaagatgctcaaagctttgccatagagtccttcccgaaactttgtctatgaaaacaagatttccatggtctgtaagctctgcacgagacccattagatgcaaaaatatctccggtagaccacacaacgccatgtttgccattagataacagaagactaccattgctgctgataccgagatttgccgcagagtctgtaacaggcttttctctattagccacccacacaaccaccatggggaatgatactcttgaaccaaattccgagatactgattttgggagttattaagactgaag

SEQ ID NO: 12206 - DNA, 556 bp, Arabidopsis thaliana
ctatgggaaagctttgagcaccttggtaatactctactccctctctcaactatgatgtataatctcgtcaccggtgagaagcgagggttgagttcttggaaaagttatactgatccatcgcctggtgacttttgggttcagatcacaccgcaagtgccatcacaggggtttgttatgcgaggctcgaccccttattatagaaccggtccatgggctaaaacaaggtataccgggataccacagatggatgaatcatatactagtccattcagcctacatcaggatgtaaatgggtcaggatacttttcgtattttgaaagagactacaaactttcacgtataatgttaacatcagagggatcaatgaaggtgttacggtataatggattggactggaaatcaagctacgagggtccagccaattcatgtgatatttacggcgtatgtgggccttttggtttttgtgttatctcagatcctccaaagtgtaaatgcttcaaagggtttgttcgtaaatccattgaggaaatggaaagaggaactggacaagtggttg

SEQ ID NO: 12207 - DNA, 511 bp, Arabidopsis thaliana
caaactctcagcacctctaatgaagtttatgaattgggtttcttcagttttaataactcggaaaatcattatcttggaatctggttcaagggtatcattccccggacggttgtgtgggtggccaatagagaaaatcctgttacagattccacagcaaatctcgctatcagcagcaatggaagtcttctgttatataatggaaaacatggcgttgcatggtccagtggtgaaacttttgcttctaacgggtctcgtgcagagctttcagacagcggaaatcttattgtcatagacaatttttcgggaagaactctttggcaaagctttgaccatcttggtgatactatgctaccttactcctccctgatgtataaccccggcactggtgagaagcgggtattgtcttcttggaaaagttacactgatccattgcctggtgagtttgtgggttagattacaacacaagtgccacacaggggtttattatgagaggctcgaagcattattggag

SEQ ID NO: 12208 - DNA, 1046 bp, Arabidopsis thaliana
tcgactctagcgttattttttaaagccgaaatcaatgtaccaaaagaacaaattgtcgtttaaagaacatgtattagtgcgtcgatttagtggaaacactcccttttattctagtttagtaatcggtaatttctaacaaatgtaaaagagcctaaaacctttttttcttttgcaagcaaatgaattgaagagcaacaagagatcattagatagtaaagtcatcaatatgttaccgatatgttccactctgcatctccagacaccaaacgcagtgaagcccaagatcatgaatagagtcaggctcactatactagcaacaatagtcttcttgcgcttatttccatctgagaaatgtaagacaacaaattaaactaaaaagaaagagaaatatcaaggaaggtctgtgattttaatttttaagccatacctagctcagatcgtgcaagacgaatggaaagaagttctcctgttgcagaaaattgtacggcatccattaggtcctggttccacactaggcaccctattcccttaatataagcaaatgccaagcaagaacaattgtggacgcaacgttggtggcattcttcagcattcacagaacttgcaaattcataaaagtctggaggctttatgttggcaatttgatggaagtcatctgcatcttcgccagtagagtttcctagacaatctagttcggtatgcctcacacaaccaccagtccagtttccccttttccactcctcaacagattttggtacaaaacctctgaagcatttacacatgggagaaggtgacataacacacaacccaaatggtccacacgcaccataaaaatcgcataatttttttggagcctcatagtacaattcccagcccattccattatcccgaaacatctttattgatccctctgatgttaaagttatacgtgaaagtttgtagtctctttgaaaataagtcaagtatcctgacccgtttacatcctggtgaagggtgaatggacctgtgtatgattcatccataaacggtatccagtgaaccttgtt

SEQ ID NO: 12209 - DNA, 560 bp, Arabidopsis thaliana columbia
ccccaatacacaatcactcttcccttataaagcaaataaacgcacgtgacctttatggtttcagtcacattgcatcatctaatttcatcttgtctttattatcacaatgaagcttccgcttctcaaatgacaaatactcacccaatctttgtacaaagtgttaaaatcacaaacaaaaatcaatagagagttttgaactttttcaatttccaccatacttagccaaacttattaaacaaagaagccatggaaagcctagcaaatgtagataaatagcagtagacattatcgtaagctacgatgactctccattcatttgagttcgtggtcctcgcggcagtctctctagacgggtgattccttggtataaccctagcaacatgctcaaattgcttcgcagcttcctctcccttattcatcaatgtatacacgactccttgaaacaaatatatagtgaaatcatttggatcttccttcactagctcttcacaaatccgaattgcttcaactgattttccttcaataaacctaatctgtgcgatcaacattctgaaaccgag

SEQ ID NO: 12210 - DNA, 785 bp, Arabidopsis thaliana
  unsure (1)..(785): unsure at all n locations
gtaatggccttcttgcgcttatttccacctgtgacatataagacaaaaacaaattaaacaataagccatgctgcttccggtaagaagagtatcaatggagttgtagataaagttgtaaacgaagtaattcttccgtgtaatcatttgagcgccatacctagttcagaacgtgccagacgaatggagagaagttctcctccttcagaaaattgcactgcgtccattaggtcttggttccacattaagcacccaattccatcgatataagcaaaggccaagcaagaacaattgtggaggcaacttttctggcattcttcaacattcacaaaacttgcaaattcgtaaaagtctggaggctttatcctggcaacaggatggaacacgtttgcatatttgccagtagagtttccttgacaatatagttcggtacgcctcacacaaccaccagtccagtttcctcttttccactcctcaatgagtttaggaacaaaccctttgaaacacgtacattttggaggaacagacttcacacataacccaaaaggtccacatacaccgtagtaatcacatgagtgttctggagccacaaagttcaatacccagtccgtcccattatgccaagacaactcctgtgtgccctttgatgttagcattgtacgttgaagtctatcgtttctgtttaaataagtgagagatcctgacccatttgtacctgctgaacgctgactggacctgtaaatgtgtcaccattagcggtatccncgtgaacttgttttagccatgga

SEQ ID NO: 12211 - DNA, 575 bp, Arabidopsis thaliana columbia
acggaagtgcaagtgtatccaaaggagttagtggcggctaacaaacgaagtgactttatgcgaaagtcatcgtcacatgcttcttccgttctccaaggaacatcctcagcatctttcatcattctcccaaagttaagtatcacatacttatatactattgtgtatatattgatgattattagaaatgtgctaaattatggagcaatgagtagtttcaaagaatgaaataatttgaagttaattcaatcaatgtcagattacaagaatgaatggacaataataagagaagggttaatgatttaacatatcaatgtaataaaaaagtaattacaaagaactacttaattagtgatgacaatcaatcaaagaatttgacgcggccgtgaagagaagaatctgatctttggatgcaaacgcgaatttcggtttctcgcagcatcgttcatcttcgggtgctggaagattcagatctaactggagaaagttctttggccgtatagattcttcatggtgatgatgacttgatgatgatatcgctgttttgattgctgaagtagcgtttgcgtttattgtta

SEQ ID NO: 12212 - DNA, 572 bp, Arabidopsis thaliana columbia
tttctatggccttctccttactcttccagctgtagctattggtgtttcacttccttacttcatcagctatctcttcctcaacaaaattcaagtatgtgtctcgcttaagaaccagttatattcttagtaacgactactttgtatgttgctgaaattgatgaatgttgcagggttggttagaaagatatccagatcaagctgcaatgttgagagctgctggtggaggcagttggtttcatcagtttcgtgcagttaccttaatccggatttctccatttccttttgctgtatataattactgcgctgttgcaactcgtgtgaagttcggtccttacatggctggttctctcgtaggcatggcgccggagatttttgtcgcaatttatacgtaagtgtggaaatgacttacaattttcttggtaatgaatgaatgattgatttagcatcctgatagtatttttgtttgttttggtgtttcagagggattcttataaggacattggcagatgcatccactgcggaacaaaagggtctctcgattcgtcaaattgtcccaacatttttggttttgt

SEQ ID NO: 12213 - DNA, 810 bp, Arabidopsis thaliana
tttcttatagtgcagcagtcaaaacagtgctgcagtaaccttcttagaaagtctctgcataaacacgaacaacccgatgatcttgtggcgcttttgttagctgctaagctttgcagtgaagagccttctttagctgctgaaggtacgggttatgcgcagagagcgataaacaatgctcaaggtatggatgagcatttgaaaggcgttggtttgaggatgttaggactttgtttagggaaacaagcgaaggttccgacatcggattttgaaagatctcggctgcaatcagaatcattgaaagcattagatggagctatagcttttgagcacaataatcctgatttgatctttgagttaggtgttcaatacgctgagcaacggaacttaaaagctgcttcccgttacgccaaagagttcatcgatgcaacgggagggtcagtgttaaaaggatggagatttctcgcgcttgttttgtcagctcaacaacggttttcagaagcagaagttgtgactgatgctgctttagatgaaactgcaaagtgggatcagggacctctcttgagactcaaagcaaagctgaaaatctctcagtcaaatccaacagaagccgttgagacttatcgttaccttcttgcattggttcaagcgcaaaggaaatctttcggacctctcagaactctttctcaggtttcaaaatctattttgttctctaatctattgagatcatcagtcggaaccattataaaattgtattggagaacttgtacaataacacagatggaggaagcaaagtgaatgagtttgaagtgt

SEQ ID NO: 12214 - DNA, 1181 bp, Arabidopsis thaliana
acattcatttcaactttaaaatctcaaatcttcgaaacacacaaaaaaagttgtccgaggatgctaaatctttttacctgaacccaagtcttcagtatcatcaatgattggtgctacttggttcctatgaatagactcaagcgacttccagtccgcgcttccatttccttctacacaagcttggtctccagaaacccattctttcagaacatctatcctgttgtgtgacaacgggtctagtgtgtcatctccgcttccaggacccctagagaagacatagaaccattatttctatactttcttattccttggaaacaatgcagttggctgagatgggacaagatctaagacttacagttgtctgaggcgcatgttgtactgaacaaatacaagatcgctgagtcgtttttgctcaatggagttctttgattggtatatgtgttcgacaggtatctggtttctcctgcagctaactgatgaactgcacgtctgactaagaatgcgtatcgcaaaacgtgagaggttcaagcagctttctccatacgtagaccaccactcagctaagaaacaagaatgtaacgagagtcaagtaagagaagtacaagcgaaaagatttatacaagaaaatcaaggaaaattaaccataccaggaagcattgtatcccgagctcttattgccaagtttcttccaaaaactccaccagcagttttgtaggaggttaactccttgatgattttatcttgaatcttgtcgtcaggaaccaatctctcaatgcaatcgagcaccgatagaataagctcactacgcatttcttcgttggtattataaaagagttttggattaagaaagaaaccagcagcaagcaaaggaatatgctgttgttgctcccaccatcgatctataattttccagtatattatgtaatcctccctattaaccagatgtgtcttgattgcatcctttgctcggtacaatgctgcatagacataccccattgcaggtctcttttcagaacaaactattctcaaagcccgcaaaagaggactagttaaatggtttaccaaagctactgccttccaaaaggcttcatcagtgagagcattcatcaccaatccacttggttcttccgaatatgaacattcattccactctggccgaagtaaccatagcctgcagattg

SEQ ID NO: 12215 - DNA, 472 bp, Arabidopsis thaliana columbia
ctagagagacaagataaatcagtttcataaaactaatatgatgatttatgagaaaagaagagccaaaacattctcaacgtagacactactatagaacacacctcaaggtttgtcgttaatcaccaataatctttacaggtgcaagccccgtttttcatttggtggaatctctttatatctcgcgtgatcacttctctaccaactatatctgacatgatcttcaatgcgttatgacaatcaacacacacacgaaggtttttgatcacagtgaaaggtttacggggggcgctgttgagaacagcacgagcaaaagctattctctcgctatgaccaagaagtaatgtctctttactctcttggtctatatcatgcaaagccattcttgtttcagcgacatagcccacttccaccatatgcatctttaaattcctcaatagctggaacagttcatcattctcaggaagattggtat

SEQ ID NO: 12216 - DNA, 1046 bp, Arabidopsis thaliana
ttttcccatgagaccgttactatttcctcatcgttactttcgtggtgtttcctctgactgaactgtttcctgtcaccaaaaaatgcgttttcatctcagactcacttgacaattttgacgagaggactatgtattatttgttataagaaggtatatatacctgaacctgagcatctgcgtcatctaataaatctctaagaaaaggaatttctttttttaactcatcattcaatcccttaagatactgaaattaaagaaagaaacattaattattagtgttacaatataaacactatattgatgttactaccgttttgtgaatgtaaacttactgtcatgaaattggcaatgatcattttggcgtcgacgtcattatcagactgcaccatttctttgaacttatgatgaccaattctgataacttgtgaaagtcgacgtgtcctcactgtgaaaggctgaggaatgttgaacactactcctatctctcctgccatacttccgggacctaacttcgctaataccttcaccatttatcaaccaactcttcatactctatctcaatcttttaagtttatgaaatgtgtttttcttataactgaaatttgttcagagttttacctgttcactcacacccttggaagcaattatatcctaaaattgcaaattttcttttaatcagttgaagtcaaatataaataagaatgagtaaacaatcttttcgggataaatgaatgagtaaacaatcttttcgggataaatgaatgagtatgtagaggatatatagatatatcataccactcctccagatacaattacgtagaaatccgttggaatctcattctgcaagattatctccattttcggcggaaaatattctgcttgtatttgcgaaacctacaacaacaacatagaagaatgaattccactgccttgtttacaaggacaaaagaaaatggaattgttgatggacgatcacagctggacgaggaggcttcggggaatctttaaaaagatagcttctcgatgatggacggaatagatgtggt

SEQ ID NO: 12217 - DNA, 621 bp, Arabidopsis thaliana
cccaaagtcttaatggcagagtaaagcgcatcaacttgagcaaacaacatgttgtcataatgaagattagtgtttggatcaaccataccttgattaggttgaaacaaaacatactctaatggaacttctttaggactatctttataagcaaaaaagggataagcatttatcaagaaaggtgattcgatttgagaatgaaaatcaagaagtggttgaagatattgaataaactcttctttgaatgatcctgaagaaggaggataagatgttgaaagaatgtctaaagaatgagctgaagttacggttacttgtttctctaaaccaagattggttaaagcagcgtaaaccgatttcatagccggtaataggctttggatgaggacatgatcattggttttgaagatttcgttgccgacaactattgaggttattcgtgtttttgagatatgtggttcaagtctttgttgtaaccaatcttgagctttggttggatctgttgacatgttttgaagatactcgttgcctaaaccgatcatgaaatctacttgtgagtttgagaaggagaagaggacgtttggatctgcgtcgtagagttttaccttgtgatgtttagtgacgaag

SEQ ID NO: 12218 - DNA, 504 bp, Arabidopsis thaliana columbia
ccgtagaaaaccaatcccattcgtcaaatctccggtggtctccggcgcacttccgggtcgggtcaatactttgtggatcttcgtatcggacaaccgcctcaatcgttacttctgatcgccgacacaggaagcgatctcgtttgggttaaatgttcagcttgccggaactgttctcatcattctccggccaccgtcttcttccctcgccactcctcaacattctctcccgcccattgctacgacccggtttgtcgtttagtacctaaaccggatcgagctccgatatgtaaccatacccggatccattccacgtgtcattacgagtatggttacgctgacggttcattaacttccggtttattcgctagagaaacgacgtcgttgaaaacaagctctggtaaagaagcgaggttaaaaagcgttgcttttggatgcgggtttcggatctcgggtcaatccgtatcaggtacgagtttcaatggagccaatggagtaatgggcttg

SEQ ID NO: 12219 - DNA, 595 bp, Arabidopsis thaliana
aatcaataaacatatctctctgttcgtgtgtctgtaactctacaatgatctgtatagtttctttctctctttttttctctccattttcctggaaacaaatctgtaacaaagaagaataggaacaaaaaaaagctcagctaacaataatacaaacctcactcgatttttcttcaccactctgtacagtttttatcaaatccgaatgggcaaaccaaagttctgaaacgttcgtatctctcctctgagacctgcagtgacaatcaccattccccaagaagccgatacattccctgagtttccatttgacgacgacatatccgtactcagacgattcccacttctgttccttgcaaacaacagtttctcttcaggccaagtcgctgacattctatcgaaaaagtatccgtttgttgcgctcgatatgatccattccgtggactgtttaatcgctccacagtccccagctggtctaccggtgtaggcggatggttagctgtggagatattgtccaagttattggtgcttccgttaaacccgctctgttttgggttcccagttttctgttgaggcattccagccatgagatggctgcaga

SEQ ID NO: 12220 - DNA, 1147 bp, Arabidopsis thaliana
tgaagacgagtggacatgtaggaaaggcaaggatggaggaaggcaacgctgtgggtaatttggtgagcatgattacgctgggagttaaatctctgagtgaattgggtatgcttgctgcaagagatggtggaaatcttgtggccattcttaatacatcttggaagggtgtgattacattgcttcaactagacaagcagacattggtatctaaggtagatgtaggagaaattatcttaaagctaatatcactgatcaaggactccctgagatttgctgctgaggcttggtcttgctcggtgaaggaaaacatatctgcaacggaagccagaagggtctttcttcctgtgaaattttatcttatcaatgctgttaaagttgtggcgctgtttccaagccaggcgtctatggtgtccaaggatatagcactatgcatcttgatgatctctgctttcaaagtttcactgagccaacaaactcatggaaaatccgcaagtgaagtaatgactgatcttctggagaaaacaactgtagatcttctaggtgcactgttaaatgcagctgaactaacacaggaattcagggtcacacttcttgattcattgttcgttgatgaattctcaaaccaaatctgtaagaagcagagccatgattctcacacaaaaacatcattggtggatatcttgtctttatctgttgaatctgcgacaagtgctagagatttgctcctggcccgagttgtattgttccagtctgtcatgaggtattctttcgagcttgacaaagatgcaaagcttgcaatcaccacaaagctgcaatggcttctcgacatattagcagacaaagaggtttactcttcagttctttcctctcagctaccaatggcagatggttctgggaagatagtaatctgggaatcaatgtattcagctctgcttctgtctctcaaaacccttatgatcatactctcttcaactcctgcctgggaagagcttgaaacattcctacttcagaatctcttgcatcctcacttcttgtgttggcagatagtcatggaactctggtgcttctgggttcgtcatgccactgacgatttggtggtcgatatgattaatcaactttgtacattcattatgtcaatgccatcatc

SEQ ID NO: 12221 - DNA, 632 bp, Arabidopsis thaliana
tctagtaacggcgccagtgtgctttaaaggctatggcccggcgcttcacgatggagatgaataaagttaaggtgccgctcgtactggtcaagaatatcggtgatcacctgctctttgctgtagtccatcaggtcgttgccctggctgccttctaacaggaaggtttccagccggtagtaggtcgatttaccgctgcgtgcgcggtaggtaaagcccggcaccgaatattgctgcggccaaatctgatagacaaagttttgctcttcgcccatatgcaccaacaaatccagatgacccaactgctgtccctgttggcggtggcaggctttttagctccacgtacgcgccgcgcaaccgcaactcctgcgccacttcttccattgccgggtaacagaccgtctccatcatctgtttagtgtaacgcgtgcccggataattcatcaggcgcgagagacgttttttcctagctcaggcgatcctgaagccccagcggtcgcggtgcggtatcgcggttggcactttcacggcggtaatcttctaccttcagagatttatacaaccccgccatcacgaagaagatcacaaagctgaacggcagccccataatcaccgtggtgttttgcagcgcggat

SEQ ID NO: 12222 - DNA, 779 bp, Arabidopsis thaliana
ccatcagtcacaaattaaacctccatgccgttacaacacctcttaaccctagctgctactctcatccccacctggcgcgtcgtcccaactcgcggctccatcgccggcgtctctttcaaggagccatggaaacggaaactcgcctatgctaacccaaacagaaccgtcggtaaaccacgagcagccacggcctatgagctcgtacgagtctgcgaggatcttcaaaacaggtttgaagaagttgaagtcccgttgatgattgtgcacggtagagacgacgtcgtctgcgatccagcctccgtcgaagagctttaccggagatgcagtagcagagacaagacgataaagatttatccagggatgtggcatcagctgattggagagtcagaggagaacgtcgacttggtgttcggtgatgttttggattggattaagacacgatctgaaatctccaccattcatggtggtaccaaagcttaaagtttgcatatataataaataaacaatcaaaattcaaattttatattggtatacaaatccgagaattttgtatttgagatcctcaagaataggtcaactaaaatcctaaattctaaagaaatattgttaacgaaaagatgagagtaagttctaatctcttgtggatgccactgaagaaaaatgaaagatataatgaaggaagtagaagggaaagtgaagttttcaatggcggattcgacaatgatgttacttgttcaacaagcaatggacaaagcccatgaaaagatcaaaaccaaaca

SEQ ID NO: 12223 - DNA, 954 bp, Arabidopsis thaliana
catctgtgatattccagttcacgtagtagagcaagaaaaggaaaaggagaaacagagtaagttagtgaaattcaaaaactctcttcacacaacagcataactaataaacatcgtactcagaacatacctctctatatctcatcaggtaaaccttgagaggttccatgtagtcttcaaatcctaaagtagccattgcccaaagcaaatcatctccattaatagtcttccttttctctctttgacatttatcactcgctctgctcatcaacgtcatagaaaaaccattgcatcatcaaatatgcaacatcaaagccaaacaaagatgaacaacaagaaagagtaaccaatgtaaggactaaaaaggcctcaactttcactagttaagaaaaacccaaaaatcactataaagtttaagacttgaaactaaaactcaaagttcctatcaagcctctaaacattcagcaagagcaaacacaacatagcattgttaaaaggttaaaaaagacatactcgctggtgacgaaactgatgaattcagagacacattcctgcacaatctccttagcatctttagcgattttcccattagcaggaagacctctcttcatgatacggcttatgttagcaatcggaagaaacctgtcctgctcacgaacattcaaagacctcgggctctgatcaccgccactctcatggcttccaccaccaccaccaccggtttgcgattcggccatctcagaaaccctagataatcaggtagagattgggaaatcgggagaatcgaggaaccaaacccagaaagcgcgaagacgtgattagaatacctgaagaagaaggagaattcgaaaaagagcgggagacggagagagaaatgatgattggaggaggagacggagatggagagagagatttgatctgatctgatccgacgctggagaagataggagcttgtat

SEQ ID NO: 12224 - DNA, 633 bp, Arabidopsis thaliana
cgctcttgcgtcaatcaacaccgagacgggctgtcttcttacggcctcgagcaaccacgctcgttgtggcttggaaccatttgaaaccctctaatctgtgtatgtggggcgcgtctggcgttggcacgacaactctcctttttcacttggtaagggtattccgtttctaaagaaacgcctccgttttttattatgtacttgaaagcttcttcaaattctccgccattgcaaccaccgtttttctctatgtcgcaatctattagctgttgttcggacagtgttaatagatttttgccagatatctttgtcaaaccttcatcgccccaatcgctgagaacgcccaacaacttcctgcccatgtatatatatattggttacttcattttgttagtaaacaaatcatctgttagccctaaacctaaaataaccctatcttggggattaagtttagcgaaatgtatttttttgtatgtggaatgtaattttgacattaattaaatgaccaatccagccgtttactatatcgtacgtatattgttttccgaccaaagaattgcgacgaatctgtttcgttggaaattcggctgaaacaagatgttccgacaaattctttggtcggaatatgctatgttt

SEQ ID NO: 12225 - DNA, 505 bp, Arabidopsis thaliana
tctttgcttttttttttttggttatcaagatagagagatataccaatgtcaataagtaaagagagccaagaaaaacgaaatacagatgaaacaatgtccacaagtctgagaatctgatatttatctcagaaacatactcattttaatattctcatagatcggtcacagggaagaaaagaaattggaggaccaaattcggaaagcacgaggcagagcagttcttgtaaattttcgaaatggaggaaaagccggcgggcagaagagtagtgttggttgcagttccagctcaaggacatatctctccaataatgcaacttgcaaaaacacttcacttgaagggtttctcaatcacaatcgctcagacaaagttcaattactttagcccttcagatgacttcactgattttcagtttgtcaccattccagaaagcttaccagagtctgattttgaggatctcgggccaatagagtttctgcataagctcaacaaagagtgtcaggtgag

SEQ ID NO: 12226 - DNA, 557 bp, Arabidopsis thaliana
cagaaaaagacaattttttctgtttgaagcctcttttgacatgaagcgaaatgcggcaagagaaccaagaagacaatagcatttttgcttttctttggttaccactctctaacaagataaagaaatgtaacaccatccaccacatgattcacatgttgtgacgaagagagccaacaaaacgttcgagagtcagatactttatatatcggttaccgaagtgatcgaaaccgcgaaccacgaagctgagcaggatacttttaattagtagttcatgcaggttttgggaatggaggaaaagcctgcaaggagaagcgtagtgttggttccatttccagcacaaggacatatatctccaatgatgcaacttgccaaaacccttcacttaaagggtttctcgatcacagttgttcagactaagttcaattactttagcccttcagatgacttcactcatgattttcagttcgtcaccattccagaaagcttaccagagtctgatttcaagaatctcggaccaatacagtttctgtttaagctcaacaaagagtgtaaggtga

SEQ ID NO: 12227 - DNA, 326 bp, Arabidopsis thaliana
tctaatgtcacaagtcacaacggctttttcaactccaagtttggtcaagctcccagtagagtcttcatcagtggcatgtgcatccctgggagtaaaccagagacttggtcgtattcgatgagaagggcacacagacaagatatcagggagttgtcctaataggaggaatgctgatagagtgtctgattgttgtatggtacgtgatgccgacgtttagatcgctggagtcactggtaatggatccttctgagactctctatcagacgggtgagatcgaagatacaggcagtaatttaacagagtttggtagaatttgggaagagtta

SEQ ID NO: 12228 - DNA, 575 bp, Arabidopsis thaliana
taatgtcacaagtcacaacggctttttcaactccaagtttggtcaagctcccaatagagtcttcatcaatggcatgtgcatccctgggactaaaccagagacttgttcagattgtattaaaggtgcatcagacaagatatcagagagttgtcctaacaaaacagatgcttatacatggcctgattgttgtatggtacgttattccaacgtttctttctctggttcactcgttatggaaccttctgaaactctctatcatacgggagatatcgaagatacaggcactaatttaacagtgtttgatagaatttgggaagagttaatgctccgtacaataactgcagcttcattgagtagtagtaatggatcatcatttggacaaaagtactttgcagctgaggttgcttcattgactactttccaaaccatgtatgcgatgatgcaatgtacgccggatgtttcttcgaaagattgtgagttttgtttgaagacaagtgttggtgattatgagtcatgttgccgtggtaacaaggtggtgcggtgataagccaagttgctttgtcggtgggatttgt

SEQ ID NO: 12229 - DNA, 1264 bp, Arabidopsis thaliana
gaagatgagatccgcgggtaagccttcctggtcaaacctccatagtttaccatagacggctgaacttagctctaatgcatacttcccgggccagaaacaagtctcaatgattccacctccgttgacaagactttggcgtgcacgagcgttgatttccatggtgtagcggaaatgaggatgcaaaagcctataaatgggatgcatggcacttagttgtctatttgccgctattatgtatggctccgtacaggcatgagtcctcaacctgtaaaatttatacatctctttcctagttagtgatatttcacatgcatgtataaagtattaggtaccacaaatttaaactactatttctgtcaagagaaaaccctatatgagaggatcctctattttgaaataaagagtgtgtttccaataccaatgggaaataagctgatgataaccggcgtcatgagagatagcatgagtcttagcaagattccatagccagcatgacgtagcatcatagcctggcgtgaagacttgtttccattggggcttgttgatatttggtggacaagtcaactcaatggcaacaggcctcaatgtgctatcatcgctgaggaagaatagtgttctagaagcatataatgtggtattgtttaactctctcactttgttcacatatggtagaagcaaatcatgataatccaacacgaacaatctcttattctttagagcctgcatacaaatatataatataattcattaagcaaataatccgtcatatgcgtttttttttcaaaaacatgttattattaacttacctcatcaactgtcatgtttcctttaacttctctttccacaatttcccaagtaatgagtgaggtgggatcaccataaacggccgggtctagtttgcttattaacggccactcctggaattaaataaatattattgacatccttaaaccatttccaatgatttaatacatatttatttaaatcatcatcattcttatacttctcccacaaatgaattttaaactttatatattaagaaaaagtatactctaaaataagattaacaagtaatgttacttcgagtaggatttagagtaccgttggagaggccctaacgttacctcgggtttttaactttaaaaccagtttttatttttttccaaatgttttactagcaacaacttttagacattaagagatatttctttattggaaaaaacagaacataaactattagtatgtagcttacttcaactagctg

SEQ ID NO: 12230 - DNA, 504 bp, Arabidopsis thaliana columbia
tggacttgcaatcgtagggcgcggcttgttggacggccaatgctagatcattttccttcttttcgtattagatttattcctcgtagttttaacacttgagcagaccttttagccaaaaaagctaggactagaaatattcttttttcccatgtaagcaagtcggttcctgaatggctctccctagcggatagcgtctttccgataacttaataaaaatggtgtttgacggaaaaaaaaaaaaaaaaaaaggcactatcttgatattagcttcatactgtgactaaaagtacaattcttgaagcaacttggaacaatagatttcttcttgaatctccttcttagaaactctgcccctaatccaataatttcttcttagaaagtcaacttagacaagcataatcaattttataataaagactggtgtagatgttcaaatatcttgaatatgtccttaatttacctgactaaaagaattggaaaaaaaagtattccgctgccggggtt

SEQ ID NO: 12231 - DNA, 862 bp, Arabidopsis thaliana columbia
gtcgacatccccaaaattcctgggttatagccttgctgctctggtgctacagtttgaggctgtgctggtgccggcgctccagcttcagccatgaagttctgtcataaaacacaatcaacagtcagatttcatcataaaaaaacactagcttctgcctcggttttgagggtttaaaggttacaatggttaagaaatctggtgtgagaatataggggtacctgaataagctgcacggcagtttggacttgtgagccagttccgctaacctcaacagtcatttcaccaggtactcccctggtctcctgaatagttactgttgctccactaagacgtctagtgtagcttatgtttgaaccgacgtcccaattacagcatcagcataagacagtggaatctgcatttgctgcgtaacttgctgcaaaacaaacaaatccccacaccactcagattttcattgatttactttacatacataaattgcagtagattgaacagtcaacttcataacatgttgcagagattggcggaatacctgagcgaccattggtggggctgatgatacgtgcacattcataggaggctctctaccatatgcagctctgcctgatggttgcccggtcctgacgtgagcctgactgcatatcactaggccgatggtaactatcatgtctaggaaggtggttgcatatatggaggtgggttgtgaccatagcctcctccaccaacacttggggcatgaccttgaggaggaccccatgactggtgtggtggtggcatatggtccatttggcgagttggcttttgcatctgtttaaaacgcagagtaaagaaaaactggaaataagtgttgttgatgatcctc

SEQ ID NO: 12232 - DNA, 661 bp, Arabidopsis thaliana
tgttctcgagactgaaatatgcaacctattttttcgtaatcgttgtgatcgaattcgattcttcagaatttatagcaattttgatgctcatgatctgtctacgctacgttctcgtcgtaaatcgaagttgataatgctatgtgtttgttacacaggtgtgtgtatgtgtgagagaggaactatagtgtaaaaaattcataatggaagtctgcaattgtattgaaccgcaatggccagcggatgaattgttaatgaaataccaatacatctccgatttcttcattgcgattgcgtatttttcgattcctcttgagttgatttactttgtgaagaaatcagccgtgtttccgtatagatgggtacttgttcagtttggtgcttttatcgttctttgtggagcaactcatcttattaacttatggactttcactacgcattcgagaaccgtggcgcttgtgatgactaccgcgaaggtgttaaccgctgttgtctcgtgtgctactgcgttgatgcttgttcatattattcctgatcttttgagtgttaagactcgggagcttttcttgaaaaataaagctgctgagctcgatagagaaatgggattgatcgaactcaggaagaaacaggaaggcatgtgagaatgttgactcatgagattaga

SEQ ID NO: 12233 - DNA, 580 bp, Arabidopsis thaliana
ccaggggtatacagttcttgaacatgtcggaatatcaacgtggccaggtattgtttgtatatttcatcaataagtcacgggcttatatggaatcgatgtacttcacgtgttgatgagacgcagtgcggtaaatatatgtaggagactcactaggccgaaagattatcataccaaaacctcaaggaaagaacctagtaaataccgcttatgcatcgatatcttggaaagggaaattagaaggaatccattggttagtggggatacacccacttgttcccattcgatgcccgaggatctccaaatgaggttgttatacttagaaaagcgaggtattgacctagtcgatatatatatttctcatagcttaaggttgatgtctctttattgaattcttgtatgtgtcattgcagtgggacttgctcagttgttcttcccagcagaagccaatgtggctatggacgttgctaatgttgaagggacaagcgagtgcacaggtcttctaactccacctccatcaaatgatacaactgaaaacttgggtaaagcgatttaaatgaacgccttatgtgcaaacgaaaga

SEQ ID NO: 12234 - DNA, 1078 bp, Arabidopsis thaliana
cttcaattatcaaacaagttgatccttttcgaagattccttcaatagctttagatgttccatagtctttaatctccttacgccgcataagcatagggtaccattggaaacagagacaacagtggcgatagggagagcagtgtaaggacaccacagacgacgtcgaaggttgcagaaggtggaagagaagagatgagagtttgagagatctgtgttaagagggatggataagagacgatgagacgaaggtcgatgtaaaccggagaaaagattccagatttgagcttgaaattgccgaatttcacggcgccgatttcatgcagctggagaatcagtgcttccatggctgacattttttcttctgctgcttttggaatcggagaattcgataagcggacttggaacgactgcacactggagagtgttggctttatatactttaggttttgtcttatttttggtgtttcaatgtttttatttattttaatatgtaaaattattcgtatttatcatcttttatgcattcagttttcgttttattttcctaaaaaatctactctgaatatgtcattttatttacattttagaaatactttttcattgtatagaatatttttttgttgaagtcattgtctacaacaattgttgcaatttctttactataataaagctgttttctgttgcattgtttgaaattctctctaatattttttgagagaaaaaaatctctaatattttgataacagtgaagaaagaaaccatttatcacaaaagatacactaagcagaaattataaaaatccaattgaaatgaattcggcaattcgtcctaaaaaggacattatttctgaacataataagcatacaacaaaggacctgtctggtcttaaggggaaacacaaagtacaaatgaagatggatcatttcccatcatcacacagattactaatgttacagacagaagaagaaaaataaataaaaccagcaaaaatcattcataatctacatcaaaccagaaatagaggtaagccttggaatacatgactcgaacacgctgcagaaccaagtctccccttgttg

SEQ ID NO: 12235 - DNA, 532 bp, Arabidopsis thaliana
ggtacttattcctgcaccattagcttctcgtcatatttcactggtccattttgcaggccaagcttgctaagcttcggagggaccttcttgcaccgcctaccaaaggtggcggtggtggtgctggagaaggttttgatgtgactaaaagtggagattctagagttggactggtcggatttccttcggttggaaaatctacgctattaaacaagctgactgggacattttccgaggtttgtagttatcgttacgaatattgaacttcctttctcttgttgtaattggaattttgaaacctaccacgtatccatggcatcctatttctagttactttttgaccaacttcctgtgcaatatcacttataaggcaagactgttcggcgctagtcttttcctggatagatgaacataaatcttggaattagaactgtattttggctgatactcaattttctgaaggtacatactgtgatacacaatgttttctcaggttgcttcttatgagtcacgactttgacatgcattcctggtg

SEQ ID NO: 12236 - DNA, 629 bp, Arabidopsis thaliana columbia
ttatacacttacaccgcaccaagtaattgagcctttaattccgctactggaatctccatccccagcagtccagcagttggcagctgagcttctatctcatcttctctacgaggagcatctgcagaaagatccattaacgcaacttgcgattggtcctctaatccatgtgctgggatccggcatacacctattacagcagagagctgtgaaagctctcgtcagcattgctctaacatggccaaatgaaatagctaaagaaggtggtgtgagtgagctgtcaaaggtgatactgcaagctgatccatcgctctccaatgtgttatgggagtctgcagcatcaattttggttatcatcttgcaatttagctccgaattttacctggaagttcctgttgctgttcttgtaagactgcttcgttctgcatctgaaaacaccgtggttggtgcacttaacgctcttctagtgttggaaagcgatgatggaaccagtgcagagtccatggctgaaagtggtgccatagaagctctgcttgatcttttaaggtctcatcagtgtgaggacacagcagcgagactgctcgaggtactgctcaacaacgtgaagattagagattcaaaagccaccaaga

SEQ ID NO: 12237 - DNA, 514 bp, Arabidopsis thaliana
caagaggaaggataatgctagaggctgcagcgatagtggggtcgaaggccgtttaaatttgtaaatgtcttgacgagtatacctcagaaaccgagcttgagagcactggggaaagagaagctaggagatttgccaaaacgtactcgagaggctcacgagttactttgtgcaaagcaaaccaacacacttgctaacccgtcacagcaaatgatcgcagaggagctgcatgcttatacagcttggtagcatttagcagatctggaagaaggctatatgaaacaaaaatcgaaacttcactggatgaaagttggtgacagaaataactcctactttcataaagcagcgcaagttagaagaatgcagaactcaatcagggagatacagggaccgaatggtgttgtgctgcaaacaagtgaggaaattaaaggtgaggctgagcgtttttttcaggagtttctcaatcatcaaccaagtgattttcagggaatgacagttgaagagttcaaaacttgat

SEQ ID NO: 12238 - DNA, 1690 bp, Arabidopsis thaliana
tgcagctggacttgatctaggtaaagagggtcctctagttcacattggaagctgcatagcttctttgcttggacaagtggaacagacaaccaccgtatcaagtggcggtggcttcgttacttcaacaacgatagagaccgcagggatctgattacatgtggctcagctgcaggagtgtgtgcagccttcaggtcacctgttggaggtgtacttttcgccctcgaggaagttgctacttggtggagaagtgccttattgtggcggactttcttcagcacagcggttgttgtggttgttctaagagagttcatagagatctgcaattcagggaagtgtgggttgtttggaaaaggagggctaatcatgtttgatgtgagtcatgtaacttatacttaccatgtaactgatataatccctgtcatgttgattggtgtaatcggtggaattcttgggagcctgtacaatcatcttctgcataaagttctcaggctttacaatctcatcaatgagtaagtgttagctattcaatgagtcaaaacccgttaagctagttacttactttgtttggtcattttgcaggaagggtaagatccataaggtgcttctcagtcttacagtatcactctttacatctgtttgcctttatggccttcctttcttagcgaaatgcaagccttgtgacccctcgatagatgagatatgcccgacgaatggaagatcgggtaacttcaaacagttccattgccctaaaggttactacaatgatctagctactctgcttctcaccaccaacgatgatgctgtcagaaaccttttctcttccaacactcccaatgagtttggtatgggttccctttggatattctttgtgctatactgcatcttggggcttttcacatttggtattgcaacaccgtctggtctcttcctccccatcatcctcatgggtgctgcatatggccgaatgcttggcgctgcaatgggatcatacacaagtattgaccaagggctttatgctgtccttggtgcagctgcactcatggctggatcgatgagaatgactgtgtcactctgtgttatattccttgaacttaacaacaaaccttccttttgtttctataacgaatgatcgtgcttctgatagccaaaactgtgggagacagctttaacccgagtatatatgacatcatcttgcatctaaagggcttacctttcttagaagcaaatccagagccgtggatgaggaacctcaccgttggtgagcttggtgatgctaagcccccggttgtaaccctgcaaggtgttgaaaaggtttcaaatatagttgatgtgctaaagaacacgacgcataatgcattccctgttttagatgaagcagaagtacctcaagtgggtctagcaactggggctacagaactccacgggttgatcttgagagcgcacctcgttaaagttctgaaaaagagatggttcttgacagagaaaagaagaacagaggagtgggaggtcagagaaaagtttccatgggatgaattggctgaaagagaagacaactttgacgacgtggccatcacaagcgctgaaatggaaatgtatgtcgatcttcatcctctcaccaacacaacaccttacacagtcatggagaacatgtcagtggccaaggctttagtacttttccggcaagtgggac

SEQ ID NO: 12239 - DNA, 1123 bp, Arabidopsis thaliana
ctgttactatataaagctcataaattatctttatactgatttcttaacgaccatttggattagtgctgcaggcgtttgcaaggattgaaaatcactactttgttaacaaaggtttcttcccgtcggactcacacttgctagacaatgttgatacaatacgacatatctagaccaccattgttcaggtacatccttaatataagaactggaattgtgaattgattgatctaatgaggccgagtagtgtatacgataggttatagaaatggaaacacatgctccaagtcaacaacatcggccttaggtttctcacgttgtaaacacaacattgatttggctatatacattacatttatatattatgggattgagattgggtctggattattaaaatggacagggaaggtatgacgtatgctgtcctatgatgtctgcttgggatctgcacaaagcatggccagaggagaactcaaggtaagtttaaaatcttttccaagatttcttcaagatctttcctaagtttagttttgcttattgtcgtaatgcgaccaacggtctgcagattgtttatgatgctgggcactcggcaaatgagccaggaatatcagcggaactcgtggttgccaatgaaaagatgaaagcacttatgggatgaagtatttgatggaatgaaagctgctcattttgttcatttctttgggacctttgttcatattttcaagtttgttgctgcaaagtaaatatcacattcagagttagttgttaacgcgaaaccgaatgttatttccatggacgtttatacccaaatgaaaaagacaatgacataggtgcagtgttttgaaacccggactataagcaccaatgtaaccaatgaatgggactctaacgaataccttagaaccatggcctttttgaaccgtttaaatgcagaaatccccaacaaaaaccagcggtaaaaacatatgagtcaaataaaaatccttttatcaagaggattggagactatgggtgttgagtagcataatggtgaaactggtaagtgataaaggaaaagatttacagagtgcaagaggtgtgtcaagtaaaggagaagaaacttgaatgtcaaagtgaagaaattcag

SEQ ID NO: 12240 - DNA, 1005 bp, Arabidopsis thaliana
  unsure (1)..(1005): unsure at all n locations
aacactttttgattttcttcggatgttacctctctagtcaacatatcctgatctgttgcagagcatctaaaggacatcaagttttgcaactcttcaactgtcattccctgaaaatcaaggttgccagcaagatcatacacatttcccttctttatgcaacttaatttgctctttctatggcaaatttagagccatcctagtggatcatatgtgtttaatcaatcgaaagcatgatattaaaaagtcaacgttagaaagtgtcgtatttagtaatataggtcaaatcgaaatcatagatgaaaaaaaaaaaaaaacacgaatctttcactcttgactaggcctcccacaacgaatctttcactcttgactaggccatgaatctacacaattaatatgctaaactttttttcctaaatattacaatccactacttcacacattccactaacaaacttacaaatccaaatcgtgtaaagtgcaactttttaaggctcggagactttgagataactacaaagcaaggaagtatagcttttgattatacacaaccaagtcgtcaaggtttgtgtagaccccagcggcccccgcaaccgaatcatacgagccagaaccactttcatcttccggcacatcactctgcacgcgcctcactcttcccgcgatcacacggcaaacaagcatcgccctccgctggtcaaaacacctcaacgcatcgtgtgctcttccactgcttgcagtgatcctcacgcccttaatctcctcttttccttcaccattgcctacacgtaccgttttggcgtggaagccatggcggataatggtgcaaacgcggcagccagggatggcggagcaaatggaggtcgagccgcgtgagccgagggagcaagaaactgtggtgcagtggaagcggagaagctcgnttccgtcggcggcggaccgagcctcttttctggtagaggcatgtgcatgggacttgactgcgtcgcgacaatcttcaaaccgttg

SEQ ID NO: 12241 - DNA, 1418 bp, Arabidopsis thaliana
gtcaatcaaaacacaaagggtaaccagagtgtttcagatcgccgggtcaccaaaaagaagtaatcatatgtcggtttttttttggaatgtccgtggtctaaataaatcttcaaaacattccatcgtccgcaagtggttatctcaaagttctatgcagtttggtggtcttctcgaaacgcgagttaatgagggcaaatcatcagatataatttcgtctacttttcaggattggtcttcactgactaattactacaaatcacatcgtttaggccgcatttgggtagtgtggagtgcaagtgttcgcttaactcctgtattacttgttcagttttattggagggaaaagaggaagagttcttttgctcctttatttatgcttcaaattatgtggaggagaggaaaatattgtgggaagacattagacatcaccacgattcacccatgtttcgcaacaaaccgtggatgctttgtggtgattttaacgagattctcgatggataccatggtcctcgctttacctggtgtaacaagcgggaggatggtttgatatgcaaaaaacttgatcgagttcttgttaatgattcatggtgtactactttcccgcactcttatagtgtttttgagtctggaggttgttttgatcatacaaggggaaggataatgcttgaggctgaagcgatagggggtcgcaagccgtttaaatttgttaatgtcctcacgacattacctcagtttttgcctgcggtagagagccactagaatgcttctgctcctttgtttatttctacttcagctttgcatagattcttaaagaagctaaagaccttaaagccgagcttgagaattatggggaaagagaaattaggggacttgccaaagcgcactcgtgaggctcatgaattgctctgtgaaaagcaaagtaacacactagttaacccgacgcagcaaattatcgcagaagagttgcaggcctataccgcttggcagcattgagcagatctggaagaaggctacatgaaacaaaaatcaaaacttcactggatgaaagttggtgacagaaataactcttacttccataaagctgcgcaagtaagaaaaatgcaaaactcaattcgggagataaagggaccgaatgatgttttgctgcaaactagtgaggaaataaaaggagaagctgtgcgattctttaaagagtttctcacacatcaaccaagtgattttcagggcatgtcagttgacgacttgagaaacctgatgtcatttagatgttctgcaactgatcaggacatgttgacgagagaggtaacagcagaagaaattcaaaaagttttgtttgcgataccatgtaacaaatccccgggtcctgacggatacacaagtgagttcttcaaagcgacttggtcaataactggtaaaga

SEQ ID NO: 12242 - DNA, 726 bp, Arabidopsis thaliana
tgttcttcataaattattgaatggtatactgataaaagtctacaacatcatataggactttggaaattatgattttgttgaaggtcaatctcattttatgaatactatccataagctctagcttatcattaccattgaagtctgctacaatgaactgtgaaagatcatacaagtgataaataaacagctgaaccatacctaagtactgtaatcgaaaacaataaaactgagaaaccctattttacaagtaactaaaacagactagaaatttaatctttgacatatcaacttctctctgaagaagtcagatgtccaagctgttctgtaattgcattaacatttctcgaattccaccaacatttctcagtacgtactccggctttatctttatcgtctttcctctctaattgaacttcccgttgctcggttgagccaggattctctgagaaaaactgctgccagaagccatcattcgctcctgctactggaggaggaggaggagcagcaacagtgttctgttctttcgaaccatcgggctcacagttcatatcgatgatccttggagaaggaggagatttgagacgtgaatcgacacttaactgtatgcaagaaagaggagggctctctggaaaagtagatgattcatccacatcaagtgtcatcatacttcttgattgtaacatactctcacaagaatccgatacaagattctcccaaatcgctatc

SEQ ID NO: 12243 - DNA, 526 bp, Arabidopsis thaliana
ctctaccgggtaccgagctatttgaatcttcagaaggtccagctgcagaaagcctctgaagttgcttctcagatttcttcaataggaaggtaacctcttgtgtcaaagtctcgatttgatgttgatcttctttaccatccccaaacgaaggcatcaacgctttcgcatgagcctttcccaattcagccattttggttcttgcacgttgaatgtaaactgaaatctcctcagatacatcaacccaatctggtggtaagcccactgttattgtacctctactaggacattggaaaacaagaagcaaaactttcaacttcaacaaattgggccacagaaatatattcaagtactattctcttaatactcaatcagtagctgaaacaacaaggctgaacatcaagctaccaattccaaatccataagagacattattgctcaggataataccaaattttctgctaaatcaacaacttacttcaaaaattcataatccgactcacactagcagctacatgaagtgattaat

SEQ ID NO: 12244 - DNA, 690 bp, Arabidopsis thaliana
ttcacaaaatcacaatcctcttcagatgaatctgaatcctaactcttcattatcaaacaatctccagagactcccatggaaccaaacattcgatcctacatcaggtatatacttaaatcttctctgtttttttttttaaagaaacagaacagatttcagaattgaagtatgagacttttcttcgtttccaagtaaaataaaaacagatctcaaacttaaaatttgattgctctttgcagatcttcgcaagatagacgtgaacagttttccatcaacggttaactgcgaggaagacacaggagtttcgtcaccaaacagtacgatctcaagcaccattagcgggaagagaagtgagagagaaggaatctccggaaccggcgttggctccggcgacgatcacgacgagatcactccggatcgagggtactcacgtggaacctcagatgaagaagaagacgggggcgaaacgtcgaggaagaagctcaggttatcaaaagatcagtctgcttttctcgaagagactttcaaagaacacaacactctcaatcccgtaagtgtaaaaaagtcagaggaatcaaatgataattatcgtaattactttgaaataaccaaggttattatcataatttacagaaacagaagctagctttggctaagaagctgaacttgacggcaagacaagtggaagtg

SEQ ID NO: 12245 - DNA, 925 bp, Arabidopsis thaliana
tttttaatacagaaaaagaacctgagaaagtcgcatagcttttcattatcaacaatcatgccccatcttaggtgtacgacaatattaaacacagacaaccccatagatgataccaaaacacattccaatatatgatataacaaactagtatcagacaagattttcatttaccacttttacacattgacaacaacaaataaccgagcaaattaggacaaatatatacttgtgacttctcattcataatttataccgaatcctgaggtagtcccagtaatagtttagtatatgatcattaggcttcacgcgatcccacttcccgttacagaatatcgcatacgcatccgctgcatactttccaacgccatgcagttgagtgacatgagtccagctctcttgaagatactctagagacaaccgttgaatcattttggttctcttcttttgtaatccaagaggttttattagattctctatctcctcttctttaacttctgttgcagtctttgcatcagtacacaatccaaacaagtctgatatcactccccgcgtctgcaatcaccttttaaaataaatttacaaagccttttcttctaccatattcaacaagaccaagcaattcaaatcattgataatcaattacttatcaaaccaaaaactgcagctacttcttctgcaacagttaaaattgaaagattcaagcgcacagaggtctaacttcttacttcctaacaaattttggacttccctcaagaatgattttcgagtactaattcctgtaactaactgagaaaatatgcaacaagcaatggcaacactagacacatccacttaaactaattggtccaaatgctaattacttatggtcacaaagatatggaataaaagagatagaatgaggaaaacctgtgcccagagttttgtt

SEQ ID NO: 12246 - DNA, 773 bp, Arabidopsis thaliana
gagatgaaaggctccctgagtggtaattgctttggaacctaatagatctttgaatactttgctctctcaccgttctgccctgaactattttgtatttttgtaggtacaagttcactctgttcaatgagctttactttttggttgccggtggtacagtttggataggtacacatctatacgcttcttcaaagtcaaactcttgattgtaaaattgtgttcttcgcttttaacaaaattttgttgtttcattattttggtgccttgaaattattgtatcaccttatcaacggtttttggttgcagactcttcttcactcaatgctaatgggaatagtcagcatcaacaatcgggattaggaaattgagatggtaaggtcggtggacttgacattaatgatcaacggaatgaccttggtaatggcaacagcgttggagtaaaaagcaatgatgaagtatcagccattcataaccggaatggtttatttgtcgatactccccatgtagatgatggcgatgatgttggtcggtttctgtatttggaaggtgtggagtatgtgatgtggtgcacatatgatgtacacttttacgcatcatatgcgctccttatgctattcccaaagatcgaactaaacatccagcgtgattttgcgaaagctgtgttgtctgaagatggtaggaaggttaagttcctggcagaaggaaatgtgggaattcgcaaggtcagaggtgctgttcctcacgatctggggatgcatgatccttggaatgaaatg

SEQ ID NO: 12247 - DNA, 523 bp, Arabidopsis thaliana
  unsure (1)..(523): unsure at all n locations
gagaagagaagaaagagagatgatggcatgcatcggtgtcctcatctcgtggttcataacagctaggaaatcatttcgagcatgtactgccatctcagcctcttgacgagccttgtctaaagcaaaattctgctccataagctggtcacgagcgtgcatggattcttccaaaattgcagcatgtgagagagccacagccacctgaatgaagtgagagtcaggggacaaaacaaaacactaaaagctggtaaagcaacttgacacacaaccaaacatatacaagtaaagagatggacctgatccgccacgttttctacaagctctaactcatggtctctccattttcttgcaccatcggttgggagaatcaggaccatgatagcgtaacctttgccagagagatccgaccagtcactgccttggaaattagagagatgtaaaagaggaacacggacagaaacaacctcaggaggtgaatatctccaancggagcccaatcttaccaaaggcaagaatgaggtat

SEQ ID NO: 12248 - DNA, 376 bp, Arabidopsis thaliana
aacagttcctcctgtacagaaatagaatcagattcgttgatagtttcttcactgatgcgattggctttatcaaagagatgacctgcagattcaaagcgcccattgttatgtcaaatgtaagtacacatagtaataggatctctcactaggtgtaagtcacgggggcattttagttacctcttcaaagatcgcttgtagactgaatggttcattttccaagagtaagctcccatcttccaatctcgaaagatccagaacgtcgctgattagtgtagccacaagattgctgcttttcagtattgtctcgatcataactctttgctctggagacagctcagtctcaaggagaagagaagaaagagagatgatggcatgc

SEQ ID NO: 12249 - DNA, 548 bp, Arabidopsis thaliana columbia
atgacatctaaatattagcaagaaagatgctcttaacgccagttgatttagataaattgaatagtcaactcataatgatacataaactcttacctctctgccaatgaacacgagtgcaacatcaacaggttgctgaagttttttctccgagcactaaacaatggagacaataaaatagatatgagaatgaaaccattgcattgtgtaaaaatatttgcttgcggactcaacgcgaacataccagaaaattagaccaacctcctagagtgaaaacagagtctactagatcctttgcagacatgacttgataatttacatccgtttcaccattagcatacctacaatttcatcaatgtggacatcaatataagcacaattccaacaaaagttctcaaactcttacaccaaaaccagagtacaataaaatttggtaaatttactcacataagccttgaaaatggtgaaaacaaggatcaacaaaaagataaaaagaggcaggcctaactggagatgcggagaccagaggaaagcaggaactgtggaaggtg

SEQ ID NO: 12250 - DNA, 541 bp, Arabidopsis thaliana
cacagagagtgtggaaaaagacgttagagctggtgggtcttcctctcgatgcagttgagaagctcatagaaggggaaaatatccaatgccggtatggagcacaacacgaatagtctttcaaaattaccacaggttaagtgacccattacagatcaaagggtaggtaattgagaaaatatcttttttttttgtttccttgtattaatctacacgatacagtggggaatgaatcccccaggcatgtagtttgcttgagaatgtttgattgttggataaaagtcaagctttagctaccattccattgcttttacttacaagtcttgttcaagtatttggttagtgtgtcttggagttattaagatgttcagtagtagagtatggtagcctgggttggtgggtagtttcttgtttgagtttagggtattttcgtaattttctttattgtttgtggagtcacgttgctcatatatagttatagggatatatatcaattagagtcatcatctctcttactctcatggtgacaaagtccaaaagtgat

SEQ ID NO: 12251 - DNA, 1419 bp, Arabidopsis thaliana
atcctttcagaattaatttccaagacacaatccgcctttgtggtgggagactcattacagataacatccttatagctcaagaaaatttttatgctctccaaacaaactcgacctacaaaaagaagtttatggctataaagactgagatgagcaaagcttatgatcgtgtggaatggtcatttttacgtgctcttatgttaaaatgggtttcgcccagaaatgagtagacttgattagtttttgtatctcctatgtttcatatagagttctcctaaatggggtaccgatgggtttttattaagccaactagaggaatccgtcaaggagattctatttccccttttctctttattttatgttcgaaagctttagtggcgaacctaaaaagtgctgagtggattggaagaattcaaggcctccaaatctctagggcaagcccatctacctctcatctattgttcacagatgatagtctctttttttgtaaagcagaaccttcccaaggccaagaaatcataaatattctccgcctttatggcgaggcttcaggtcaacagttaaatactgctaagtctttggttatgtttggtcatgaagtggacaattctacccgaaatactatataggcaaccctcgacatacataaggagggaggtttgggaacttatctgggccttcctgaaaaaattcatggctccaaaactcaagtcttctcctttgtgagagataggttacagaaacgacttaatacatggtcaacaaaattcttgtcaaaatgtggcaaagaggttcttattaaatctgtaacacaggcccttccgacatatgttatgtcgtgtttcctcttctaaaggctataaactcaaaactgagaagtgccattgcaaatttctggtgggaactaatgaaaatagcaatggtatccactggataacatgggataaagtttgtaatccacactccgagggaggtttagggtttcgaacaattgaggaatttaacctagctctactagctaaaaaactttggcggcttatcagatttctgaattcccttttgagcagggtgttgagaggaagaaactttcgttttagcgaccccttacataatggtgcttctaacagtccctcatacggatggagaagtatcatggtgctaaacctctgcttgtttcgggtctacgaaggacaataggatctatcatattgactcgagtctaggaagattcttggatccccacggttccagcgcgttctactaagagtcttcttgacataagggatcctcatctctatgttaaggatttaattgatcaaaatacaaaaatgtggaaactggaccggctccaagccttgtttgaccccattgatattcactcattttaggaatctgacctagtcgtacctatgtaagtgatgg

SEQ ID NO: 12252 - DNA, 529 bp, Arabidopsis thaliana
taaagcaggagtcaaaccagacgctcacgcgtatagcattttagctaaagggtacgttagagcaaaagagccaaagaaagcagaggagcttcttgagacattgatagttgaatccaggcctaacgttgtgatcttcaccactgtgattagcgggtggtgtagcaatggaagtatggatgatgcaatgagggttttcaacaagatgtgcaagttcggggtttcgccaaatataaagacgtttgagactctgatgtggggttacctagaggtgaagcaaccatggaaagcagaagaagttttgcagatgatgagaggatgtggtgtaaagcctgagaattctaccttcttgctgttagcagaagcttggcgtgtcgcgggactcactgatgagtcgaacaaagctatcaatgcattgaaatgtaaagacatagagatcgcaaagttagagaagctgtaccaaaaacagtcctctggtagtagttttaacctattgcagattccagtcgggaaacgggagcttccaaccgca

SEQ ID NO: 12253 - DNA, 505 bp, Arabidopsis thaliana
aaacaacatgtatatattttttttttggaaaaaagtaaaccaaaacaattcaagttgctaaaaaaaaaatacataacaattcccaaaaaaaaaaatggtagccttcaaaagaattgtgtatttgtaaatgatttttcagttaaacgtgttatcatttttattattgatgtaccattttcaagtgttttcttcaatatcaagtgttctaatcttcatgattaacttctatgtattccaccaatcaggtagccaatacagagtgtgagtgagaacaatttgacttcaaaaaatcctctctttttgatacataacaaaaaaaaaacaggtaaatctatttatgggcacattgtttgtgaaaaaggagaagaaaactaagaacgaggcgtccaagctgaagcagtgagtaacgaaagatctttccatccaagcttaagtgtaccattatcatcaaccaaagtgtaaccatccgaaggaaacattcccaacagtagagtcgcttgtgtag

SEQ ID NO: 12254 - DNA, 1070 bp, Arabidopsis thaliana
gctcaacaaaagtctcaacatccaaaccaaaagactaaatcacaaaaaaaagtaatagctgataaattcagaactttgctaacctgcctggacatagcttcttttgaacacgaccgctcctgttccgcaagacgagtcctcgcttctttcaactcagtggccaaagacaccacatttctcctgaaactctgcttcttctcactcaaatccttcaacaaaggatcatcctctcttagactaacagaagttggcattttctgaaactggaatatcaccgctctgttctttaatctagacagataacttctccagaaaaccccaaaattcaaaaacgtaaaaggaagcagctattcatgttcttcacgtgaccctgtacataaacgaatgaaacacataaatgtccaatctcagtatagttaaagaatgtgaaatcattcaaatatgtccacaagaattaaatcctctaaatcttgtttgtaacaatcaatttcttataaataacagccattatcgaggtaggaatacgcaaaagagacaaagaaacttgtgtcgtccctttcacatcaataaataaactctgataaagacgaatactttacaagtatacagccaaaaaaacgtgacctttttaaaaattcaaaatctcttacaggatttttttaattttcaaaccctaaaaatccaaactttctcgcgacccaccagtctccatcgaacggttggaaatattaggtttctgggtttggtaggaagaagaatcaatttgcagatttgttcgagttcgtgatttctccagaggaggaaagtgacagtgaaaatgaaacctggaggatggggtccctatccgttaggttcggatgagagatcatttaaggaaagtgactaaaatatttagcttcggagttaccgagcctagggcttcgaattttgtgtcatttaaagtaacgaatccgtagctaacctacgcatctggcgcagttagctaacttgctaggtttgactgtagcgcggcaaaatctattcgttcaaagttcaaactatagaaagccacgtgtgcatagtgtaaacgt

SEQ ID NO: 12255 - DNA, 801 bp, Arabidopsis thaliana
gggtaccgagctcgagttcagattttgttaggaaagatggtttatcccaatcctttacctgttccatttgtatttaaaatcgtttctgcatttttcagaaaactaatatttaaaattattactccttaccaaaaaaagctaaaaactattacatgctaaacaaatattttttatggatgtaaatatatttaaataacatttaaaaatattcagaatataactagaaaagtaaataaaagaattacatgaaaattatcgtagcggcgtcaaaacgaacaaataaacctgcggttgcggcacggcagcgtctgcggcaataaaacgaacaacaacattattttatgacaagaagattattagtgtgcgaccactaacgataaacactatgcacacgtggctttctacactttgaacgaatagattttgccgcgctacagtcaaacctagcaagttagcttactgcgccagatgcgtaggttagcgaaggattcgttactttagatgatacaaaattcgaagccctaggctcggtaactccgaagctaaataacttttgacggctaaagatgatgatattgcaagactcagactctcagagatgaactgaagattatgtcggctcattggacgtttaagacaaaggaattagaagatcaggtaacaacacatgctttagcatctcttatttctgtgatttatttttggttttatgtagtaaagcctttgttcttctggatcaggtggagaacaaaggagaattgatcaggagctgaagaagaaggtgctgaagttagaattttg

SEQ ID NO: 12256 - DNA, 1195 bp, Arabidopsis thaliana
ctattttccaatgcaggtcttctggatgattcatgacttggataagaagtggctccttcttcgaaaaaggaaaatggcgttgcatggttactatacaaaacgttacgaagaagagtctaggagggtctatgatgaaacaagacttaatctaaatcagtatctttttgaatcagtcattaagtctcttaaagttgcagaaacagaaagagaagttgatgatgtagattccaagttcaacttgcattttcctcccggtgaaattggtgttgatgaagggcagtataagaggccgaaaaggaaatcacaatatagcatctgcagtaaagcagggctctgggaggttgcaaacaaatttgggtatagtgctgagcaactgggacttgcattgtccctagaaaaactggtcggtatgcttttatattgtttgatttgcatgttgtactggaatggcagttctgacgctaaatgagttgcaggttgatgagcttgaggatgcaaaggaaacaccagaggagatggctaaaaactttgtgtgcgcaatgtttgaaaattctctggcagttctgaaaggtgcacggcatatggtatatactctgcaataatactattttttgaattgcttagctgggtttaatatcagaaggacttccctaatcactaatgcggagatatcccatttttccttgttaggctgcagttgagataagttgcgagccatcagtcaaaaagtatgtccgtggcatttatatggagaatgcagtggtctcaacaagtccaacagcagatggaaatacagtaattgattcgttccatcagttttctgggattaagtggttgcgtgaaaagccattgagcaagtttgagggtgcacaatggcttctcattcagaagggagaagaggagaaacttcttcaagtaaccttcaagctgcctgagaattacatgaataggctaattagcgactgcaatgaacactatctaagtgttggtgttagtaagtatgctcaactctggaatgagcaaagaaagttgatattggaggatgcacttcatgcttttcttttgccatcaatggagaaagaagcaagatccttgctaactagcagagcgaagagtcggttgctttcagagtatggacaggctttgtggaacaaggtgtctgcagggccataccaaaagaaagaaatggacatta

SEQ ID NO: 12257 - DNA, 591 bp, Arabidopsis thaliana columbia
gttagcatcataccttacaagaggaaacccttaaagagattattggtggccacgcataggatgatgtgggtttctgtaggtttcatggcgacggcttatatagcggcgtcttgggtgaccataccgcattatcatggaacacaatggttatttccagcaattgtagccgttgctggtggagcgttgaccgtactctttttctatctcggagttgagaccatcggtcattggtttaagaagatgaatcgtgtaggggataatataccttcctttgcaagaaccagttcagatttagccgtctccggaaaatcaggctatttcacctattaagaaaaactggttttctaatttccctgtaacctgtgtaattgtgtatgtgtaaagtgttggattaagtctttcttaggaactgtgttatcttgtaaaaagagacattgttttgttcttcaagtcagtgagtgaaatgtctcgtttgctttctcctattgttcggctcatgagattactgcaaaccctaaacatgaacctaaaggagcaagagattcacagaactaaattagatcaatgttacggacataacatgaacagaac

SEQ ID NO: 12258 - DNA, 917 bp, Arabidopsis thaliana
tgctccaggagtacaaccattatcatggtatcagaaaaccaactattcttggtgtcagggagcatatcttcacgggatcagtctcgtcactggcgtggttcatgtctgctcaggagacaagttttgtcactcttggtcagcgtgttcttgcaaacccactgaaggtcagaatgcattatggccaccctgatgtatttgacagattctggttcttgagtcgaggcggcatcagtaaggcttccagagttataaatatcagtgaggacatctttgccgggtttaactgcacgttaagggggggaaacgtcacccaccacgagtacattcaggttgggaagggtccacaatttggattatttctaactaactatactgctacaacgtttttttaacgtttttaacgtttattaattatgcaatctacttttgttataattatgtaatttaacgttttttaatcttctaaattcaaaaaatttgagtaacctttgtctttatgcatttttcaggtcgggaagggacgggatgttggattgaatcagatatcaatgtttgaggctaaggtagccagtgggaacggagagcaggttctcagccgagatgtgtaccggctcgggcacaggcttgatttcttcagaatgttatcatttttctacacaactgtagggtttttcttcaacacaatgatggtcattcttactgtttacgctttcctctggggacgggtttatctggctctcagcggggttgagaagtccgctctagcagacagtacggacaccaacgccgcgcttggggtgatcctgaaccagcagttcatcattcagctcggtctgttcactgccctgccaatgattgttgaatggtctctcgaggagggttccttctagcgatatggaatttcattcgaatgcaga

SEQ ID NO: 12259 - DNA, 568 bp, Arabidopsis thaliana
ggcagacgagagagctaaagcaaggagcaaccctaaccatggggacatctgcattttcgaaccatcataagaattgttgagtgcattttcttggagatgtatagttaacactaggggatgatgttttgatgatttttattcagcagcctttttagcatacagcttggatataatttgctcccttcatggtttcagaagcatgtaactttatgtttgcactggctcatgtgatcaggtggtgacttcggaactatgatcgttcatggtgaggatgagacagaggagagtgactccaggtctcagcttgtcagagaaaaagaatcttcatcttctcagtttgaaggtgttcctcgcgaattcccaggagaagaattacctgactcatggtattttatctgtgtaccctttcgttttactttactggggtatatctacttacataaatagacacttagattttccttcagatcatccaatttattgaaaagaaagttacttggaaatataacaatcatgatctgatgatgaatttgcttcttgagcataatttacctgataatggttgcta

SEQ ID NO: 12260 - DNA, 1386 bp, Arabidopsis thaliana
cccactctgtgcattaggtttcattttagcggcagacgagagagctaaagcaaggagcaaccctaaccatggcgactcaaccagctactgaatctgtgcaatgcttcggaaggaagaagaccgcagtggccgtcactcactgcaagcgtggatctggtttgatcaagctcaacggttgcccaatcgagcttttccagcctgagatcctccgattcaagatcttcgagccggttcttctcctcggaaagcaccgtttcgctggtgtgaacatgaggatccgtgtcaacggtggtggtcacacatcccaggtttacgccatccgtcagagtatcgcgaaggctcttgttgcgtactaccagaagtatgtggatgagcagtcgaagaaggagattaaggatatcttggtgaggtatgataggactctgcttgtggcggatccgaggaggtgtgagccgaagaagtttggtggtcgtggtgctcgttctcgttaccagaagagttaccgttaaacaaagctggtttgtgttttgtttttcaatttggaatcatcgtaaggtttttttgggagtatggacttgtgagactctttagattttataatttctgctttattatgcttgttggattatggtgattctccaagaaacttatgttttgttatgtctactattttcttatttttatttcattgtcttgtcggtatttactctttatatcttgtcctgatatgtgtggcatttgcatagtccgatcaaaggttaggttaatcgtttcttatacaaacttaatctaggtgttgttgagtttatgagaaggctgttgtttaatgtggcttagctataaactacagtgtgatgaaatctctgttaaacaaatggacttaacgttagtctttgctcctgagtagatcaatagaagttgtgttatgcttagtttgatgttgttttgatctgtaagctaagtgaagcacatagcatatattgttttaatcttttgatttcccatttgacctaatctagctgtgtgctgttaatcatatcttaagttttctccctttgacttgcttacttttggatttcacaaaaattgatctttgcaatgcaaaatttgtgttgtctattgattatcgaggttagaattggaatcgtgcttggagggcctcgattaataatcaaaggatagttaatcaaataacttgctgatcctaaacatatacctcttgcctgaccgtaatttttgtgattccacaagttctaaacttttattaactccattgtataatttgtattttcaagcaaacattaggcaaaaagtcaaaccattagtagtcctgcatgtttctctcaaaacttccaaaactcgatgcatatggcctatggcttcaag

SEQ ID NO: 12261 - DNA, 584 bp, Arabidopsis thaliana
ggtaccgagctcgaagttcaggctctacctaaccaacaaaccgtagattatcctagcttcaagctcgtcatcgttggtgatggaggcacaggtacagtattcttcgccgtgttttttgacctattgttttttgtgatctctgaaatttgatcgtcttttcactgtccccatctgaaagcattctcgtttaagagacggatttgagattttgatgatgtgctgattagatttgtacgattggtttttgataatatcaatgtttgattggttttaaagagaaccttacagactaggccttcgttgagcagatctttgggatatcgattcttagatgatccggaatgttgttttcattggctcagttttagtatggttcaatgtttttgattagttcttgctaaacctatgattgctcttggtgttttgtacagggaaaacgacctttgtgaagagacatcttactggggagtttgagaagaagtatgaacgtaagtatagcaaagatgcttgtgaatgcacaatttctgtgaacatcatctgatgttgagtcctaatcttgtttgttgcactactattggtgtgga

SEQ ID NO: 12262 - DNA, 791 bp, Arabidopsis thaliana
tggcgagcagctatggtttatgaacctcccaacattacccttacttgctgcatcaatggtgaatccactcgactcatcaccttctgccatagatcggcctgcctgtgtccccagcattagctctgacatcccttgagctaaagagttatcatatctgttaccaatatcaaagagatactcgtcgttcccgattcttctttctgcttcactatcctctaaaagttcaccaacgtattcacatatgaagctaccaatagggatcgacttaagacatctcactccccaacctcttgacttggttttgaagatctcaagcggtaacttgatcccatgctgtgtgactcttaggtagcaactagaagggcatttgcagagtgggccacattcatagatagtaggttttgcaccaacaatggctccatcgaagttgtacggtatctctccaccgtttttctccacacaagcgcacaccctcgcttcagcttcggtgcagcgcgtggtgcaacagcatgactttggaggaactggtctgcaccaatctgggtaaatcagtttaacagtgtaggtgaacaaaggcggtttctcgtcgtctatttcgttcacagcgctaatgggtgactgctctttcccttctgagatgtcaagcttgcatagaccttcccggtattttgacttagatttcttcactctacccaagaaagttcaggttgtccaggtatgcgcctaagttgaaacttgaagacattcatacagtgagatctgacttgttgccaatactttccacaagatat

SEQ ID NO: 12263 - DNA, 904 bp, Arabidopsis thaliana
gcaggtgagaggcttcttctgatttgttcagctgcgcataaccggaaatgatagagttccaagtacacaaactattttcttcagtctgtcgaaacactattaaggcgtgcctaaggtctttgcattttgagtacattgtgatcaacgtgtttcgaacattgtcaatcccatcataagaactgtgaatagcaagaccgtgaatctcttttcccaatcgtattgctcctatgagagaggaagccttcaaaccaataatcatagccacaggatctaagctcgtaggaaaatttctcatcctagagatctaaccccaaagctctacataaattcccggttgccaacaacctccagaaataatattccaagttatgacactgacctcaacacctgaaaaccacattttatcgaaaagctcaaacgcttcactccacatgccttccgaagcataacagtttatcactgcattccatgagacagcatccctttcaaacattcgatcaaacaacctccgagcaatacccatatttctaaaccttttatacatagagatcaatgcattacaaacatacaagctggacttgtaagagctaacctcgatggaaccatgaaccacccttccaaaggcaacgtcaagtgtttcaccacaagccttaagaacagacggataagtgaaggcatcgggtcggattcccttgctcaccattctcttgtaagcagcaataacctcctcaaaaagctcgttcttggcatacgaagcaatgagcacattccaaggtaagggatgcaaaatgtcagagttctcaataatcgattgagcttcattgtggagattgaaagcagagtaaaaggtaccagctttgggactacacagagtgatattcgcacccgacgaaatcagtgagcg

SEQ ID NO: 12264 - DNA, 587 bp, Arabidopsis thaliana
cacagttagtgaagaaatcaagaggatgaacctcaacaccaactagtggctgcaaaaacacaagaacacatgagaatcttttgtgagaataaaaaaggttaatgacaagtgatatatttcaggatggggcttgcttgcgagagtacttacgttcatacttcttctcaaactctccagtaagatgtctctttacaaatgtggtcttccctgtgaaccaaaccaacatttaatcagaggttacttgataacatagccaaatgcatccaactactgaaacaatttggaacaatctcagaattgaactacgacggatcaagatcacttatacatacagatactaagctctagacagacaaactaagtcaaagcagcatactaatcaaaactgaactatatcaaagcaatttgatccaaaatcgagtttctgaaatagaactaaatcaattctctgtatatatttctaaaacaaaagacagatgaagctagggattgggtactgtgcctcatcgcaacgataacgagcttgaagctagggtaaccacggtttgctggttaggtagaccctgcaattatgcaaaatacgatga

SEQ ID NO: 12265 - DNA, 1432 bp, Arabidopsis thaliana
ggtcacgaggtctattaactcttacactcacagccccaccacgacctcttgttggattattacgaacattttgtacccttctagtttgaggtcctctagggctttgtattggactgttggatccttgaagcccaccacgtgggccattaccaactattttcttagaccgagaagcctgaccattctggttcgtgtttttcttccttccgccacccgagccttggttcatacgaaccggtcttggtccttgtgtgttatccagagacagtggatatagatcagcatcagacaaatcattacattggctacgagcatcactactgcttccaaaatcactctcactataagcaacacttaaattatcgacacaagccacaatttcaagcccgttaccatcaacatcttctccctcgtcgttaccatcaacgtcttctccctcgtcattagcctcttcaacatacacatcaccttcatattcaacctcgacatcgacatcgacatcaacatcaacatcaacatcaacatcgacatcaacatcaaactctttattcgttgcacttgcactaccattgtaaccactcccatccattgatccttgaccagtaagttcatttggtccattaggcccaacctgagcattatcacccaagttgttgttctgtcttctcggtccattgacagccgcgttttgagctataggcctattaggattaatggtcctattgggccttgtcataggcatgggcctgaccctgttactgccttgattaggcacaggaagcgagttttgatgttgaggtgaccggcatgatgagtatgaggattaggtgcggaagtactatgttgaaggaggtgaggattaggaccagtgatacaaccgacatgagcatcgaattcgcaggggatgcaccggtaaagccactggttcttcccaatcttacgacagatgtcgcaagagaaacctttattagcgccatatggagattgaaacgcgagtttaagattgtgttgcggatgagacttgtggatgattgagagcggcttgtaagcacaaagcgcgtggatgtcgaagtcgcatacagagcattggtaactaaaacccgtcccgtggatgccacaaccgtcacagttgaagtatccaccatcgtagacaggagccacgagcaggctaagcgtatgcgaagggtgagagggatgtgttattacctgcttcatcttgctacacgactcatggagagagaagttgcatggcctacatgagtaaacccggccgttactccggtgagtttgcaggcggagcacggtggtgatgacgtcgccggggttagttgaaggcggtgggggtggctgaaatggttaataaagctattgttttgagtcgttggcttccccattttttgtatttttttctttggtttttgtcttagaaatg

SEQ ID NO: 12266 - DNA, 1268 bp, Arabidopsis thaliana
tgttgtttactgttacttattaaaataattaatacatatgagtattttccttgccgttttttccacatttagtcctttatattttgtttttcccttcagatctaatatagttggttgacaaagcaataattatattcattaattttattgaaacatttattagtatattaagcatctcatccttataaacataataatataaacagtataactacgtatcagaacattatgattcacaatagaaacatttgaaggaaaaagaatatgtatggcttttatttttatatttatcttttgaacaaaaagttgttattattctgttctttaaattataatccaaatacgaagataagaggatgctgagatcccaaaatataaagaacaataaaaagaggcttaccccaaagctacaataagaaaggtagaaagatacataaacttaaacaataaaggatctttgagaagtttgagccaaaaacaaaaaagttttgtaatacatgtgaggtcaaaatttgtcgataaatcttccaagagcgagtcaatcggtttgctattatagatactatatagattcaagacaatccatctgttacatgggatttgggaaataaagctatatataacaattatacgccaacatacaagaaaaacataaaatcaacaaagaccacactaacaaaattaattcttttaagaaaaaaatcaaagtccatcgttgaccggtactcccgtagccgtaatccaatagtttccgtccaagaaattctccaccgtgaatttttccgcctctgtcaccgtctttataacatgataacctggccacttaactctaccggagacacttgctccggcgccggtattaccatactcaccgtaataaagagtgctaagagcaaaactaccactccaaggcaaccatcccgccggactcaccaacgctccaagattacatttcatgaaaaccgtcctcgaatgcgatctccacggccgtcctaaataagtttccgaagcagtagccaccgtcgagctctggatgacgaagtcagtagtctcgtcgggttctttgcgtgattgagcggtgatcgtgtttttctggccgctcatcggcttacgagcgtagatgttacagttttggaggatggcggttgcgtctccgaagatgacatcgacggttccgtaaatattgcagtttctcaagaactgacgactagaatgaaggtagagagtgtcttgatagcctttgaaagagcaggcgtagaagacggaga

SEQ ID NO: 12267 - DNA, 938 bp, Arabidopsis thaliana
attgcgcagagaagagaagccgaaaggaaatccgcacgtgatactaaagagaaagagaagctcgagggcactctcgggtctcctcagctgcaatatcagcactttgcttgggaagaaattatggctgccacttcatcattctcagaagaactgaagatcggaatgggagcttacggagctgtttacaagtgtaatctgcatcatacaactgcagttgtcaaagttttgcagtcagctgaaaatcaactttccaaacaattccaacaagaggtatggaagtgagctcaaatttggtttaaggaactttgtttgagattttgtgcctttcactatatggaagttttctgattttaatttcaattcttgtggataagagtctacatttatctcactggcctctctaatttgcagctcgaaatcttgagcaagattaggcatccacatttggttctccttctaggagcgtgcccggagcaaggtgctttagtttatgagtacatggaaaacggtagcttggaggacagacttttccaggtcaacaacagtccgccactcccgtggtttgagcggtttaggattgcttgggaagttgcagcggctcttgtcttcctccacaaatcaaagcctaaaccaatcattcaccgtgatcttaaacctgcaaacatcttacttgatcacaactttgtcagcaaagttggagacgtgggactctcaacgatggttcaagtcgatcctctatcaactaaattcactatatacaaacaaacaagccccgtgggaacgttatgctatattgatccggaatatcagcgcactggaaggatatcatcgaaatcagatatctactcctttggaatgattcttcttcagcttctcacagcaaaacctgctattgcattgacacatttcgttgagagcgcaatggatagtaatgatga

SEQ ID NO: 12268 - DNA, 942 bp, Arabidopsis thaliana columbia
aatttaaaaaacctacttgaactattgatatagtgcttggttataaattcacgttaacaaatgttagtcaacactaatgattgctgactcagctgacacatatgtattgacgtagcttattcttcaactacaatgatgtgtttttgctattttgaaatcaattttaaaaaaaaaaacctgtaaaaatagtgattcgaaccggaaacccgtttccccaactcggattcccatcccaggatcgtatcctatcatatacacatgcgtttggccatccataaacgtcttaagtggcatgaagatctcgatttctaatgaccttggaaattactttgggtttcagctttgagattactggttttagcaaatagcatatttctatggagactctaaaatacgaaacttgggagaagtaataataataatgaccgcagatttttgggatctattgttcattataatttttgagttagacatctcacacaactagtcacgaagctttgtttttgtgtgatttggacctgaccaactacaacttatgtaactatcaaaacataaaaataatttcatgtatttcataccaaatgcatacaaatacatatgtatttattttagtcgaatacaaatatgtatttataactcgagaaatgctttcttcacttatattccagatgtgttactatgcgcaccaccaggaatggtcacattgctgttgtcgcttatagaagaaaccaatttgttgtcatcctcacttttagttgtgataggcaattcttggaggctattcttttcaaggatatctaatccggatacttcatagtcttttccttttccccaaacaaccatatacaaacccgcggcgatcactgcccctcctattacactgaaacataaccaaaatataaggatcaagaataagtattttgatggttactaatgtaatgt

SEQ ID NO: 12269 - DNA, 961 bp, Arabidopsis thaliana columbia
cattgggtcgctacatggaaccagcagacgcaatgctagaataggtcgactgtactagaagcataaagactatattataaataaggataactgaaatattcggtgtcacaaaacgttaatgttaacgtgatgaccatctttaccacaggcgctaatgagagatgagccttcaaggctgggctgagagaaacagctataaacgagaatctaactgttgttccttcacaccctatgcttgatattgcaacctcactaggatcagcagcatcttcatcatcacttatctcaacaactgtatctatcagccgctggtttatttcctttatttcctccaaaagggcatgctcggtctgcagttcaagattgagtcttcaaaaaaaaaagaatatcgaaaccttgtgcttccaaattttctttgttacgtgtgtgtgtgtgtgtgtgagtgtgtgtcaatattcaaatatagctaggggaagtctaactgagtatcatacctcagttcttgccttcttgccatccgaagtcgcagtagattctagatcggatgtttctgaaccagcaaactgcttgtagttatcaccaacacttcctcccagtgaagcaacgcttagtggcattgcggttgtgtgacgcttcattttcttagtcgccatcattccctcttgggtcatgaagtttcttgcttggagacggcacttagtcattgcaaccaagtcttcaccaacggaagctcttgaaccgtttcctggtgctgaaccagctatccgatcaaccatgcttacaacagatccgatgtcacttactgcagaagaaagggcttgtggtgagatggacttcacctgaaagcaaagcatacatcataagcagaacaatgattatattacaaaacgggtttgcagcaatatcaccgtcctgctgcgatataccttaaaaattggaaatttacttacggctctaataa

SEQ ID NO: 12270 - DNA, 701 bp, Arabidopsis thaliana
caagttccttaagcctattggatgatatgcatttctatattgaacattaaattagcccatcaaaggtattaaaacatgctgcattaggtttatgcaaaacgttcttacctagtaggctcaggtcccacggcttcacaaagctcgtagagttgatttgcaaccatatagcgcacacgccaagacttatcctgctcagtgaaaaagtacaaagattaagcatttcttttaaatgtagatcatcagcataaaagcctacagacataatcacctgcgagaaattgacaatcacaggaagaatgtgtgcaacacagtcctggggctccaacaatttcccaagagcagcacaaccctcaacagccaataatctaaccgaatcttgatctgatatcaatgtcaataagatacttaaaatctgtaatattataatataaaaagacactgaagctgagatgtagacaaccgtaattctgcttaacttcagctaatggtcagtgttcaatgcagtaaccctaatacttgcctattacacatcagccacccccataactaggcttgatgaaaattgtaagagtatatgctggaaaaacgaaacatataataagggagagcataccatcttgcgtaagatcctcaaacatggacataatgtctgtcttcaaatgagctgattcaattgtagcagcaaacttccccaaattagt

SEQ ID NO: 12271 - DNA, 625 bp, Arabidopsis thaliana
gatcttggcacctgagtatatctgctccaccgggattgtaaccaatccaataagctgtgaacccacaacatcactgtctttaacaacaaaatgaacttctgcagcatgatgagcaacaggaacataaaaatgttgcatccaaacaggattttcgctgttactcatgacatacgttcttccaatcacagcaccagcaactgatacagaaacataaggatcactggtaatcttactagtaagctgcccttcaattttccctggcaatcttccaaacatatcacccagtgtcttatggaacatatccatgttagggagatttttagcatgatagatccaaatatccaaattcccatgcaacaacaggaccttcaacgaccctttaccaaacagtgtcatctgcatatccgcactatgtggcgattcggtagatgcataataagaacttgaggaatctactctccctaactgtggcaaatgagagttacttggaaacgagctgttagggtaacatacaagtcccagggcggctttgcaagagttcgaaggaagggaggatagttgtggactgagggactggttggtagtagaatatcagcccctagaagtcatcacaggaggatagaag

SEQ ID NO: 12272 - DNA, 1681 bp, Arabidopsis thaliana
ctccatcaaaggaggaccggagagagtttcaatcacgtattgagtgaacaacgactcctgaatccgatcaaagtaagtgctcatgtggaacgatgaagccaaaactttaaccagaattgttttaaccaaccaaatgataagagccacaagcaaacataccaacactctcgtcacataccgaagagcagtgctccgagtctctctttcgactttcttatcgaacaagaaatgccacgcgagcaacactagccctaaccacaagcagttttgaacagattttctcactccgtagacgaaatacaaaacccttttcctccaagtgaagtttttctcgaccaagaagacaatgattctcactatccaactcgagactaatctcccacatatcaacaccaaaacagtcacttcccatttccacaaatccagcttccaccatgtcttgcgttgcaagttatgtatggttaagctacagaccaaacttgtgactatcagaactagacttatccattcaaggaaaacccagaagctaagtttgtcccttttgaattcctccggtaaatcctcgtctagaaacggatcctcctcttcttcttcctcaaacccattccgacccggagtacccgctttagggcttttcccaagaaacccagatttaaaaatcccggatctccgaccagacttcatctctgtcttgtcaatcgctggatgtgtcggtgttggaggatcctgcaatcttgatttggtcttgttcctactcaacatcggtttcttcgaaccacacttcaaaacctctgcttcgtctctgtttcgaccttcctcgtcgctacttccacctagcgatgttctgttctgcctccgtcttactgcgtctgctttaactttagtcttaaccggagaagaagattcagaaatcgtcgttaagccacgtcgcggcgtgttgctagcagttgcaggacgtggcggcgtgttgctctgtagctctgccatgttaagctcaacatctaaagagatctcatctcctgaagctctctgcttgtgaagaaactgaccaattagcttcgacggcggatcagataactcagctgacgaatgcctccgctctccccgctgcctgaaatggaaactgccgccgtcttcgtcttcgtcgtctcctttcttatcattcttacccttttcaccatcccaaaagtcatagcttgactctttccaaatattacctccctcagcattgctgcttgaccctgtagcaccgacggctccactctcttggccgttgatgttcactatgaagtcccgccgatcagttgaatcgacagccgccatgattccgttagagatctcacaaaggcaagagactagattttcttacctaaaagaagtaattatttccggaaaaaatggagagaggtttttttggaaagtaatgatttttgttttcagaagagacgagtgatagtgtacgatcaaagaagaagatgagggtgagaggtaataatgcaagtaataataaatgttgtgaaacaaaaaccaaaatagcaggtggtatttgatgataaagagaaagtggaagaaaatttgttctcaatatatcaacgtgtgaaagtgtaattttttgacgacagatttttgatagtgcaagtacttgatgacaatgtggtataatatgatgtgatgtgatttg

SEQ ID NO: 12273 - DNA, 582 bp, Arabidopsis thaliana
cgggcgattttgaattaaacagattctttccttaaccgaaaataaacagaaatacacacaataaccagttagttacaaagtgctaaaacttatttagctgagaatcgttattgcatacaccattggtgatggaaaattctttacaaagcaagattgtgaaaatatctcaatcgaagttggtagaccggtgatttggagcaatgtaataagagtttccacaattaatgtgagattgcatcaacggattccatctatcgaaaataattcggccaccacgcccaatcctcccctgaaaccgacttggaggttgacctggtgatgaatccggtgttggaggaacaatccctgcagctgccagtttatcgggaaccagcggttttgtgaatagcattaccggttcattaggatcctaaggaacaaaatcattacaggtttgcttaaatgattgattatagtagctagagagagcttaggtgttgtaagagaaggtttaccagtctgtgaagcatccatgctgtgactgtcgtcttctaacttcttgtttgatgcctcgggatgagatgattcagatttaagttggtg

SEQ ID NO: 12274 - DNA, 1061 bp, Arabidopsis thaliana
caaaggagcatacttactataaacacatgaataaaaagagtgaatttaaaagacaatattcacaagaagaacacatgtttaatagctcgcactagaagaataagttggatatttgcttggttactagcagcgaaagaatggaataccttagtaatgcagtaaaagactcggccagcatcccatatacgacggcctataatatactccctgtcgctacaaaagaaggggaactgcaacagtagcggaagatatgagtaaagagaagggagaagaagcaaacagaacgaagaaaaaagagaaacaagtagcgacctttcgcacccattgcacaaccatagtgcccgtgtccttgcaacgctcgagagtagaagaatacaaaagcatatcatcccacttggaacggaactcatcatcccaaaagaagtccctgaccatctcgggagtggcatcctcaaacacagttctgctacggtactggggaggccattctggcatcatacaaaaaatgattcaacttggaggaacatgttaaactaaacttaaaggaaggagggaggggggtacctcaggatctcgcctccaagcttgatatgagaaggttggggttgatcggtccatcatttgaatccaacaaggaccgccatctttgacctcaaccaacttccatagatgcctaaaatcatcgtccgttacaaacccagttttctctttggaagaaaggctgcgacccaaagagaagcagagttatttatttagcagaagagtaagaaagaaagagagacaagtggggaaacgggttacatcaatgaaatcatctcaaccttacctggggttaacgtggtgagaagaagttttgaggatggaagtgggaagctgaagattgaggaatttaggtgaattggacaagagtttagaatcgagataagcccacttgggcctccaaacccaaccaaccaaaacaccggcagccacagcaatccagagtggcgcaacaaaaactataaggtcagagaagccgaggctgtgaaactcggtaaagaccaaggaactcaatcccatca

SEQ ID NO: 12275 - DNA, 566 bp, Arabidopsis thaliana columbia
ctcaaaacggggagatgttcataacacagagaagatattcctaaaaatgagggaagctgggtatacatctcggcttaggcagttccaagccctcatgcaggcttacataaacgccaaatctcctgcatatggaatgcgagatagattgaaggcggataatatctttccaaacaaatccatggctgcacagttggctcaaggtgatccatttaagaagacagctatctctgatattctggattgagtagtctctctccctacacttttcttctatctgcttgcaagaagtatctcatttgtcgtcctaacgtttagtttgagagagtaacgttaagtttaagaacctgcttagttgctgtgtttttaatgtttctattcggttctttggtgatcacacttcagagaccttcaagtttcatgacatttaggagtacacgaagaaaataacgttttcaaactgcgcgtattctaccgcaaaattttacaaagatttagccactcttctcttaagtggaaaataaacagaattattccgaccattaaaaactctgatgagaaaaacagag

SEQ ID NO: 12276 - DNA, 556 bp, Arabidopsis thaliana
tagtaacgcacgccagtgtgctctaaagcacttacaccgcctctcagcccggtaagcaccagaaaatcattgatatggccatgaatggcgtcggatgtcgcgccagtgcacgcattatgggcgttggcctcaacacggttttacgtcacttaaaaaactcaggccgcagtcggtaacctcgcgcatacaaccgggcagtgatgtgattgtctgcgctgaaatggacgaacagtggggctacgtcggtgctaaatcacgtcagcgctggctgttttacgcgtatgacaggatacggaggacggttgtggcgcacgtcttcggtgaacgcactctggccacactggagcgtcttctgagcctgctgtcggactttgaggtcgtggtatagatgacggatggctggccgctgtatgaatcacgcctgaagggaaagctgcacgttatcagcaagcgttacactcagcgcattgagcgacataatctgaatctgagacaacatctggcaaggctgggacggaagttactgtcgtcgcaaaactggtggagttcatgacaa

SEQ ID NO: 12277 - DNA, 886 bp, Arabidopsis thaliana
tattaccttcactccatcagaaacttagacaagaaaagacggagatgttcattagcacagcgcggtggaactatctttccgcgctctcagaaattcaacactgaaagaataactctcgcttctttttctctttgctattacatgattgatacatccagcaagacaatgactaaagagatagtcttttcacctctctcattccctcattcgttctctgtctacttacatgtacactctctcctacatcctttttcccattcttgcaaatcttctggctactccgaatatcaccgcctttgtcaacagccctttgtccaatgtacatgcaagtgcaatcgcccctcctaccactagtatctttggtatgtttttccccgtcggcttgtctcctgtaacctctgctatcgaacccctctcattcatgaactcctctgcactcactttggtgttgatgtgagccattatggcactcggggataaacctgctcccgctgctttagccctctgatatgcacgtaggcctggctcaatcttcttgactgcacctcacataccctgtctcaccccaagctttgcaatctcccacggtattcccatatcttcatggtgaaatagtagtacctcacatgatgtcatctcaccatcgcctctttttgattcaactacaccatggtaatatccatttgagaaactaaacaacacttaaataacagagacaacttgcttagtagtacctgcacggatacaccagcttgaatagtacaagtcgactcgccttggcttgttttgtctaggtacagacgggtattgtactccctgatgcaaatacaaaggagcatacttactataaacacatgaataacaagagtgaatttaaaagacaata

SEQ ID NO: 12278 - DNA, 505 bp, Arabidopsis thaliana columbia
catcttgctccttgtccttggcgatgtaatgatacttccgaatgttttgtagtaaggaatgtaccaccatgggacattaatgaacagctgaaaataataacaccacaattcatacaaagattcaaacttgttgtaatcatgatcaaaatgctaatttctttacctctttagcgacaaactctggatagttatcttcgaattgcttaacggcgcgtttaatgaactgccacaatgctctctgaccaagtccaggagcgttcctgaagtcactaacgaacacgaacgatgacttagcctcagggctaaagtcaagagacctcacacacttctcttggaactgaatcctccatttgagaaacttgctaagcttctctttatctgagaaaatctccttgttctgaaactcaccgtacgagctatagatcacgacatgtccttgtttgtcgacaccgtgagtgaacaccaacttctcaaactcgcttccttcaagatcttctgagactag

SEQ ID NO: 12279 - DNA, 735 bp, Arabidopsis thaliana
ccaaaggagagtgacaaggcagttcatgagagagtaatggagataacagagggaggagtggagtacagcttcgagtgtgcaggaagtatagaagcacttagagaagcctttctgtctacaaactcaggagtgggagtgactgtcatgctgggcgttcacgcaagcccacagcttctccctatccatcccatggagctcttccaaggcagatccatcaccgcctctgttttcggaggcttcaaacccaaaacccaattaccctttttcatcacccagtgcctccaaggtcttctcaatctcgatctcttcatctctcaccagcttcccttccacgatatcaacgaagccatgcagctgcttcaccaaggcaaagctcttcgttgccttctccacctctaaactgaacaaacatcttttacattttccaaatccgtttgattgattgttctactgcttttagagtttccttattgggtctggtccacccccatactaaaataaaagttggaaatgttttctccaacttgctacttacagctacaaaacacacaagttatatcgatttcttgcattagtctttcgatatagttcagtcgacatgaatatgaaagatgcgaaaccctgaactcttttccttcactgaaaattgtgagaactctatggaacttagaacgattgagaagaagcaaaatcagtttaatatcttcctctcgtgtttgtttttataatttctat

SEQ ID NO: 12280 - DNA, 625 bp, Arabidopsis thaliana
taacattgataaacttcggtatttcgggaatattcccaccttcacaactacaacttttaataaacctgaaaactataataattaatctaaccataataatatctagctacaaaaccatcacgattcgtttaagtttcttccatactccattccataagtttcaacttcaaaacatagaaattatgctcacattaacgaaggtcgacaagagtgaaccctcatttgtttcaggtgtcaaaaaggtagtccagcgtaacataaactatagttttctacgtttgacattcaacgtaaacataaaccaattgtttgctttcgtttttattttttacccgggttgcttttatccctgaaattcacgttccggcaccagtacttgctaaaattattagctacggtgctgaagatggcgtggatgctttgaaatccttggtgaaggctggaccattatttaaagtggctgtgtattcgaaggaaactctaagttgtgtccgccttgacaaatctcgttattatatgtggtggccatgacgcactccatctattatcatttcttcacaaaatgtcttgaagccaaaaatcccatgctttgaatgttgtattgtcaaacaatagcatatgggaa

SEQ ID NO: 12281 - DNA, 925 bp, Arabidopsis thaliana
cggtgactttagttctatatgtttcagctttatgaaatctagatctaattctaacatggttatgacacagtcattggacttaaaaatgtttaatgattggaatgataaaaagaattgactggtgggtatagaaaacctggataggagtgtggccaagcagttcacgcaatggtctaactgttgataatggatgctccggagaaactcacaaacaatttgattcagcagctgaaatttccaatcaagtgaaaaaggcttgcggtttcagaaagcatggaacaataaaagaagatgaaaacagatgagattaataacttttctatagctttacctcggcttgacgaccagcatgaagcctgacaccagaggcatcatacataacctgcagcccaattcagaaatatacaaaagattggtcttactatgaaaccaaataggctattcacaatgaaagcaaaaatctcttttctacactaaacaaagcaaggcatttgtaagatgaattttgaaatagcgaattcgaatgcttctcatgtgctctggaaactgactgttgaagaactcgatcagtccaatggaaattaaatgactcgcagagccccatcagaatcagtggcaaagcagccaaaacaccgacatttgagtcatttcagtagcccgtgtccgcctcactccctctacaaaccctgcagtgaacatggagagaatggcgaagacgatccctatccccatccgttgaaggagagtgaccctgaactttctcattcgccaaaggaacgggactaagaggtgttcgtagataggcacccaaatgcctatagtgatgtaagaaatgacggttatggaggcggccgggatctcaaagtgtggacccatgtgtcgatccatttttgtagcttgaaagaccatgacagttgcttgcgtg

SEQ ID NO: 12282 - DNA, 1118 bp, Arabidopsis thaliana
cttcatactcgcagctaaccataggaaccgtccgattccttccgatgagtcccacgacggcatctccggagtgtaacggtgactgatgtcatagattttgccattcccgtagacttcacggcgaatgggtttaagttcatcggtgaaactccgtcgataggagcggttccgggaatagaaggataggcattggaagcaccggcggagataagaagagaagggagagagaggagtgtgaggaggaagaataatggaggaacggccattgttaggtcactggttggtgattacgatcatcacgaagaagatgaattgattttgaccattttggggttgtttaatttatgggcctgaattaattataggcccaaatcgtcatgacaattaaaacagagcaaatcgtttcttggtgcgaaagtaacaagtccactagttgacacatgcaagcaaagtagcaaacccattgtctcattgaagcatacgatactagaatttcataccataaagtaatttttccaattatcaatcatataaaatatgtaacaattgcaaccataaaagttgtaaaattcttgttccttggaatttttgaggtcttatgttgagaaaggaagaagaaatggtagaacttaaatgtttcaaagaatgttgtattagttttgtgttagttaacatttacgtattctatatgtacaaaaaatttgtgggtacaatgatttattagatgttaagaatagagactctgtatttgatcaatgatttagagagtgacccaatcccatcttcaagatcttgaatgcatatttctaagttctgcacatcctccatttgtaacgacttttcggattggaactccatgtctactcttgtgaattcatttgcttcagcttcacatgtacctttgctttggctcatcatctttgagaccagtgaccattttccacaagccttggaatccggacatgaagctaaatagactttcaaacaaagcaattgttacagtttctgcttctccaaacacagccaaagcgtcgtttttgttttggcttgtttttaaactcttgagtactttttcgaatgatttcttgagaaactttcttgaggctaagtatttcttg

SEQ ID NO: 12283 - DNA, 160 bp, Arabidopsis thaliana
cttgtaatcccaactgttcgggaggctgaggcaggagaattgcttgaacccgggaggcagaggttgcagtgagctgagatcacaccactgcactgcaatctgggtgacaggttaaaaaaaaaaaagaagaagaggctggtttggttcacagcatctgagt

SEQ ID NO: 12284 - DNA, 804 bp, Arabidopsis thaliana
catattatgatacatacattgtcatagtaattattcaaacaacatcgacaatcttcttgttgtccctaaggatagtctattaaatcatttcatcgatttcttcgaagtcatctcaacatcatcggaggacttgtcctcctcaaagtcttcaatcggtaaaccgaccttgtaccggtatccccgagcacaataccaaaagtaaaccagattaaccacacccaaaaccgcaatcagataatagaagtaatccaattttcccgcgttgagattcttgtttagccaatccggacgatcatgcccaccggagaatttatgaacgacagtcacaaggaaactactaaggtagctcgaaccggcgaacgataaagagaagagagagttagcgatacttctcatgtgctctggaaactgactgttgaagaactcaatttgtccgatgatattgaatgcttcacatagtcccatgagaattagctgcggcgaaagccaaaacaccgacattggagtcattcccgttggatctccggcattgatggagcgtatgcgtctcatacgctccacaatgcccgcaacgatcatagaaaagatcgcgaaaacgatccctgttcctatcctttggaggagtgtgattccggatttatggccggtgattcgccgcatgaatggtacaaaaacgcggtcgtagaagggaagaaagatgccgattgtgaggagagagatgacggagagtgaaccagccggaatctcgaatttaggacctaagtttcgatccattttcaaagcttgagagaccgtgaaagtgcc

SEQ ID NO: 12285 - DNA, 527 bp, Arabidopsis thaliana
tttctttcaaataccaattcaccctactgatcaatagaaaactactttcacatgtccttatggaacttttgcttataagagaatgccatttggtttatgcaataatcctacaacatttcagaggtgtatgacctttatatttttagatttaatcgaggagatagtggaggtcttcatggacgatttttcggtctatggcccctctttctcctcatgtttgttgaatcttggcagggtattgaccaggtgcaaagagacaaatcttgttcacaattgggaaaagtgtcatttcatggtgaaggaaggcatagtgttagttcacaagatatcagagaagggtatagaggttgacaaaggaaaaattgaagtgatgttgtagttgcaggcaccaaaaacggtgaaggacatgagaagtttcctcggtcatgctgggttctacagaagatttattaaagacttctccaagatagccagaccgttaaccagactattgtgcaaggagaccgagtttgaatttgatgaggact

SEQ ID NO: 12286 - DNA, 596 bp, Arabidopsis thaliana columbia
caaagaatttatgttactgaagaaatgtaaagactaaaaccgcgtaggtgtcgattgacaccatcactggtgtcgagcgacaccgatacctgatggcaattcgaagatgcaacttattgatgttttgaagatctccaaatttggcatagaactttctcctatgtttaatgaaggcccaacacgtttttaagacatatatattttttaggtcaatgttgagaccctaagcttggagaggctattctcctcatctcttttgtactttgggagcaaaaccctgtggagactccctttggaaaagatcttctttactctttctcttgctattattgatttcttattcagactatgatttgtgtttctttgatcatgtctaagtaaaccacttgttaggtttagggtttctcattagagattcatatggtttaatagatcgccctaatgctaggttatctatagaattcttcatcattcattgttcttaatgctagatctagattgatccctagaacttgaaccaaacaatagatatgcctccataggtatctgtagttggactattatttgatgagcatggtttatagctgtgtaataag

SEQ ID NO: 12287 - DNA, 648 bp, Arabidopsis thaliana
tcggtttacaaccatcttcctccatcttcttgaacacatttacagcttccctataccttccgctattagcaaacgctgatatcaacgaagtataagagtagacatcaagcgaaaacccgtcttcctgcaaaccattgaacatatttgcagcggaagatactctgccttctttacctagcatactgatgattatagcaacaacagagttatccaacatggattgataatccttttgcttcataaaccaatcaaaagcacgcagagccaaatcgaatttcttatgaaatcctaatcctttaagaaaagctagtaactccgacgaggtagactctggtttatccttaaaaggctcgaatagctcagagagtacagaatctaattgaccggaatcaaaattgggttcgatgagggaacgaagaacttgctgaccttgtggagaaagaccatggtaagaccaaggtttaccgaggttagggtcacgtgacttgccaattcgagtccggttacggtttctagatgtttgagagctgatgggttgtctggaattagggttctggtgaaggaaaacatcgtggaggagaggctctcaggcggaggaggtggtgacgaaagagacgtagtaagaaaaggcgtccgagagatatggtg

SEQ ID NO: 12288 - DNA, 541 bp, Arabidopsis thaliana
tttctggcactcgggtaatgtctttggatctagatcatcattctcatatctatctctttagataaagaaaatgagaatatttcattttcatcatcaatatcatttctacctcatatgattccatcatggggattgttaatggaaatctcatagttttctctatcgtcacgaggacttggttcttcttgaagaaagttttcatttacttctcgtattttctttatcttttgggatagttatcttttgagccaataggcatcacatgctttaattgaaccttaggttcattaattttgctcccatctaattccagctctctagagttagccgtgaaaacggttgacgatcagtcaactcgggaggcgaatcctatcgcccctgccatcattccaccacctttctccttggaagacctcaaagccattctcacaactgtgaccaaggacctgtccaactttgtcacagagacaaaccgtcggctcgacgagttagcaaaagggatctccaacgtccgaactctgaagtacaccgccaagaatga

SEQ ID NO: 12289 - DNA, 513 bp, Arabidopsis thaliana
cgattcacttggcctgtcttcttactcggacaaacattggaacgatgcccttcttcactgcaggaaaaacatgcgacatacgcttccgttggttgggtaaccactggcaaacttgcgcgaaatggcccaactttccacatgtgtaacatccccttggatcaaaatcgtttcttcccttatcgttgttatagctagcctttcttcttcctcgatcatagtctctctcctgattcggtgtgaatttaggagcgttgtttttggtctccgcgttattagtcttcctccctcccgatcgatcgctttccttgttggttacactcttctccaattcaataccttcctctacattaactgctcgttcggttaactcgttgacactgccatatgtgactgcttgtagtcggtcccatatctctggcctgagtcctctcaagaatctacgcaccatcaatgcttcatcgtcttgtccgttgtataagtactccttagtcgcgtgaaagcttgctcgtatga

SEQ ID NO: 12290 - DNA, 558 bp, Arabidopsis thaliana
tctcctttgagttatcatctggttcgagacagagaaagaagggaaatcagagcaccaagacgattcgatgatgaagactattatgcagaagctctatatacaacagaagatggtgatgcagtagaaccggcagattacaaagaagctgtcagagatgaaaactgggacaagtggagacttgctatgaatgaggaaattgagtctcaactaaagaatgatacttggactacagtcacaagacctgagaaacagagaatcattgggagcagatggatatacaagtataagcaaggtattccaggagttgaagaaccaaggttcaaggcaagacttgttgccaaagggtatgctcaaagagaaggcgtggactatcatgagatctttgcaccggttgtgaaacatgtttcaatccgaatcctcctttcaatcgtggctcaagaaaatcttgaattggagcaactggacgtcaagacagcgttgctccatggggaattgaaagagaagatctacatgatgccgcctgaaggatgtgaaccttattcaaagagaatgaggtat

SEQ ID NO: 12291 - DNA, 556 bp, Arabidopsis thaliana
actccattatcaccgtaaagtattggaaaatagttatttcatgtgatcgtataatgctaacgttttgtggaatatggtatggttagaccgatttcaggaggatcgatgaacccagctcgatcacttggaccggcggtggtggcatgggattttgaagacttatggatttacatgacagctccggtgatcggagccataatcggagttttgacatacagatcaattagcctaaaaaccaggccttgcccttctccagtttccccttccgtttcttcacttttacgttaatcacttcaaaacctaatatctattatacaaataaacacttttgattttttttcttggttaaggtttttaagtttttgtcattacgtcattagatgccgtgatgcgaaaacagagagctacttatcggattgaagatatagagggtaaagcaaatgaaaacagggggcattttgttctttttacacaatgaaatgaacgcaattaaaaatctttagtcacatatattttatagtgaagcgaaattcgtatgaatattcaaatcctttca

SEQ ID NO: 12292 - DNA, 501 bp, Arabidopsis thaliana
cgactgtttcgtagtcgtatgttagtcgtaaagttacgactaacttacgactatgttgcttagcgactatgtatatacgactactcttgttagtcgtctattagtcgtattatttctgtttacgactatgaaacgactagtgttgtagtcggtaaacgcctgttttcttgtagtgcatgtaacccactcgtgtactagtcatgttacagttttgccttattgtacgtacataaagaacaattactgacctagtgtatggttttgatttcgaaggagataggagggaactcggagattgatgaagattcttccaagttacaccaaaatgtctctaactctctaatggaagacaatgtcgatcgtgttccatcatcaactcaccaggtaacctgtgttctcagtatttcattattgtacgtacagaatatgttatgttctttatgtacttaattatgacataacagcccgaacaaggcattcttgatggtggtaactttgaag

SEQ ID NO: 12293 - DNA, 1455 bp, Arabidopsis thaliana
catcaataagcgtagtcggttaaccagcgccgcctgatcgtaagcgcattcaggctttgccaggcttgccatgccagcaccaacaggggcagcagaatcagcaaaaatgccagcattaccagttgtcgtaatgagcggggaaaaacgggccagcgtttcaaggtgttactctcgtcagacgcgaatagcctgatgctaaccgaggggaagttcagatacaacaaagccgggaattacccggctttgttatggaataaggcggtgcctaactcgacgtttcgcccgatggttgatatacgtacgctgatatcagaagttggacggcaggcaccttgttgtgcgtcattcgtattttatgtagcacgtcccgaaggggctgacataagtcggtgaatgagccactggttactattatgcagtaactgtgccaataaagaaaatagtttggtaacgtactgattatacgttgctttgaggggtttatgtctcctccgctgtttgaatgtaaatcagccactgtgtcgctaaaaagagacaacttaagataaacttattagataatattaaaatcaatgagttaagtgtcgccagaaagcgacacggcaaaccacccattgtcgtgatttacagacacaaaaaagctcccggagttgggagcttatgatagtggttggtgcttaatgccgcatccgggctgcaaaaccaatgggctgacgacttaccccaactgcttacgcgcattgcggaaaatgcgcatccatgggccatcctcgccccagttttccggatgccaggagttgctgacagtacggaaaacacgttccgggtgcggcatcataatggtgactcgaccactttcagtcgtgactgccgtaataccgttcggtgaaccgttcgggttagccgggtaggtttcagtgactttgccgaagttatcgacatagcgcagtgccaccagccctttgctttccagtgccgccagatgcgccgcatcacgcacttccacgcgcccttcaccatgagagacagcaatcggcatttgcgagcccaccatcccctgcaacagcagagacgggctttgggttacttcaaccaggctgaaacgcgcttcaaagcgatcggaggtattgcgcacaaaacgtggccacaactcactacctgggatcagttcacgcagattagacatcatctggcaaccgttacatacccccagcgccacgtgttgcggacggtggaagaaggttgcaaactcatcgcgtacacggtcattgaacaggattgacttcgcccaaccttcaccggcacccagcacatcaccgtaggagaaaccaccgcacgcgaccagggcgtggaaatcttccaggcccgtgcgtccggtcagcaggtcactcatatgcacgtcgatagcatcaaagcctgcacggtggaaagctgccgccattgtaacatgcgagt

SEQ ID NO: 12294 - DNA, 459 bp, Arabidopsis thaliana
taatgtttcggtcgaaatgcattctaccggaatgactctttttacctcaggatctgacgttgacaccagtgctgcaacgcgtccgggttgtattttctcctcaggtatgcgaatgagttcgaatttcttgaaattcttagccagatctttaactacttcgagatatgcttccattcttgaatctttgacttcataatctccattgaactggttaacaagtagttgcgaatcacaataagcaactacttcttcagctccaattccttgtgacaacctaagtcttgcaattagagcttcatactctgcctcattgttagaagcactaaataaaatgattgctcaaggacttccaaagtgggagattcaactttatcccacttcggatcctgttttgacaaagatccgtaacatgaactttcaagtttgatttttggttgcccgacgcacaaagactagtag

SEQ ID NO: 12295 - DNA, 959 bp, Arabidopsis thaliana
  unsure (1)..(959): unsure at all n locations
tacagaattggtggtatctatagaccacaccataccggaattgctctggaaaagtaatttcttaggatttgggacccatgcggctgtctatagtacggacaataattaattcttaaaaagtagaaacaattctgactattcctagtttcctaattcctactatgtagaaactattctgagccatttttgcaaaatcgatatatcaatatggtttcacatttatacggttctagtttaacaagatttgttaattatgcgtaaaacagggcatgatgatcgccggaacagacacttccgctgtgacgctggagtgggcgatgtcgagcttgctaaatcatcccgaggctttggaaaaagcaaaactagagattgacgagaaaatcggacaagaacgtttgatcgatgaaccagacatcgcaaacttgccttaccttcaaaacatagtgtcggaaacattccgattatatccagcggcaccgcttctagtaccaagatcaccaacagaggatattaaagtcggaggatacgatgtgccacgtggcacaatggtgatggttaatgcgtgggctatacacagagatccagagctctggaacgaaccggagaagtttaaaccagagaggtttaatggcggagaaggtggaggaagaggagaagacgttcataagctgatgccgtttgggaatggacggagatcgtgtcccggcgccggactagggcagaagatcgtgacattagcgttaggttcgttgatccaatgctttgactggcaaaaagtcaacggcgacgaantcgatatgacggagactccggggatggcaatgcgtaagaaaatacctctatctgctttgtgtcaatctcggcccattatgagtaagcttcaggcccatttaaaaggttaggtttgtttcttcttaaagtctttttagttttctgtttctatgcatggagatgtgaga

SEQ ID NO: 12296 - DNA, 1545 bp, Arabidopsis thaliana
aataatctagaagaaaaccgtgttaatatcggagaacaacttttcccaaaaaaatttggtcgtaagatcctttcccaatttggtttgtgaattggcttttagtcggtgtaagtggtggtgtagtaattttatggaagaagtctgtggtaacatgaattaattgtaaaaatatacatgaattatatattgtcatcatatacagagactattttctgtggtaacaattgttctgtacaacgacaatttgctatggaaactgtttctttcagcgggagagatagagagagagggagagagtaagcagaaggttctggtttttgtagtacttacaacggttttaaccaaggtagggcaacattgggtccaagcctagtcctgaccctcccaagctaccagggtctgcatgcttaactctcccgaaatagcgtatgtggcgcaacagtcttgctaggaacgtgttgtggcagattgtggagctgtcacataccactgccacgtgcttccgggctcttgtaatggctacattcatccgtctgctatcccctaggaatcccactgcacctaggttgtttgaccgtacctgtaatgggttcacagcacaacaagtacatgagtcttatttgcgctacgagttcataacgacaattttgttaatcggttttggttttcacaatcaagttcaactaacatatctaaatagattcttaatgttatctccgtttctttactatctgctagaattttaattatgaaatatcttcatgccacagaatggaaaagaagcagagtaatgtttaccattgagatgatcactgcatcagcctcccgcccttgaaagctgtcaatggttgcgacctcaactccatcagccactggaaaatcatccagcctttctctgagaagttgaacctgagcaacatatggggttgaacagcaatagccattggactaacacctacaatcatgtccaacaagttttttactaggttatcgagcttatattcaggaacacaattaatatgcatgaagtttagattcttcaagctctggtaattgttttgtgttatatcccagtcattcaactgaaaatagatggttcacctgcgtatatcaaagaaatgacgtgattaaccacaatatctgcttctccttcattgtataatgagcctgtgccagctggatccaaacgctcctcgcagcccacggataaactcccatatggcattcttgtgtcaagcagaaccagtgggcattgcgttatccaagtagcctgcagtaagtacaagaaaagaatgatgttacatctaagagtcatggtgttacaaaggtgcttttgatctacaatgatgttgcattttattagacattcaaaggtaagttaatttgtgacactgtttaatattatccagttaccagcaaaacaagagggaaacatctattgcaagctcatgagcaacatcacttttcaataaggccataaaaaagctgtaatcagtagatatttcaacacaagtaaagatagtacatgaaagacaaccaacagag

SEQ ID NO: 12297 - DNA, 1426 bp, Arabidopsis thaliana
  unsure (1)..(1426): unsure at all n locations
agagaaaatgcttgtaggtaacaagttaaggttcatatgttaacaaacctgtcccttgtgctttgtaagagtgatgtcaaacttttcttggacatcccgttgtgtgaattctttcttggcctcttcagtttgagctgtaacgtgaacatgaaagagagtaagccttgtgacgtgtgcttaagagataagatatttctgaatatttcctacctggtgaaattcaacaagaagattgttacttgtgaggtatctctcggctgacaaagcagctatgcatcctgatccagcagcagttacagcttgtctccattcgtggtcctagagtgacaaataggagaatatagcaaacacaattatcgaaccaatatgacttaaaagagttaataccaacaccgaaaaattgctaaaagttccgaagaatacctgcacatctcctgcagcaaatacaccttcaactgatgtatttgatgttccttcccgaaccaagacgtacccggagctgtcgagttcgacttggccttccaataactgactgtttggcgaatgccatattccataaaacaatccttttgcctccagctcagtttcttcacccgtatcaagtcttctgagtagaatgccagacatctgtcccttggtgttgctcaatacgtccacggtttccgtgttgtaatgcactgtgatgtttggattgttgatcactctgaaacattcgccataaccaacctgttaaaaaaacactcagggtgttgaaaagactcaacttacgttgtgctcattagtctataattccgatagccagcaaaaaaaaaaagcactctactggttggttataaatttacatgcaacggaaatcataaccaaaggctttcccagatatatccaatggatttgcgagggaacaggggatagcagtcaatacatgcaacaaagaacgctcaacatagctatgacaaaacacatttcctagtttggacatagcatttatctagttttaactgtttatcttcagaaatcaaagaagaggagtagaatataaggcagacgtgatgaatataagaactcacctatcttgcatagccttggaagctctcaactgatctctgcgaacaagcaaatgaacatgacgggcatatttcgtgagatacaaggcttcctctgtagccgtatcgcctcctccaaccacggcaagtacttgccccttaaataaaggcgacgtcgcatcacagatagcacaagcacttatccccctactccagaattcttcctctcgaggtaaccttaacctccttgctgtagcgccagtggcgtatataatactatggcacttgacctataaaaaatggaaacatcagaagagagctgaagccanaaaaaaaaaactatttagaatttgaaaaagaaatagtgagaaaacaaagaaaga

SEQ ID NO: 12298 - DNA, 477 bp, Arabidopsis thaliana
tatcgattggttcggttggtttgatggcccgttgtttcatacttagctggtctagatacacttcgtgcagagtcatcgggatgagagttgtctttcggccattgtgttcgaaggtttgtcggttggtgaagccatcttgaagaactttccgatccgattgccatggtcgtccgagaaggatgtgactagcgtccatatgtagaatatcgcacatgatctcatcatgatacttcccaattgatagtggtaccttgacttgttctttgacggacatctcacccgtttcattacgccattggagcgaatacggtctcgggtgtttaagcacttctaaaccaagtttctcgaccatgttcctactcgcaatgttagtacaacttccaccatcaataattaaactacataccttatctttgaccaagcaacgtgtatgaaacaagttttccctttacgcttgttcctcggcctttgttagac

SEQ ID NO: 12299 - DNA, 958 bp, Arabidopsis thaliana
aaaaaaatcatattacaagggagcgaagataaaccttgtggggtctttgagactaattgattgccaacacatagggcactgtgagcttctttgacacctgtaaataaaaataccacggaccttataagcttggcacaaagaagaaacacagatacaatacttggggaattgattattgtgagttcttcttctctccgcataaggagtagtaattggaatctcttcacctcaccttaagttcccaaaaccaagtcaaagtctctagtctctacccacacaccacataaagaacaagagaactcgaaaaaccacacattctataagcaacaacccttttggaatatatatgttcaatgagagtatcaaccatgacagctcaaaaacagagttgttaaatttgttgaagagcttaccactcaagaatgcattgaagatgatactcatgcttgcaactagtcaactgcgagagaataaaaaacaaaatgaatcggtataacctcaaatgaaatagaaaaaaaaagtctaaatatttagcaaacatacagtagaaggatcgctttcgcagaaggattcaagacaaatgctacaagcatcatcacaagcatcttgaattcccccttccacaaaagctgctgccgaagtcaaatgcccctccgacgtcgtcgtctctcccgctccctaacaaaaaaaattgaattgtcagatatcatcaaaatcccaacagagacgacgagagaatcatcaagagaaattgtaacttcgagtccccaaaatcaaggcaattatatagaagaattaacgcaattacgccgaatcaaatcatctaagctcatagaacaaggggattcgattgaattgcatcaaggagcagaaatgaaatgaaaaattcaaacggaaaccctaacatccatggaaatcgagatgaatcgggagatgagctaaacggagaagaagaaat

SEQ ID NO: 12300 - DNA, 452 bp, Arabidopsis thaliana
ttgatgagtagcctatcttgtttcttgcaccacctctgcaacttactgttgtttctgtgagcttcactcaagctcttgctctcccgcgctggaggtacgtgctctctgaaatgatacatgctcgtatcgtactcctcctccctatcctcatccgtctcagcaatatcatcctctatagcttccgtcgtagggacattatcatcagtcggtggagcgctctcaaagtagaggtaatcacgtgcaggtttgaagtcaatgttcctaccctgaagtatggtcgtggcctcgatgcagggaagcaaaatgttggctgttcggatcagggagtgctcgaatttgtagcgatagaaatcgccaaccatatcatactccagaaactcacaacaacgcaagtgatctaaatccatcatcctcggatcaaaccttggagacgtgagaggtacaccacatgc

SEQ ID NO: 12301 - DNA, 437 bp, Arabidopsis thaliana
catcgcctatcacgaacgcagctccgagttggaaatctctcacccaatatccgcagacaatgagatcatccgcactcacgacaaaagttcgtctcttcaaggcattgccgaatccacagacgacgttccccgattcatctggtattcccaggaacacaaccaagacgcagcattacaacacaggtgtgaacgagacaggatacgaatccagggaagactagaaagcgaaagtcgggccacgaaccactcagaacccgaaaggaactgcgatcagacaatccctataaattgcaactctaaagttctcccatatgtaacaactaaacctgcattacctcttgcagctatggagtcaacccgcgagggggaaaagccatgccatacacttcgagggtcgggatgatggacgaagacatcacaaacgtgcccggaagagg

SEQ ID NO: 12302 - DNA, 502 bp, Arabidopsis thaliana
tgatgatgatgatgatgaatagtcaccaccaaaacaacaacaataacaatcatcagcatcataatcatcatcagtttcagattgggagttccaagtatttgagtccagctcaagagctactgagtgagttttgcagtcttggagtaaaggaaagcgatgaagaagtgatgatgatgaagcataagaagaagcaaaagggtaaacaacaagaagagtgggacacaagtcaccacagcaacaatgatcaacatgaccaatctgcgactacttcttcaaagaaacatgttccaccacttcactctcttgagttcatggaacttcagaaaagaaaagccaagttgctctccatgctcgaagaggtatatatattttcaagaaattatttcattactactatcaaaacttacatgagtttcttagaaaatctaatccttttttatttggtttcaacttattcctaaaaatgtaaaatcccacaagtcttttacaaatcttttttttt

SEQ ID NO: 12303 - DNA, 507 bp, Arabidopsis thaliana
tgaccaaataaataacagtcaaaaagtttacaaaagaagtaaaataaataaataaacgcaaacctcaaaaaaaacaaaaaacaaaatccaaatataaatatactccttttgctcatttctccttccgacaaaaccaacataaaacacaacccaaaaatggagttactaacgacggtcgcgagctttttcactccgacgactcttttcctccttcttaatcttatgatcggtacaatcgtcgtaacctctcgactcgggtcaggttcaagaaaacattaccagcatcacgatggattcgggtcaggtcatgctccggctccgttagctagagctccatcgattatcgaccgagtcaagtccatcaattttcatctctacaaatttcctcatccagaaactgagcttttctcgatgacagctcaccacgacataatcgggtcggatcttcatgtttaccggatccaaatccggctccgttacaacgtgctccttctcttttggatcggg

SEQ ID NO: 12304 - DNA, 590 bp, Arabidopsis thaliana
acttcaacgagatctgtttaaagcgaatgaaagacatggttagcactgtaagaactagtcgaaagaaacctaaatggatcgagaaaactctatggaaggaaatgactgcgtactgggacactaaagaagctcaggaaagaagtcaaatctattcaaatgcccgtatgtctgaccgtaacggtctagttcctcacatacacttctcagggtctaagtcatatcatcaaatccgagacgaattggtaagtcttctctctgtttactcctttgcaactttaactcgatgtttcaatgtacttttctatgacttgtttttttttcattacaggaagagcaattgggcaaaactgtcagtattggtgacgttttcatcaaaacacatacaaaacctgatgggacgtatgttgatcgaaaggcagagaagattgcagagttatatcagaaacttttgtagctgaggcagtctgagcgcgaggctgaagcttctgctatttcagatggcacttcacgggcacgggagctcacagctgaggaatgtcaaccatatttctttaggtacattgtatgttcccaatttagtgtttttgagt

SEQ ID NO: 12305 - DNA, 609 bp, Arabidopsis thaliana
  unsure (1)..(609): unsure at all n locations
tggaaatgcaagtggtcactacgggcagcaagaatggaagaacacggacttgttgagataaccaaatatactggcccacatacttgtagtcatgagtatccaaatgattttgagtcagagtttgcagcagatgagattgaacgtgttgtcaggatacagcccacactctcaattgcagagttgaagaaatggtggaaagaaaaaactggctatgagcttcaaacttccaagatgcgggatgggaaactggaagtaatcaaaagagtatttggagatgaggatcaaagtttcagagtcatgcccaagttaatatctgcatttcactcatctaatgggcttctcgtggactggcaatatgatctttttcctaatcctgattttgcatccttccgtggcgtgttttggtcattttcacagtctatcgaagggtttcaacactgtagacctttgatcgtcgtggacactaaaagtttgaacggtaagtaccaattgaaactgatgattgcccaggagtagatgcagccacaaatttttccccttgcctttgcggttactanagaagtgtctactgatagttggcgttggttttcactanaacagagagaaggt

SEQ ID NO: 12306 - DNA, 541 bp, Arabidopsis thaliana columbia
atatttgtagcctctagtatcttgcataatgatctttgtaacccaatcaggaacaatatttgactaaagatgtctttgtaccccaatcaggattcatacttaagtagctacttacgttaatgagctggaaactatgaaggctgtagtattatcccccaatgatggcttgtgttatggcagaaaagttttgtgtgggtgttctgagagttggcttcttattttcatttatgcaggaactgagaatggggaaggaaatcatgctacaaatgagcaaatggcagagtccagtacttctccgcctcttgtgacagttcctgcttcatcatatagcaaagagagtgcagtcgtatggggatcttctcctgaccacctggaagtgccgatgaaagcataccatcaacattcgacctgctcagattctccttgcgtatctgaatccggctcagacatcttcagcaagcgagaagtaatacagaaactgaggcaacagctgaagagacgtgacgacatgatagttgaaatgcaggaacagattctagag

SEQ ID NO: 12307 - DNA, 496 bp, Arabidopsis thaliana
tagtaacgtccgccagtgtgctctaaaggccgtgcagtctgggcatcggtcgtcggtttaccagacaacgagctgatgctgcgtgacgtttgcgcaccgaaattacaacaacttggcgatatcgtcgacgaaatgatggctaaacgccgctaagatgaggataaaaggaatgaaatggtttaacaccctaagccacaaccgttggctggaacaggaaaccgaccgcatctttgattttggtaaaaattccgtagtgccgactggttttggctggttaggcaataaagggcaaatcaaagaagagatgggcacccatctgtggatcaccgctcgtatgttgcacgtttattccgttgctgcggcgatgggtcgacctggcgcttactcgttggttgatcacggtatcaaagccatgaacggcgcactgcgtgataaaaaatatggcggctggtatgctgcgtgaatgacgagggcgtggtggatgcgtcaaacaggg

SEQ ID NO: 12308 - DNA, 546 bp, Arabidopsis thaliana
tagtaacgtccgccagtgtgctctaaagtaggaggtcgtattgcccttgccaaagtagtttgtggtgatttggttgtcaaatgtgctgatttgctcctaggcacaccaaattagcatcatctcatcgccggtccatgtacctcatggtgacttgtactcgaactcgagaaggggagaaatacccagtcaatctcatccaggtcatcactttccaagatcgcagtactgatgattcctgtcccattagcagcggcatcttgacctcgacatagccgaaaaagatgtagaattctgtctcgatggtcggggcatctccctgctcgtttatcgtaaatgcagcgccgagcgagagtgctcggtacagtgccagacgtcacgttccagccgtcaaaggccgagtcgccggacgtgaagtcggtcgtgaagctccattgcgcgaggccggtatctgctggacaggtctctacgtatcgacaatcatttgtaagtacagtccagtgctggtgttgagggggcccatacctctgttgggtcaaatcagtatat

SEQ ID NO: 12309 - DNA, 1395 bp, Arabidopsis thaliana
agtcgactcccataagttattcggaaaaaaatataaaaaaatcaattagggccgacggaagaaagcccgtgaatatttgtagcttgttttacaactgaaaccagattaatcctacttccctaaagtcataagatgcccggctcggtgcaaactcaaatccatctttcagctcttcttcttagtagcgagaggagtagttctgcatctggtacctgatacgtaagttggaggtgatggaggtggtgacggtggaatgacaggaggaagcaatctcggaactccagaagcttccggccaagctgacatttccggaacatgagagaaaatggtggcgtaagttctctttaaccgttcaagagtgtaacagtcgtctacatactgtaaagggttgaatttcaagttcttgcagacggctagagcgtgtagacatgggaatttgtaacgctgaaaatccccgcatgtgcagctgcagtcgctcagctgaacaatacattcacccttatctaacgctgttgcaacctgaaaggcgttattgtctaagggcgttacaatgtaactgtaagtaacgaaagttgtcctgaattcttcaagcttgtccatgacaggctcggtgtacacatcgccgcagttaagagaacttcggctacaactaaaagacttgtcaaacttggatctcagttcatcaaatagaagaagcacggaacctgtcactacatgaccagcctgctcaaatgcgttacaaactgcaaacaaagcttttgtatttatctccatgattccatatctccgaccattgtcatgagccagagcccaccgattttgagggaattggtctaaccatttccgagcttctgggttcttctctttgatgtcattcatgtaggaaacaaactcatccttctgactcgtggacccagcccgcctaatgcgagcccccaggcagaagcttggaaaaacacgagagaattgggagtaaaaatgattcagactgaacctgtgataagcccaaggttcttgccactgagacccagattcgttgacaacagcaattatgtcggggtggggactggaaatgaggcaaaggcctttcctttgtgtaaccttctctctgattccagtgagaaaccaacgccaaatatcagtagaaacttctttagtaaccgcaaaggcaagtggaaaatatttgttggctgcatcaactcctgaggcaatcatcaatttcaattggtactcacagttcaagtttttggtatccactacgatcagaggtctacagtgttgaaacccttctatagactgtgggaacgcccaaaacacaccacagaaggatgcaaaattaggattaggaaaaagatcatacttccagccacaaggagtccattagatgacaaaggg

SEQ ID NO: 12310 - DNA, 943 bp, Arabidopsis thaliana
agcttcaaacttcggacgtgcgtatcgcgaagaatgaagctatcaaaagagtctttggagattgcgatcagagttttgaagatttgcccaagttaatggctgccattcattcatctaatggactcctcgtggactggaagtatgatctttttcctaatcctaaatttgcatccttccgtggtgtgttttgggcattttcacagtctatcgaagggttccatcactgtagacctctaatcatagtggacaccaaaaatttgaactgtaagtaccaatggaagttgatgatcgcctctgcggttgatgcagcagacaatttttttctgcttgcctttgcgtttactacagaactttctactgatagttggcgttggtttctctctggaatcagagagagggtaacacaaaggaagggcctttgcctcatttccagtcccgaccccgacttacttgctgttattaacgaatccggatctcagtggcaagaaccctgggcttataacagattctgtctgcgtcatctgctctctcaattcagtggcatttttcgagactactatctggaggatcttgtgaagcgggctggatccacgagtcagaaggaagaatttgattcctacatgaaggacattgaaaagaagaactcagaagctcggaaatggttagaccaattccctcaaaatcagtgggctctggctcatgacaatgggcggagatatggaatcatggagatagagacaacaactctgtttgaagattttaatgtctctcatttggataatcatgtattgacaggttatgtgctgcgtctgtttgatgagctgagacactcgtttgatgagtttttttgttttagccgtggttctcgtaaatgcggcaatgtgtacctgaaccagcacggaaaagcttgcagagtcaaggaaagattcagttacttatgatg

SEQ ID NO: 12311 - DNA, 591 bp, Arabidopsis thaliana
ctctagtaacgtgcgccagtgtgctctaaagaacgaaggcaaatttttatcactgaaaaccggtttacctttcggcagggtgacgatttccggcaattcgccaatgccatacagcatgaacatcagttctgcgagtaaacctctggacgccagaaaacggctttgacgatgagggggaatgtttcgggcttcttgatgacactgggatgggagacgaacagaaatcagatgtccttccgttaaaatccctcgggcaaagtgagtcgccatttttcgctccatgcttaatggtccattatgaatacaagagtaatcatttactggaatgatggacagactaaagcggctaaaagttcgattcagacaagcttattacaacttttttacattttattgtgaaattgggtcgcgtttcatacgattcggttatgccatcgacgcgtaaaggtttttagtggtttcgcgtaaccagacgatcttcggattatggctgttccgtttatgccacagcagggtaaaaggaacttccagctttttttgctgtctttcgtcaaacgggagaggaagagcaccaacggcagttgatggagt

SEQ ID NO: 12312 - DNA, 542 bp, Arabidopsis thaliana
tggagtatttacctcctcttaggttactacattgggatcgctacccaagaaaaagtcttcctacaaaatttcagccggaacgtctcttggaactccatatgccacacagcaatctcgagaagctctggggaggaatccaggttggtatttgatattctttcttgttcttctagtgattcaaactaaataagatattttctcatttgttgtgtttaacatgcagccccttcctaatatcaagagcatagatctgagcttttccattagattgaaagaaatcccaaatctttcgaatgctactaatctcgagacattgaaccttactcactgcaaaactttggtggaacttccctcctctatttcgaatctacacaaactgaaaaagctgaagatgtcagggtgcgaaaagctacgagttattcccaccaacatcaacttagcatctcttgaggtagtcagaatgaattattgctcgcgattgcgacgttttccagatatctcaagtaacatcaagactcttagtgtcggaaatacaaagatag

SEQ ID NO: 12313 - DNA, 406 bp, Arabidopsis thaliana columbia
cagctccccaatctttagccggaatttggtcgatttcatgaaatatccgaacttctggttcgggatgctcatttggttcgaggatgtcttcgtcaacccatgttttggtctcggcttcaacagtgttttctggaactatatcttctattggttcgatattttcctcgaccctattttcttctcgcacggttggcttaggtacggatgccccttttgattttcgatttttgacaggtggtagttcaatcgcaggttcaccgcgatcccgggctgcagctcgagaccttgtaatgacgagtgtttctttttcttccttaatgcttctcgtcgaaatgcattctaccggaatgattctctttactttggggtctgacgttgacgccagagctgcaagtgcgtctgcggt

SEQ ID NO: 12314 - DNA, 957 bp, Arabidopsis thaliana
tgataagttacctcctcttggagaggcaagggagatactgacgtttgccaaggcacagacactcaagcgtgcccccaatatgaaacaccctttaatgtgccttgacgctattgaagtaggtattgtttctggtccaagggctggtttagaaaaggtatgatacctatctttcttcgcttcatagtatgtcagttctttaaccttttctccccgactaatgatcaatatgaatttccaccacattgttacttacaggaagctgaagtcgcctcacaagtggtaaaactggataccaccaaaggcttgatccacgtcttcttttctcagcgaggaactgctaaggtctgtgagtctttatgcagtcatataatttggacttatgtgccactaaacctctggctttttctttttctttacaaggatttaactagttgcatgaaagctttccctctaatctattgtatggacaggttcctggagttactgatcgtgggttggtgccaaggaagattaagaaggtagccataattggaggcgggttgatgggatctggaatagctactgcgttgatcctaagtaactatccagtgattctcaaggaggtaaatgagaaattcctggaggctggaattggcagagttaaaggtgagggtggagttccatacattgcataccaatgaattgcaatagcttgatctgactaatttcataattggatcagctaatctccagagccgtgtaaggaagggaagcatgtctcaggaaaagtttgagaaaaccatgtctctccttaagggttctcttgattatgaaagctttagagatgtggacatggtcattgaggtaaggatgaacataacaagctgaagtgttgtttttttattgggtacatgatctaagtgaattgatttcttatgatgtctttttggtggcttgacaggcgtgtattgagaatat

SEQ ID NO: 12315 - DNA, 1516 bp, Arabidopsis thaliana
ccaccagacacaaaaggatatatagactctgtagtgcgactaatttcgacacctttgcttcttagaaaacaatttatcttattaaatgcgaaattcttgattggcgaaagcaggagcaagccttaaatcttgagaacgtagaataagcctcctcacaacctggagccagggagatggttatcaagttccctatagtttggtgagtgaactctgcagggatttctttacctggcaagcatatagacttgttacccgattgttgtatgattcctctttttgattccttatccagtttcagacagttgtagaacatcaatttcgagattggtccgtggaaagagcagcatacgctcttgagtgatatacagtggtctgcaaatagggtcaccagcgaaggggaatgaccctgaattgacaccagtttgtgcacgttttcgacgagaagagatactagatgcggaagacctatgacgcaatctgggatcatctttatatcactgttgcgtaggtctagatgtgttacactctctgggacatgtgttaatctcttgaggcttctgctgcctatctgaagaaaatcaagacgacaccagtgtccaacaatggatgcaggaaattctttaatcattgtgcctgctacatagagacgcttaatgttactagatatatctggaaaacttctcagacgtgagcaattactcatgttgacttcctcaagagatgctaagttgatgttggtgggaataacttgtagcttaatgcatcctgacgcatacagcatttccagtttctgtagattccaaatagaggatggaatctccaccaaactctcacaaccggtaagcgtcaacgtcttgaggttagtggctttcgaaagatttgggatttctttcaaattagaggaatatcccaaatttattttctttagatttgtgaggggctgcatgtcaaacacacaaaaaaatgaggaatatcatactaaggttaaatatcattggtaaacaaacgtattcacaatcacaagtatcaaataccaacctggattcctccccatagcttctccaacttgctgaatcccatatagagttcgacgagacattctggcttaaatgtcagaggaagactttttctcgggtatgaaccccaataaagtaaccttagacgaggtagatattccatgtcctctaacaagctaacacttccattatagaaatttaagaatttgagattacgcattctattaaaggctcgcttgcttatagataacgtctcgatcttcgaaatgtcaaacgatatacctatgacggattcagtaccctacaaaatattgcaaaagaagactgatgacactgttatcacaaacaaaattaggcaatatccagggtatatagattagaacttactgtttcatttgccaagacatcgcgaatctctttggcctctactaaaaactgacgttccccgggtcaccctgttgaacacaacttgtgacccaattgttgtagtagacagtgca

SEQ ID NO: 12316 - DNA, 556 bp, Arabidopsis thaliana
gaccacatggtcgaagtatttgcaataattggaccaacttactcgaccacacccagtgtcgggcaacagactctgcattcgagtacaattgtctcatttcctgcctgttactcgaccacatcgtgcctctagcatcagctagttgtggtcgagtgattttagtaattctgatactatttgttttttctgcatgttcgcttacggctgttagaaacctcaaaaccgttattgcttggcttgacttagtgacttctgatcacatctcatctttttgcatcacacataattggattgacacctaaaatactacaacgacatgattggtgttttaggataattgactaaaaacctaatatcagcatgggcggtcactaacaccaagaagagcgtcgaaggaacgttgtgtatgggtgggctgatacacccatattactggctttgtggagtgccctagagttggaggaaaccctcctaagtggatcgacatcaaacactttaggtagacattctcactggattgggagatgattgatgaaaggtacgcctggaagtttga

SEQ ID NO: 12317 - DNA, 738 bp, Arabidopsis thaliana
gattatgcatcccttcaaagactcgtttccttatagagaactccccgatcttggacatatcaaatgatataccaatgatagatccagtaccctaccaaatattgcaaaacaaaaccgatgaaactgttatcacaaacagaaagtagggaatatcaagggagtatatatataggtaagaacttactgtttcatttgccaacacatcacgaatctctttggcctctactaaaaactgacgtttccccggctcaccagactgttgaacaactacttgtctacccaactgttgtagtaggcagtgcatccttaccagcccatgagtagatatatgcacaagagacttagcggctaaggtcttcaacccattttcgacatccaaagtactgtcagcgagcatggttgacacataatcaacactttcatggttgaaaaagcatgcaatatgaagaaacagagattgatgtttctccaataatttgtcataccccactctcaagacatgctcaatttttctatcaagattagtttctatcccatacaattgaagcctccactcatcctcgctctccccataaaaagaagaacccacaacacgaagagccaatggaagattaccgcaaagctctactacttttcttgcaagctcttcgaaaccatcttgtggagaactttgtttgaaagcagaaagacaaaatatctcaagagcttttttttgggacggataatcccatggtagat

SEQ ID NO: 12318 - DNA, 863 bp, Arabidopsis thaliana columbia
catgaacaagtcattggagcccacttaaactctacttttctattcttcttctttctttttgttattctatatattagttagcaacttccacgttgtagcgatggaaggatccaagctacttccttgcgtccataagtctccggttcccacctcccaccaattatatataaattatgagattttgggtttaacaaaactcaaaaaacacaaatacacccaaaacaagatgagctcctctgactcttcttccgccgaatcccgtctagccacggctaagacggttctcaccaccgcggcttcggtggctgcgaccgcaatgctagctcgatctttagtccaagattatttgcctgacgaggtgcatcactacatttcctatggattccgttccatctttggttacttctcatcccaaatgacgataatcatcgaagaatttgaaggttttgctcacaatgaagtctttgaagctgcagaggcctatctagccaccaagatctctccttctaacaaaagaatcaaagtgagtaaacatgagaaagaaaacaactacaatgtcaccgtggagcgtgacgaagaagttgttgacacctacaatggcgtcaaattccagtggatcctccatgtctgtcatgtcgatgccaagcacttccacaacccacgggatctaaactccacactgagatctgaggtccgatcattcgaactcaacttccacaagaaattcaaagacgtagctcttgaatcttacttgccattcatggtgaaaagagccacgttgatgaagcaagagaagaaaacactcaagatcttcactctctcccctagaaaacatgtatgggaactactctgacgcgtggacc

SEQ ID NO: 12319 - DNA, 550 bp, Arabidopsis thaliana
  unsure (1)..(550): unsure at all n locations
tagtaacgtccgccagtgtgctctaaagtcaggtcacttttacccctgcaagcgggaatatttatcagcattaccttaatgaatataaagctaagccagtaattcacaacaaagattggcgattcaagcggtttgccgtagaattaccgccctcattaagagtcaccaaggtggttaaccacaaaccccgcatcggtaagccatccgttgcgttcacatgggacagagtaaaaaattgaataaacaaccgagttcgctttcaccgctggtgcaattggcgggaattcgcaaatgctttgatggtaaagaggtcattccccagctggatctgactatcaacaatggcgagttcctcacgctgcttggcccttctggctgcggtaaaacaaccgttcttcgcctgattgcaggtctggaaactgttgattccggacgcatcatgctggataacgaggacatcacccacgttccggcggaaaaccgctatgtgaacactgttttccaaagctactttagagnnnnnnnnnnnnnnnnnnnnnnnnnnnnnnnn

SEQ ID NO: 12320 - DNA, 558 bp, Arabidopsis thaliana
cataaaagtcttctaactgaaataataacaagtcaatgactatacatgcaacaaaccactctatggaaacaatgaatttatcatgacatgttttattatcaatttcgggctgtaataaatattacaacgacatgatgagcttcaaatagtgtaatgcatgaacagtcaaatcatatacaagaaattctgaggaagtaatccaaagcttacataattttcccaccaccatacgtctacatttctccaccaccagcatactactttccttctccaaagtttgaatacaagtctccaccaccaccatacgtctacaagtctccaccatcacagtactatgatcttcctccaaagtttcaatacaagttttcaacaccaccatatctctacagcttcccatcatcaccatacgtctagagttcctcacctccacctaagaaatctccttctccaaaggttaaatacaagccgtccacaccactatacatctacaactccccacatccaccatactactctctttctccaaagtttgactacaagtctccacaccactataca

SEQ ID NO: 12321 - DNA, 561 bp, Arabidopsis thaliana
  unsure (1)..(561): unsure at all n locations
tagtaacggtccgccagtgtgctctaaaggtgagattggaatacaatttcgcgccttttgtttttatgggccttgccgtaaaacgattttttatatcacggggagcctctcagaggcgttattacccaacttgaggaatttataatggctaagaaagtacaagcctatgtcaagctgcaggttgcagctggtatggctaacccgagtccgccagtaggtccggctctgggtcagcagggcgtaaacatcatggaattctgcaaagcgttcaacgcaaaaactgattccatcgaaaaaggtctgccgattccggtagtaatcaccgtttacgctgaccgttctttcactttcgttaccaagaccccgccggcagcagttctgctgaaaaaagcggctggtatcaagtctggttccggtaagccgaacaaagacaaagtgggtaaaatttcccgcgctcagctgcaggaaatcgcgcagaccaaagctgccgacatgactggtgccgacattgctttagagnnnnnnnnnnnnnnnnnnnnnnnnnnnnnnnnnnnnnnnnnn

SEQ ID NO: 12322 - DNA, 415 bp, Arabidopsis thaliana
tatctggaggaagaaaaacaagaactagttgaagttgtagccgactaaatgttgtcttccctgtaccattctccccaagcattacaataatctgagagtcagtgaattcaccttccgacactctcaacctgaagtttccttgagttttggtcatcgtggggtatttgtacctagcgtacgactgtatctcttcagcactttcttgtggagtctcagcaaccttcaaacaaaagaaaaacattgaggaaaacaatttattgccttggcgacaaaactttgcctttcatcatacaaaatatctataccttgaaggtcaaagattcatctctaaaacgtaaattttctgtaggaacaaatccagccaagaaaatgttgattccttctctgacagagaaggggagagtcacacaccata

SEQ ID NO: 12323 - DNA, 534 bp, Arabidopsis thaliana columbia
tttgattattcaaagacgtttagctgttggtaattcttgagatattaatatcttaggattcgtacaatatctttggtgatagagtttataacctatattttagggatttatgtttatcagagatcattgtatataaataccaatagtttgtgaatcaataaaatcaacagagttttgatatcttattctacactagactaaacacgtgagatacacattaacgtaatctttttgcctagctagaatataatcagattggtatgtgttgaagttgtgttagtaaaatcaatgaatcatgctagaaaagaaaccttgcatacgtaaaaaaagttcacacaaagagtgatcaatgccattcttctttagactcatatttaaaggattggaagaaaaccacattcttgattatcaaatggccatcactctactaccattacgtattcgtgcctcccttcttatcattatattcgctctcacttgttcaaaggaatgcacctcgcatctccgacttacgctaagaaccaaaacccaaga

SEQ ID NO: 12324 - DNA, 520 bp, Arabidopsis thaliana
  unsure (1)..(520): unsure at all n locations
cgaagacttggtcgcctcattcttcctctagaaatgagcgggaggtccgaagtagagctggagtcaggaggaactgaacaaacaaagcacgatatttgttattttgtagctcgatcgcgcaatgactcatacacaaaaaaaaagatgaaactcgtacttataggcaggtctgcctcaaggtttggttcaatccgcaggacctcttcgatcggatcctgatgtgttgctggaaggacaattgcgggaactgctggagctacagcaagagcagctacgatgctatctctgctaaaagtggcccagtcggtctgaccaagtcggagaagggttaacagctcgagttccgtctctgagagagtaacctccttggttcttgccgcaagccatcaaaagaaaaataacgttagtaacgatactaactctcaacaaggtcgttgtttgtcatcagcgtgcctcccttttgcttgggagctttctcnatctttggcttgtcggctctggtcgacggcggacggattgg

SEQ ID NO: 12325 - DNA, 524 bp, Arabidopsis thaliana
gatgcattgcttttctttttaggttaatgccagtggtttgttctgtggcatggctgagatgactggtccagtttcttttgataaagacatggatttttggcagcaagacaaatggagtggaagctttcccgtcaaatggcacatcataaaagatgttcccaatagctatttcaggcacatcatactacagaacaatgagaataagccggtcaccaacagtcgagacacacaagaggttaattttcctactagaccacgctttgaagattttcacattcagaatttgctaatatatcattttcttctgcagataatgctgaaacaaggtctggaagtgctaaaaatatttaaagatcatatggaaaggacttcattgctagatgattttgtgtactacgaaagccgacagagagtcatgcaggatgagagaaccaggctgccgtacaggacctttcttaacgatttaccattacccaggccagatctctctgatagaaacaagaaaacccccttggaatccttca

SEQ ID NO: 12326 - DNA, 526 bp, Arabidopsis thaliana
aacagactatattggattgaaaacagaaaacagaaaactctaacttatgagaatctgcagaaacacttaccaattcatcttggatttcttgaaaagattttggcccagagtagtggacgtgacgaccgataccgttacggtcagagagacgggctttggaataggtccgactccttttctgtgctgcttctgtgtcccagtaagcacacattgttccccacagcgtttctccaatccatggaggctgctctcgagttgtccttgcggtgctaaccatgtccttcaagcgcctcttgacaatctcattgaagtaatactggactgtccctgttattaagggatccactggtgagttttctacaaaaaaaaggaagaagttagtaaaactacagaaacttaacttgaacaagagcacatatagaggaagcttaccgcaaactctaaaaataatctttctcttttatcaactggcacacatgaccagttatagaagggagcatcgaatttttgtaaaaaaattctagtg

SEQ ID NO: 12327 - DNA, 544 bp, Arabidopsis thaliana
  unsure (1)..(544): unsure at all n locations
tagtaacatccgccagtgtgctttaaagcataaatacccgtccttgtaattagtgtgaatattcttctgtaatttcagccagatccaatgcgttatctaccagcgaggttatctcaagcaggatatcttcaagagaagatttaagcgataacgccccgaaaacaatgtaatactcttcctgttgtacgctggagatccctaccgatgacaacggcatcatcttctgatttcttaataagaaggtattaaattcatctggattgctgatactactcaccggacaaataaaggtttcgataatcatttggcgggaagtaaaaagaatattgatttgcaaatcgccataatcattcattttaataattaatgcgttctcgctatttgttacatcaatattttgttcaggtacagtttgcagcgccgtcgctagcgccaacggattccatgtcatatattattccatatagattaagtttaactttagagnnnnnnnnnnnnnnnnnnnnnnnnnnnnnnnnnnnnnnnnnnnnnnnnnnnnnnnnnn

SEQ ID NO: 12328 - DNA, 578 bp, Arabidopsis thaliana columbia
cctgtccaaattggatgaaaatagtttctcaaagtttctcttccgagaaacttaactctccttctctcctactttttctcacctctctcatactttttcttttttaattattttttttttgttgggtatctcattgagatacttccaatggagatcaagtttaaataaagaaaagggtcaagaaacctgtaattaattcaaagtttattcaaagtaaatattgttttctaaatgggtgtagttagaacatacagtatatatatacatcacactctcattctatctttcttctctttacataatttcttgaaacgcaagaaaaaaacacgatcattctatctcttttgctgtgctctagatttaatgtcagattctgcagagatgcaacagccggagttactgctgaaatccatgaataaattgaatgggtatcaccacaactaatcattccaaagaagactctcttcaagtgtgatctcgatgacaaacagtcacgactccaagtttcttccatgcatatggaaaattcaggctgcttaacggaagatgacaacgaaccatagaggcacaatagatga

SEQ ID NO: 12329 - DNA, 608 bp, Arabidopsis thaliana columbia
  unsure (1)..(608): unsure at all n locations
tttgaaactctctctttcatcatctcattttcacaaactctatatctctcacaaagcttcaaaattttcaccccaagctctccctatcactcttcaagaattcgttctccccttcaccaatacttcaccaaagtcactgatcactccaaagtttatcctcaagcattcaatcggtataaaactcaaaatttcatcactaaagaaaccaattcccttccactttggtaccgcttcgagagttgttcttgtttgccctgttgaaccttaccaccaatctctatggattcaagaagaaagagttcatctcgagctagaagatcgttcgttgataacgaagaggttgaggcgtttgacatgagtggcatgactgaacgccaaactcgccaagctcgccgtactcaaagatcaagcttgattcaaggtggaagctcaagccgttcagccaggcaaaaagaagaagtagctcggggaaagagggtcgttgaggctgaagaagaacaccatgaagaggcaacctttgaaaaagtggttactgaggaagaggttgagatcatcggggatgatcnaccagccatgttgggagaagaaacagccaaggaggaagagag

SEQ ID NO: 12330 - DNA, 491 bp, Arabidopsis thaliana
  unsure (1)..(491): unsure at all n locations
tccagtttcaggaatatagtgatgcatgcggagaggtttaaaagaattgatttggccacctatgtcaccaaagtgcacttatcttttcggtcaaacgtctttagagaactccacagttaagcgtgtttgcgctggattagtttcaggatggttgaccttctaggaagtgattgtcggaaccatgcaggtgaggacaaagcatggaaaaaaatcatgtggtgatttgtggggtcgttaacaagcctttaaagcctcctagacacggcgcaccgaccgtctgacaggggtgggcccatgggcctgagagagaacgtgaggcccactgttaagggcggtcgaggcgttacaaaatcagaacgaaaatcccaacaattgtaattaatattgacataatagaaggaagtgaatcgataaagtaaccgaactcaaaaaaaaattattatctatggtccaaaccatacattttgatgaatgtaacttaganaaatttg

SEQ ID NO: 12331 - DNA, 1146 bp, Arabidopsis thaliana
gcttaggaaatggattcctcaacgatgttgtctttgccaacaacttggtcaagttctagtcggatcttgttaacacttccggtctgctcacaatctctgccatggcgaattcggatgcgttaaccgatgtgtcgacaccaccaagaaccatatccatgaggagagacttgacatgagtcatggacagaggagctttctcatcatcatctttaactctaagtaagtattgcaagaaatcttcttcttcttcgctcttctttcccaccattttgacgtgactctccataactctatcgaacaagagatcaagcttcttcacatggcctttcatctgcttaaccaatccttggaaatcgaatcttgagaacaacggaaagaaatctgagtagttttgaatcccttctatgtcggagatatcagatattagggttttgagctcgtttcctaagctcgttctctcgtctccttcaacagtggcgccccacatcattcttgtcacgacgttgaaaatggaaagaaatatttgctctccgaggttgactggtgatccttcacgagccatttccgacatgtggacaatggtttgtcgggtttcttcccggcgagtggagtaggaagcttcgagagttggggtagtgaacatcttcatgacgcagagcttacgaagtctcctccaatgggtaccgtaaggagaccagaggatgtcttcaccaccgtaagtgttgatctttccgacttcagggagatcgtggttggcgaaagtgatgtcgtgggttttgagaacctcgcgagccatgtcaggggaagagacgacgatcgcaagtttggaaccgaggtggatcttcatgagagggccatgttttagggttagggcttggaattgcgtgtggaggacgtcagagtttaggaacgggaggtttccgacgatcggaagtggccaaggtcccggaggcaacggtggtccgttcttggatttggacttcccctgtatccagaaatagcatacaacggccaagagagcggcgacaccgagcattacggagctgtagggttcctcaatattgaggatctgcgagagagagaaattagaagacgccgtttccatctttggcttcagagagaaatatctcactgtgttctgattat

SEQ ID NO: 12332 - DNA, 892 bp, Arabidopsis thaliana
tctagaggataggatccccacatttttttttagattcacaaagatagttacaaagattatttttagctaattctcctgaaattaaactttacaaactaattgtttttcaatattgattccaaaaaatatagaacctttggttataagactcaaaagattaattagtacattcataaattttcttgttatttgcacccctccaaattcacactgaaaactaagtaatataatgagagaaagaaatttaactttttgaacgcaaacaatactttatgattaacttgaagatacataacgaaaatgatggatgatgtagctatggtgggataactaaacaacgtgaaaaagaagcattatttacaaagtcgattgaaagagaaaaacagttaaacataattttgtgtgggaaaaaaaagacaaatatagtttggtttcgtatataacaagaaacaatctatagtccccgggacggagctggaggaggcggagacttattgtcgttctgcatcatcacttggagaatggaagccacagtctgaattaaagtcaacacaaggagaacgactgcggcaatggtggcagtaccggtccaaagatctttgaaataaactcgccgaagagtgccgacagatctgttgagacgattgtcgtagtgtttgttgaggttttcgactatatcgctatagtgagatccgaaatccacgagccctaaacatagcttgtttaccatttctgtcactgatccttgatgtcctaaccagttctttacaattcctttcaacgtaaaatttgttacaaatcttagaattgagagaagaagaaaaaaaaacgtcggtaacttataatatgaataatcaacttggtacctttcttggcgagcaagtcaacgtct

SEQ ID NO: 12333 - DNA, 412 bp, Arabidopsis thaliana
gaaaggtagccgctaaagaagaagacactggcatagtctcctccatctagcataagagcggttttggacttgttaatgcctagtccagacccaagcttaaacgcctccagaatgttgagaatccctgcaactgggctcatggacccatcaaagaaaaccaaaacgtcgtctacaaaactgagatgagtaataaagggagccacacacctggggtgaagattgaataggccattgatagcacccctatcgcagtaatttagcaagaatatccattacaagcacgaacaggtgagatgacattgtgatctccctgtctaataacatttttactacaagaaaacagacaaataacgactacaaaaagcgacaacagatgtcgtcgtcatttttggcgactacttgacgacagtgt

SEQ ID NO: 12334 - DNA, 647 bp, Arabidopsis thaliana
  unsure (1)..(647): unsure at all n locations
ttctgcaatctccttgaattgttgatgtaatctgcccacagtggtttcaaattaagtgattggtcgttgagtaccaaatccacatcagaatcatatggagcgagacaaagatgaataacaaggatcagaaaatcaagaaatatatgacattttgatttcaagttcttatggaaaatggcacaaaaataaataaaaaaaggtaaaaactcaaagagtttgagaatcaagagtgaaacaaaaagaaagcaagtagagatgctcactatatgaaactctctaaaaccttataatcattcgaggatcgtcccaataactccagcaccaacagtctttcctccttctctgatagcaaacctcatcccttgttcacaagccaccggcacaataagctcaacaacaatcttcactcgatcaccgggcataaccatcttcgactcttcatctttgtcgttcatgatcttcgtcactttacccgtaacatcagtcgtcctcatgtagaactgaggcctgtaccctgcaaagaatggagaatgccttccaccttcctctttcttcaacacatagataattgcttcaaacttggtatgtggagtaatcgatcccggcttagctanaaccatacctctctgaatatcagcgttttgaat

SEQ ID NO: 12335 - DNA, 752 bp, Arabidopsis thaliana
actctagagtgacaagaattttatagcttatggtatcgactttggacaccaaaataatgcgttattatatattgtgactaaaactttattttattatatataagaaaataaaaaataacttgacacatctttttttacaaagcatcaaactccaaacacgaataaagaaaaataaaactttaaacaagaaaactcaattcaacttcctctcataagctcaaaccaaatttccttcttaactacttaagctgtgtagagttttggatcggacaaccttggaacaggaatagccacaagtggagacttcaacttaagaacaagaccaaacttctcttcaacctcaaacttctgtccttgaggagctttccaatcaaaagagtgaagaagtgaagcaatgttgaacagaacaagtctctcagccatgtttatcgccgcacaaatcctccttcctgacccaaaaggcaaatacttaaaatcacctccattgaaatcaagcgaattctccaaaaacctctcaggtttgaactcgtttggttcatcccaattcttaggatctctatgaatcgcccaaacgttgatgaaaatcttggagtctttaggcacagtgtatcccgcaaccaccgaggtttcgctgtttctgtgaggaacaagaagaggaagcgtagggtgaagcctaagagtctctttcataaccgcttgtaggtaaggaagcttaggtaaatgtgatcctcaacgatgttgtctttgcaaca

SEQ ID NO: 12336 - DNA, 513 bp, Arabidopsis thaliana
tcaaaggagcgggcaaagatattgtattactaaggagagatttaatatctctgctgtattccattacgtactcccacctgattaaaattacgacaatccagaattgctcaaacacgctttagaagtctaatcataagataatccaaaacagtatttcagtattgaatgggcaaaatctgggaatttacaaagaagatactcaccacgcagtctgatacagagaggaactcatatccatcttagacaaactggaaattgagtttcttctgctctgcaaaagcgcgaacggagataccgatccataagcgatccttcgccactgtgggtcactgatttcgccatcctcgccgctaagcctaacgtttacgaccttaccaccaacttctccgtcgtcatcatcgcgtaactctggattccttaaaaccgtgacgcgtaggttgtttcgcaacccaggagatggagacctgtgaacaggagacttgaggccatagcttagaggatcaacacaggagt

SEQ ID NO: 12337 - DNA, 986 bp, Arabidopsis thaliana
ctcgtgtcagctggtgaacgaagaagaggagggggaggaggaagaatccttacatcctctgggaaatttagctttgctttatttccacggaaccggagtgcagcctcgtcgtaggctctagccgcggcctccgctgtatcaaacgtcccgagccaaaccctagcggctctatgtggatcacgtatctcagctgcccatttgccccatggtctctgccttactcctctgtacctcctttttttctcccttgcttcctctggaaatgccttgctcatggattcttctgtacaaaatagcgattctttttatgatttgacgtgtaatttttttgttttaatcagacagaaacaattaaccaaattttatttcttgtctttgagatgttagagtccatgtttaagcaaataaattcgagaacaagaacacatatcaaaaataaaagctatagagacggttcacgaaatgtaacatctagactcaccgatcggattatgtgaagagtctacacgagcaaatgatgagggaataggagcagaatcgattccaagccatcctcttttatgtccagccgaagaggaagaagagtgagcaccttcagcctcagtctgagagtgagcaccttcagcctcagtctgagagcgagcagaaaccacctgtgtcaaggccgagaccatggcagacatctccgtgccaaacctattgaacctatcaaccacagggtcgtcttcaaaaatgtagatgtcatcaatcactgatttgataccctcaggctcattggccctggactcttcttgttctccttggtttgccaccttgagcagcgatgaataacaccaataaacaagtacttttcggaatgtggtctctctttagaggcttgactagtttatatatggaaataaagttgtcacacaaaccaaaagctatgtccgaatatatacatctaaattaattttaaccacaggagatctttcctagatagttca

SEQ ID NO: 12338 - DNA, 585 bp, Arabidopsis thaliana
ttccacacaccaaacttcctcaagtgttcgattccatcactcgatcgccgctgctttcgtctctttgccaccaccacctctcattcgtctccgtttcacttgagcgtcacattcgcttcactcgacttcaccacaagaacacctcgtgccgtttcgaaggctcactaggtcactccgacccacgtagttcaccaaaccgaaacaaagaagaagaagaagaaaaaatttggtacactcgaccggtttactctgttggattgtgtttttggttttgttggaactaacgtattaacgttaatttttgagttacatttgttttcaggtttcatcatgagtaactacagtggagaatcctcttcggaccctgattataatgtggatgaagctgagtcctggtccgctagaccgagagagcaacatgtttaccagagcttcagggatgaatttgaatgctctgcaactcgacgtaatcagagaagtgctgatatcgccagaggaaagagggcgatgtcgagtagatatgagctgattgatgaggacatcggaactgagtatgacaaagagcatggcgtaaggagacaaagc

SEQ ID NO: 12339 - DNA, 585 bp, Arabidopsis thaliana columbia
  unsure (1)..(585): unsure at all n locations
catgaagcatgaaacggctactttgctagaggcacgtgcagatcaggctgcacagcagtcggtttctacggtatgacaaggatcaaaatgaagatctccttgattctatgcgctattacattgaagctgccgaagttcacacttctattgatgctggaaacaaagcgcgaaaggcttgtggtcaggcttcccttgtctcccttcagataaggatgccagattccaagtggctctgtttatctgaaacaaacgcaagaagagcacttgtagatcaatcccgtttccaggaggctctgattgtagcagaagcttatggtcttaaccagccaagcgaatgggcgctggtgctttggaatctgatgctcaaacctgaactagcggaagattttgtggctgaatttgtagcggtgcttcccctacaggcttcaatgcttctggaactggctagattctacagagcggaaatggcagctaggggagaccagtctcagttctcagtctggctcacaggaggagggttacagctgagtgggcaaatatatgtggaggcattcaggtgtntgttgaaagacacgggatttgagg

SEQ ID NO: 12340 - DNA, 433 bp, Arabidopsis thaliana
tttcaaagattcacgggccagggttcgatccgaggaagacagacttagatcacttgcgtcgttgtgagtttctggagcacgacatggtcggcgatatctatcgctacaaattcgagcactcctttacccgaacagccaacattctgcatccctgcactaaggccacaacccccatgccagggcgaagacattatcatcaagcctgcgcgtgatgacctttactttgagagcgctccaccgactgatgacaatgtccctaaaccagaagctaaagaggatgagattgctgagacagatgaggatagggaggaggaggacgatacgagcatgtatcattacagtgagcatgtaccccgagcgagccgagaggatgcgcttgagcgacgtcacagaaacagcaacaagttgcagaagtggtgcaagaaacgagata

SEQ ID NO: 12341 - DNA, 519 bp, Arabidopsis thaliana
caacgagttgagcgcttttcgcaactctttgatcttcacaacatcctgagcgccttcagcagctccaagattgacctcgtctaccatattttgttttgaattatacacagttatgattttttttttaaagattttaattaactataattttactatgacaaaaaaactacgcggttaaaccaataattttgattcgattacggttaattaacggttagggtagtaactaatctattttcacggttaacggttactaatcgtttaatacggttacggtccaaaatacagttaccaatagtttttggtcatacctactattagtcatgtttaataaagcaggactttccttacgtattgtattatcattatccggtcgattttatgcgttaaagaacttgtacaacttttcatacattttttttgtgtgttacagttgtgtcagaatttaggtttagatactggaaatcttgtgttattgtaatattcatctttgtggctacacacatatatagatatata

SEQ ID NO: 12342 - DNA, 590 bp, Arabidopsis thaliana
tcaatttccggaaacttaacactatatagtttttattttaatttgtcaataatatattattggctttgaatacagataagtaatctatagttatattcacattatatattagagttaatgggaaacatagataggactatattcacctgttgtgggaaatcgccgttatccatttgtgaattgatcaacactttggcagcacgatgaaccggcaaaggatctctcttcatttgatttcccataattagaaccataagtgcttgtcctgtattcaccacatttgtcttgtttcctatcaacggaatatatttctttcttggacaagatagatagctctctccccagccaccctccgtgttttgagtgtcgagaatgaaacgaactgctctacgaattgcctcacagttattgtaacacttcccagcagccacaagacctcttacagcaaagaaggtaccatagatgaagcacactccccaatttccgtaccatgaaccatccaccatttgcaagcctcaatgtactttacgccttttgttataaccgttcacctcttcctttttataccccggaaattgtttattgaattg

SEQ ID NO: 12343 - DNA, 488 bp, Arabidopsis thaliana columbia
gtttaagggggtaaacttctaacgcctgcatcccgcgttcataaagaggccggtttgttttaggggaaaactagatcatggtagaggaacggaccaaaatacttagtcggaataacgagaaagttcaagctaaaccagctacgtgagctggacaatctggatgaactagctagctaagctaagtgagctaaaccagctggaagactagctagctcagctaggtgagctgaccgatagcttgactgaactaggtgagctgatcgagtactgacccagcggggtggtccagtcagctgacactcgagctggtggactgtggtagctcacgaatgaagaggtgtctcgaccaaaaggtgtaaggaccgtctggatggtgcaacgtttgttggtacccgctcgttggtaccgcacgaccaacgtttaaactcgttaaactaagaggagaaatggggcgggacgagcgaactgtgaaaccgaggtagaaactg

SEQ ID NO: 12344 - DNA, 595 bp, Arabidopsis thaliana
gccacagttcttgactaaagagaccttgaatcatatgcggaccatatccatggacgttgattggtataagggtgtttggtttggtcattccacgccaaagtactctttttgtgtttggttagcagttcttaaccgactctcaacaggagacagaatgactcattggaatggaggtcagtcagccgcttgtgtgctatgtcacaacgctcccgaaacccgggatcatctcttcttctcctgtgactttgcttcgatagtttggagtaacttagcaagaggaatctatggagacagattttctacacattggcaagacctgatacaagccatctccggctcttggatgacaccgcttgacagtttctttgcgcgatatctctttcaagccacggtacacaccatttggcgcgaaaggaacggaaggaatcatggagagaaaccaaactcagcagctcttttaatcaaatgaatagacaaacaaactcggaaccagctttgttcgatcaaagcaagtggagataagagatatgacaagggcttacaagcttggtttgcgatgagagaatgagaacaatttttagattgtatctagttt

SEQ ID NO: 12345 - DNA, 523 bp, Arabidopsis thaliana columbia
ggatccctcgcgctaacgattctcattttcctagcctgtcatctattctttgggagctctactgtaacaatgtaatgttttattggctccctctaatcagccccccaatctttagctggaatttggttgatttcatgaaatattcgagcttctggttcgggatgctaatttggttcaaggatgtcttcgtcaacccatggttcggtctcggctttaacaatgctttccggagctatatcttctattggttcgatgatttcttcgaccctattatcttcttgcacggccggcttaggtaccgccgccctttttgatttttgtctcttgataggtggtaattcaatcgcgttcaccgcaatcccgtgctgcagctcaagaccttgtaatgacgaatgtttcttccttaatgcttctatccgaaatacactctaccggaattgttctcttgactttggggtctggcattgacgccagagccgcgagtgtgtccgtggttgtgtttctcctagtggtatgcgaatga

SEQ ID NO: 12346 - DNA, 549 bp, Arabidopsis thaliana
ccctgcaccaaatcatcatgattagtgacatgtaagatatgtgaaagtaaaaacgttataaacacattggcgaaatagtactcgattatcggccaagatgagacccacgtcgaactcatttattcccacgcatttcttaaataccctgaccacaaaagcgcgtatactccatccggtgatcattggacaaagttcgaaaatggcatgatatccagcatccatgatgccaaaaaaaacccagaataaccaactttctgtattatttgtgtgatgggtttagacttttgtttgaatgaatgaagggtgttattaccaggttctgaaatagattttaaaaagacgcgatgattggtcccaaatcgatgtaacggtttagtaaaaaatgtaaccgtcaactctttataattagatttacgaagtgtacgtacaaatgaaaacgtttatcaaaggtacgtacagacaacaacagtattgacaaaagagttgaaggataatcaaatacaccgataatacgaggtcccaaacgtacgtacagacaaaataatatgt

SEQ ID NO: 12347 - DNA, 626 bp, Arabidopsis thaliana
  unsure (1)..(626): unsure at all n locations
nnnnnnnnnnnnnnnnnnnnnctaaagtggatgtacagctatagtttgttatgcactcattctatccaggcataacctttactacagggataacgttcaatgaataagtattggctgtcaggaattatttttcttgcctatggattggcttctcccgcattctcttcagagactgccacattagcgattaatggcaggatcagtcccccaacatgcagtatggctatggttaatggtcaacctcaacagcattgtggtcagttaacgtataatgttgacacccgtcatctgttttcttcgcccgtcaaaggtgtaacgacagaagtggttgttgcaggtagcgatacgaaacgtcgaatcgtgttaaatcgctacgattaatttggcaacctgattttaattgcatttagaaagccgaaatcatttatataaatgatttcggcttttttattgatatcaacaataccatttacataaatctacattaattgatagatgcgataaatagttaatactcttaaatattttttgtatttatattgcaatggttaatttgttttaaatcaataaaccaatgtgtttacatgcggcacttttttgatgtgagaatttgtttccagagatca

SEQ ID NO: 12348 - DNA, 517 bp, Arabidopsis thaliana
caaaaaatataaacccgtgattttccgccaaaaacataaacccgtgattttcctgccaaaaacataaacccgtgattttcccgccaaaaacgtaaacccataattttcccgccaaaaaccaaaatctgtgatttttccgccaaaaacgtaaaaccgtgattttcctgccaaaaacgtaaacccataatatttccgccaaaaacgtaaacccgtgattttcccgccaaaaatgtaaacccgtaatttttccgccaaaaaacgtaaacccgtgattttcccgcagaaacgtataacctgtaaacctgtgattttctcgccaaaaacgtaaacctgtaaacctgtgattttcctgccaaaaacgtaaacccgtaatttttccgccaaaaacgtaaatccgtaaaaaagtggaatccgtaaatattttaagtttgatgataataaattaataattattaatactgataattatttattattgtgtcataataataattaattaaattatgaaacaatctga

SEQ ID NO: 12349 - DNA, 866 bp, Arabidopsis thaliana
caactatgtattagtatatgttaattcttatatatgaagttggacagagctaaggcattaatgttttgacaacacttttgataattggctgagtcgtgtgaaggcaatggtcactcttttcttggatcctaccaatctataccattataagcaggcagctgataatactctacacagttttacattctgttcaattttaaccggtgataaaccggtctggttctaataaacagaaacaagctacatacaaaccccaaaacagacaaacaaccccaaaacaaaaacgttacgaaataacactttcttcctacgcaaacaaccgagtcagccaccacagatttcctgccgaggctggcatttgtgtcatagacagacccagccatgtagccgtagaagagagatcctatgggaatgtttgtgatgaggatgttctggttgacaccgacactgttgcgtccaaagagttcggaagttatggaaactgcagccgcaaacacaaaccccgagcttaacccgataagtgctgtcgcaacttctagtagcgcggtctggttggtcttgggtgaatacgcgaggatgaagaatgccaaaggtgttggcagtagcgaaatcgtgaaccagcctgttcttgtcaagtattttagcttcttgcgtgtgaagtcaggtgcagaggagagcaatcttccgagaaaggagaaggcagagaagagtgtaactaaggatttagcgtttgagctgctttgtcctagagactgagcgatctgtcctaagttgttgctataaacaagaccgatcgtgccgccgcagaaataagctacgtagtataaccaaaactcaagcttacgaacaagcattccgagagaatg

SEQ ID NO: 12350 - DNA, 522 bp, Arabidopsis thaliana
tgctgtctctacattcccattattacaaagcccatctaataaaatgttgtatgtcataatatcgggatgcacaccatcagaaaccatctgtttgaaaaccatttgggcgttatcacaatctctagcttgaaaaaatccatggataagagtggtgtaggtgactgtgttgccaaccaatcctctttgagacatctcacggaagacttccataccctcttctacccttttatacttgcaaaatccctttataagcgtattataagccactacatctggaaaacaatgcttgctaaccatgaactcaaacatctgcttggcctcgtctagacgatcgtgcatacaaaactaggatctatggaccttttgaccatctcgtcgtacaatttctcagcctctacaagcttcccctccttcacaaacgcatcgatcaatgcgttgaaaaagactaaatcagggttgatattcttctcaagcatatcactcagtagtcgagaggcatactccatcttccgtagttacaga

SEQ ID NO: 12351 - DNA, 589 bp, Arabidopsis thaliana
tgtagttgcaaagagcatcaatgatagtggtgtagatcacaacatcagcctctattttccctttctccatcttctttaacaaactcaaagccaaatcaatatcacctctcttacataatccgtttactacggtaccataagtaaatagatctggttgacaccctctggcaaccattcgatcaattaaagccactgcttcggaagctttgttgtgaagaaaaagcccatggattagagtgttaaatgtgacggtattgggttgatactccattacgaacatttgatcaaccaaagctacagcctcggatatcctcttaccgtggcagtacccctcgaggagcgaagaaagcgtgacaatatcgggctcatagccgagtttcatcatcttgccaagaacagctaaagcaagagggagttgagagcgtcgacaaaaacagttaatcaaaatattgtacgaatagaggtcatatgaaatcctcagattttgcatccgctcgccgagagagatgacaagatcaaacttgttcatcttagcaatggcactcaacagtttattgaattcacaatggaaggtaaaggacgagactgt

SEQ ID NO: 12352 - DNA, 551 bp, Arabidopsis thaliana
tcaggatctatagaccttttgatcatgtcatcgtacaatttctcagcctctacaaactttccttctttcacaaacgcatcgatcaatgcattgaacgtgactaaattagggttgattttcttctcaatcatatcactcagtagttgagaggcatcactccatcttccataactacaaaggcaacttatgagggagctgtaggtaacaacatttggtctaattcctttggtttccatttctttgaataggttgagcgcatcatccacatgtctatatttgcagagactatcaatgattgtgttgaagataacaacatccgcctctattttcgcagcttccatcttgttgagcagatttaaagccaaatcagtatcacctctcttacataatccatttactaccactccataagtaaccagatttggttgacagcctctttgaaccattcgatcaactaacgccacagcttcagaagctttgttgtggagaaaaagccatgaatcaaagttgtaaatgtgattgtgtcaggtctatacccatttcaccatttg

SEQ ID NO: 12353 - DNA, 819 bp, Arabidopsis thaliana
gttgtaaatgtgattgtgtcaggtctataccccatttccaccatttgatcaaccaaagctacagcatctgaaatcctcttaccgtgacagtatccattgagaagagaagaaagcgtgacaatgctgggctcatagccgagtttcatcatcttgccaagaagagctaaagcaagagagatttgagagcgtcggcagaaacagttgatcaaaatattgtaagtatatagattatgtgaaattcctaacctctgcatcttctcacctagagagatgacaagatcaaactttttcatcttagcaatggcactcaacagtttattgaactcaaaaatggaaggtaaaggacgtgacttgaccatgccaccgaacaaaccaattgcatcatctaacttcaaatcctgtaacacttttctactcaagttctctctgtaatcaccactgctaccagaaaaagctcgtccccagcaacagaaaccgtaaagattgaaggagtaaggagcagttggatgattacctttccccaggagattccgacgaacagacaatctcttcgccgtggatgataatacatgtttgagttgatgattagcaaggactgtttcccaaacgtagtgacttataatactcttataaagggattttgtaaggctaagagagtagacgaaggtatggaactcttccgcgagatgtctcaaagaggattggttggcaacacagtcacttacaccactcttatccaagggttatttcaagctggagattgtgatatggctcaagaaatattcaaagagatggtatctgatggcgtgcctcccgata

SEQ ID NO: 12354 - DNA, 703 bp, Arabidopsis thaliana
taaaaaaaaggaagagaaaacaaaaaatggcagacacaggcaaaggaagtgcaagcgctagtgcaacgatcgttgtggctgcccttctccatgtcccggtggcgaatcttgcaggttagttttttatatatatgatccataaaattgatattatgtgatcttaaaaacgttgttccattccatgaaggtgcaagatgatgagcgaacgatctggtggggatcaagagcacaacacgtgtccatgtggggagcactgtggctgtaacccttgcaactgccccaagactcaaactcaaacctctgctaagggttgcacttgtggtgagggctgcacctgtgccacttgcgctgcttagacatccttaactatggttataccatacttgtataataggtactactagctagtcgatctgaaataaagctgcacaacaaaatatatgtatcgtatgctctgcttcttgtgtttcctttttatgaatcaccgagagtttgtaaatccttataacttcaagccttcaaggtcttgcaccaatacaatccactatgtatagaacaattctctttttttttttactctattctagagtaaaatatagaataagattagagagaatattactctataataaagtttagaggaaaaaatagagttgtagatatatacttttagccttaggttaaacttttaaccaatatatag

SEQ ID NO: 12355 - DNA, 1135 bp, Arabidopsis thaliana
ggttcaatcttcactttccgattaacttctttgtttctcttgcaagcaatattggtttgtatttaccgtgcattacaatgcttattgtttgtggtagtaaaatcaatgttatctctgttaacatgtaccaccatttcaagacccatagactttaatgcaaaatcaatgttatctctgttaaagcgaagaaacatgtaagactacaaaaacaattcgacatttcaaaaacacctattttctaagatcttgacttgtgtctctccatgtctaagtgtaaattctgtttcttttaacatattacttctcctctttctctgttactctcactctcagcttcgtgcatcccaaacattgtatcatacaacggcttgtttaacgtctctggcaagtaaaacgcaagcccacctcccactaacccgcaaaccgcaaacaccccaaaaggtaactcttcccctaaaaccaccacaaacggcgccagaatcgctcccatttgagctgcttgagtcgcacaacccaatgccgcgttcctcaccactgttggaaacagctccgcgatgtatatgaacagaagattgtacgttcctgccatcccgaatatccctaaaacccctgacaccattctaactgatttccatggaccagctccccatacagagaatccaacgaggcagaaaacgcagctgaaccactgtgtccctatggacagcggtttcctcccgtacttgtctagtaaaaccgcggttatagcaaatgccggcatttccgacaccgcgttgacaaagacgttgaggtaaagattggtcttgaggttgcctacgttgaggcttagtccgtagtatacaatagagactgtgaaacttatggcaaccgaaatgacaagtctcatccgcatgagaggcgacagtataacatctttcagcgaaccctcaacagcggtattcctctccccagttgttattttccacatcgtcgtctaaagcaagagtgacaccagctggaatgtgacgtccgttcgttttagcgatcgaatgcatcagcttcatcgcctcatctactttgcctctcacgagatacaccttggggactcggatatgaatgggatacaatgagtaggaacagagagatggtacgatga

SEQ ID NO: 12356 - DNA, 615 bp, Arabidopsis thaliana
cactttcagcgcattgattgatgcatttgtgaaggaagggaagcttgtagaggctgagaaattgtacgacgagatgatcaaaaggtctatagatcctgatattttcacttatagttcactgatcaatgggttttgtatgcacgatcgtttagacgaggccaagcacatgtttgagttgatgattagcaaggactgtttcccaaacgtagtgacttacaatactcttataaagggattttgtaaggctaagagagtagaagaaggtatggaactcttccgcgagatgtctcaaagaggattggttggcaacacagtcacttacaacactcttatccaagggttatttcaagctggagattgtgatatggctcaaaaaatattcaaaaagatggtatctgatggcgtgcctcccgatatcataacatacagcattctgttagatggactctgtaaatatgggaagctggagaaagcattggtggtattcgagtatctgcaaaagagtaaaatggaacctgatatttacacatataatattatgattgaagggatgtgcaaggcagggaaggtggaagatgggtgggactattttgtagctcagcgttaaaggagtga

SEQ ID NO: 12357 - DNA, 1350 bp, Arabidopsis thaliana
ttgtatcatatacaagtggaaccaaacagatatagatctttacaatccaagatataaattggtaaggtccacgcggtttcaccttaattagaaagggacatctcagcaataaaaaaaaaaatgaaggaaatatagttagacaaatatggaaccaaaatagcaaaacttgataatcttctttgtttttttcatatttatttgctaatgctggcctttcaatttagaactaaaccaaaaaaaaatacattatgtgattataaaccaaaccggtgataaaaatgataagatgaaatcttgaccggtcaaatgatccaacggtggtgcgaaactggatgaatatcactctcactctctcagcctatgtgagtctctctctctgtttggtttggtagaaccaaaagttcaaacctttactctctctgtctgcaaaaggttcatcatttagggtttatacaagtttacagagagtttacgattctgaatcagtgattttggaagaaaccccaatcagctgaagatgaggagattgtttgcgatttcatcgacgggaaacagatttgttcatcggagtcttctcggaaaaggtaaatgtggaactgctcctccttcctttagccattgcagtttctgggtacgagatttctctggtgttagatatgattacagaaaaatatcgataaataggctaaatgatttgaagctagatgatgcggttaatctgttcggtgacatggtcaagtctcgtcctttcccttcgattgttgagttcagtaaactgttgagtgccattgctaagatgaacaagttcgatcttgtcatctctctcggcgagcagatgcaaaatttgggaatttcacatgatctttacacatacagtattttcatcaactgcttttgccgacgctctcagctctctcttgctttagctgttcttgccaagatgatgaaactcggctatgagcccgatattgtcacgctttcttcgctgctcaatggctactgtcacagtaagaggatttctgatgccgtagctttggttgatcaaatggtcgaaatgggatataaacctgatacctttacattcacaactctaattcatggactttttcttcacaacaaagcttcagaagcagtggctttagttgatcaaatggttcaaagaggatgtcaaccagatctggttacttatggtaccgtagtaaacggattatgtaagagaggtgatattgatttggctttaaatctgctcaacaagatggaagctgcgagaatcaaggctaatgttgtgatcttcaacacaatcatcgatagtctctgcaaatatagacatgtggaagttgctgttgactt

SEQ ID NO: 12358 - DNA, 812 bp, Arabidopsis thaliana
agtccgaatcgacattgaaccaactgctctcgattatagggtttactggattctgcgattttgctgttagtgtagtagtctcaactcattgcatggggaagccattttcgaagcaaccaagaagatgatgagatctgttgcggttattggcaagaaatgtcttcaccggcacactgtgttacttaaaggtaatcctcgaactactctttgttgggaacgatcttttgctggtgcgagttctgatgattgcagagagaacttgagtagaaaagtgttacaggatttgaagttagatgatgcgattggtttgttcggtgacatggtcaagtctcgtccatttccttcgattgttgagttcagtaaattgttgagtgccattgctaagatgaacaagttcgatcttgtcatctctctcggcgagcagatgcaaaatttgggaatttcacataatctttacacatacagtattttcatcaactatttctgccgacgctctcaactctcacttgctttagaattcttggcaagatgatgaaacttggctatgggcccagcattgttaccctgaactcgcttctcaatggtttctgtcacgggaataggatatccgaggctgttgctttggttgatcagatggtggaaatgggatatcaaccgataccgtcacatttacaactttggttcatgggctttttcacacaacaaagcttccgaagctgtggctttagttgaacggatggttgtgaaaggttgtcacgagatctggttacttatggtgcggtaataatggatatgtagagaggtgacctgat

SEQ ID NO: 12359 - DNA, 625 bp, Arabidopsis thaliana
ctctagtaacgtgcgccagtgtgctgtaaaggcggtcatttaaacatcaaaacgcgggatgggcttggtacacgctactctgtgcatatcaaaatgctcgcagctgacccggaagttgaagaggaagaagagcgtttactggatgatgtctgcgtaatggtggatgttacttcggcagaaattcggaatattgtcactcgccagttagaaaattggggtgcaacctgtatcacacccgatgaaagattaattagtcaagattatgatatctttttaacggataatccgtctaatcttactgcctctggcttgcttttaagcgatgatgagtctggcgtacgggaaattgggcctggtcaattgtgcgtcaacttcaatatgagcaacgctatgcaggaagcggtcttacaattaattgaagtgcaactggcgcaggaagaggtgacagaatcgcctctgggcggagatgaaaatgcgcaactccatgccagcgcgtattatgcgctctttgtagacacagtaccggatgatgttaagaggctgtatactgaagcagcaaccagtgactttgctgcgttacccaaacggctcatcgtcttaaaggcgtatttgcatgctactttag

SEQ ID NO: 12360 - DNA, 499 bp, Arabidopsis thaliana
ccgggtcacgtgtaacatatagctaaattcacatgtgttgggagccaactggataattgagaattttctgaattaactaccaacgagaatactcgttggtttggttggttggttggttgattttgagatgaagtctcactcttgtcccccaggctggaatgcaatgccacgatctcggctcactgcaacctctacctcccgggttcaagcaattctcctgcctcagcctcccaagtaggtgcgattacaggcacctgccatcatgcccggctaatttttggaggacacaatgtttattaaatgacaagcaataaatatatgtaaatttggagataacatacatattattaaaacttagtagtggccataaaaattgtttggaacttaaaccaacaacagattttctttaaggaatattttatcatggacattttttagaaatgctagctcatggtaataataaaaagtggttgacttgcagtcagttttcttatggttt

SEQ ID NO: 12361 - DNA, 612 bp, Arabidopsis thaliana columbia
caactcttcaagtattgatagtactcgctcggggttggctctctcttcctctttggtcggtttcttctcccaacaggggctggtgtatcatccccgatgatctcaatcagaaaccgcttcttcaaagggtgcctcttcatggtgttcttcttcagcctcaacgaccctctttccccaagctacttcttctctttgcatggctaagcggcttgagcttccaccttgaatcaagcttgatctttgagcacagcaagcttggcgaatttggcgttcagtcatgccactcatgtcaaacgcctcaacctcttcgttatcaacggaggatcttctagctcgagatgaactttttcttcttgaatccataaagattggtggtgagcttcaacagggcaaacaagaacaactctccaagaggtatcaaagcggaagggaatcggtttctttggtgacgaaattttgagcttgaaaccgattgaatgtttgaggatagacttgggagtgatcgagtaactttttggtgaagtattggtgaaggggaacggattcttaaagagtgatagggagcgtttggggaagggtcttgaatgaagacttcaagctttgtgagagaat

SEQ ID NO: 12362 - DNA, 534 bp, Arabidopsis thaliana
  unsure (1)..(534): unsure at all n locations
tagtaacgtccgccagtgtgctttaaagatatccaataacccagacaaaaccgatgtataagtcaacatatcctgaatcagacatacaatatcgcaatgaaaatcaataatattttaaggaatatcttcatgaaatcaaaagacaccctaaagtggttccctgcgcagtatcctgaagtaagaattatcctaggggatgctgtagtggaagtagcaaaacagggaagacctatcaataccagaacattgcttgattacattgaaggaaacataaagaaaaaatcatggctggataacaaagaattattacaaacagcgatatcagttcttaaagacaaccaaaatttaaatggtaaaatgtaatataataaacttacttttttatcatttttccactttaacaacattttgctccacttttccacgaccaaacaacttgaaatctggttaaaataacacgcaacactactttagagnnnnnnnnnnnnnnnnnnnnnnnnnnnnnnnnnnnnnnnnnnnnnnnnnnnnnnnnnn

SEQ ID NO: 12363 - DNA, 570 bp, Arabidopsis thaliana columbia
ccttgatcttaaaagtttttgatatcttgaatgtaacaatgcaacaatgaatcggcaacagcgcaaaattgagaatcaggttttgtaggcctacttatgttgaatgtgtgattcagttcaattcccctacaaacactaacatgtcgatgcagctatagggggtgtcaatccagtccactgttattgctagcaatcaagacgtgtacagaagcaactaagtcaagccagattataatgatggtgggtttctagtaacaatcctaggtcaggattcaaacaagtaaaaatgagaacttaagagccctactcgatcattgggtcgagtaaaaccaacaggtgacaaaattaagaatcaaaatgcaatcaacaagggatacaaataagggatacaaataacaggtaaataaaagtgcaatcaacaggggatacaaataaatctaatagaagtcctaaggatggattcattgataagggcaactctagggttcatcagatggttaataggtgaaaggtgggtcccttgacgatagatcaaaaaccgggtcaatcactgccttgacaaagacccca

SEQ ID NO: 12364 - DNA, 576 bp, Arabidopsis thaliana
tatgtttcattgggcagatttcactcccctcactcactaccccccactcaccgctccccctctttcccctcaggttagtaagtctgaggagttatgtgcaatactttcttcgtgtgtgacgtttaaagacaatattttagcaagactagatgactaacatgctgttctcgcctatatggcgggacacgtgttacaaggtgcaatacacggatttggtgggagacatagtcgtggtgaaaaagaagaatggataagatatggtgtggctagacttcaagtaagttaatacagtttggctgaatgacagtttgtcgattatgtatatagattgtctcgtggagtctaatgctgggaatgagttactaaatttcatggatgggttctagagttataatgaaataatgatgacatatgaagataaggagaggacgtgattctatgtagataggggtatttgttgttataaggtaatgccgtttggttttagaatacaggagttaattatgagtgattggtgaataagatgttgtacgagtattttggaaagacaatggaagtttatatagatgatatgtt

SEQ ID NO: 12365 - DNA, 612 bp, Arabidopsis thaliana
  unsure (1)..(612): unsure at all n locations
tagtaacgcgccgccagtgtgctctaaagcttatcccgtccagatcgccgccatagaacgttgatccgcccgcctgcgccgtgaccggttcatcccagtcacgcaagatgatctcttgtccggctgcatgatggtaatagacatgatcctgttcagcttcacgaggaagactacgcgcaaaacgatcagggaagatctgataaaaaatctgatccgcagcccattgtgggcagatatccggtacatcgacggcaaactgctccagtcgtgccggcggattcggctgaagccctgcggtgtaaaccaacgctggcgatcgtgccacagcagtttgaaactgtaacgccgccggggttgtccgctggagagatcaatcgccgcacgccatgcggtgacgccaggctgcggctgactgcgctgcttatgcatcggtactgacatttcttcgttatcgtgttctgtacgcagcataatgcgctgcggtgggtcttcgccgtcagccacagtgtaatgagcagttgatctttgctttgtttacaaatgggggcacggcacaatnngcatttaacatcataattccctgtgatgaaaactgatcacttgcatacctaa

SEQ ID NO: 12366 - DNA, 560 bp, Arabidopsis thaliana
gtacatacttttttgaatttaaactttgaacaaaaagtcttataccaaatgaaaaacaaacatttttcttttgacatatcgtacataatatacaaagtaacatttggatctgagtcatcgtatctcatagagtcatagtcaacatgctattctctctatccaatttaatccatattctctatcacgtcttgaataaacttttccaaagccgccttcgaagatccaccgtccattaacgcgaagtggcacttctccgccatctctttcacgttgttcctaacgtcactgtcttgctccatcacacgcctaatggctctctctatatcctccgcggtaaccgtctccatctctccggcgaacaaatctccttttaagtacttccgtatctccaccgccaaacccagctcctcaaccatctcaaacgcgttaaccttctgttccgcgtatagcgccacgtcaccattggaacacgaaccacaagctctctaaaatagagttcaaccgcagtgagtgcaaacctcctatcgccggctttctagtaccgcacttgtggtgccatc

SEQ ID NO: 12367 - DNA, 315 bp, Arabidopsis thaliana
aaagtgatgcagttatttcttaatatacaggaatccagcaaatgttaatcaaaacaaccgttagattagacctcagacccctcatagggtctaaaataaaaaatttattgtgacatcaaatactttctgaggatgtctagaaagagtcactcttctccattgctgagtgtatttcaagcttatacaaccactctgtatatcaggctaatgaggcctcagaagattatacatattactactagaatatacaacaggtacctcgtcgtgttcatatatccaggctccactatattcatagcagccggatttgtaata

SEQ ID NO: 12368 - DNA, 580 bp, Arabidopsis thaliana columbia
aaaggtaacaaattaggtcaatttttttcatatttcctttgacaatggtgcattgtgattttagattgctattttgaattatatataattcccagattcaatatgatagtttgatgattgggttgcaaagtaaagactaatcgattagaggttgccgaaacgttatttgaggtgatgagcaatcgaatgtaggttgaatgtgagttgaatttgaattccgagatttcatattaaagatatggagtttgggtttgcaaagtttagattaaccaattagtttaacgaataggtatttattaacattggaaatcaattgaatggaaggtttagtcgattctaaatcgagtgcgacgacagattaatttcatctatacgtatgataagagtacatgtggtataactattaaaatgtttgattggagtttaactggttgaattttcaggagcgatgaagaagaagatcacactaaggtacattttgacttcggaggatactattctgaagtcaatgagtggattggtaaaattcctatatgctatatcgttaagacgagtatttggggaagattcatatttgatg

SEQ ID NO: 12369 - DNA, 613 bp, Arabidopsis thaliana
tagtaacgtgccgccagtgtgctctaaagacgggaaaaaccgctgcctgcgaaacggtgggatcgccacgatggcgttttgcattgctcttcgttttcgaaatgtctggtgcctggttttcgtattggttgggtcgccgccggaaaacatgcacgtaaaattcaacgcttgcagttgatgagtacgctttccaccagctcaccgatgcaacttgcgctggtggattacctttccacgcgccgatacgacgcccatcttcgtcgcctgcgtcgccagcttgcggaacgtaaacaacgtgcctggcaggcactgctgcgttatctgcctgcggaagtgaaaattcatcataatgacagtggttactttctctggttggagctccccgagccgttagatgccggcgaattaagcctggcggcactgacgcatcatatcagtattgcgccgggtaaaatgttttctacaggtgaaaactggtcacgttttttccgttttaataccgcgtggcagtggggagagcgtgaagaacaggcggtaaaacaattaggcaaacttattcaagaacggctgtaatagcgtttaatttaattcctcttagattgggtaatatgaa

SEQ ID NO: 12370 - DNA, 206 bp, Arabidopsis thaliana
tcaactccacaatatgtgacgatcgacctttgtttaatgccttgtttaaggtctccgctatattgctagtcatcagattgaaacgctgtcccctgaaataatgccttgtccaattagccatccctatatcatgtagatacttaccgcaattcttgttcgtggattcaatctgaccataaagctctttcagtgtggctgcgtaaacg

SEQ ID NO: 12371 - DNA, 583 bp, Arabidopsis thaliana
tgcaaatagcagagtgcagaggctatgtctttgatgatcttgaaacgttgattccaagtgagttgctcttgattcgctctgtggtagaggtacttgtcaagacttccattgggcataaagtcataaaccaagtagagttcctccttgtacctacaataaccctgaagcctgactaggttctggtgtctaagccgaccaattgtcgatatctcagccaagaattcctgcattccttgttttgaatcatgtgaaattcgtttaacggcaatctctgcatcagaacctggaagtgtacccttaaagacctgaccaaaccctcctttgcctagaagttgtttgaaaccttttgtggctttaaagagttctttgtaagcaaacctatgaggcccacattggatctcccattcctctagaacctctttaacctttttatgtctcctgtagaaaaagatacttaaagctgatgcaacaagcgcaacaaagagaaccaatgccaagctggtcaccaaaacaatccgataaaccagagatttttccttgggatatggaggaaatgttggtatcccaagtccaggtttggaac

SEQ ID NO: 12372 - DNA, 373 bp, Arabidopsis thaliana
tgattaatgtctgattagcctctaattacctagttaattagttgttaattagagatgattttgtatgcaattcaaagcttaaatttcataaacttgttctaaatagataaatacacaatggaagcttaaattcaaaaacttatgctaaattgtttgaaacacaacaagaacttgttctaaagaaagagataacaaggaaaaagcaagacaatgttttgaaaatacagttgatggaggagaggatcctgttgcaaggttagctagggcagcagctgctgtctcctcattggccacctgcggttctggagcagtagacataaaaagcgaatcttcctactcctacacctctcctgtgcgttcttttttgaagtct

SEQ ID NO: 12373 - DNA, 534 bp, Arabidopsis thaliana
gaaacctttacttcttcttcatctgaaaaagctcattttttttttttttggaatcagagtttggtgaatttcaggagcagagtatttaagtaattttggggaattagtgagaaaatggaggagaaaggtgaaataagtccaagtggggtcgtcacagttaagggagatgaagctttggttccaagaacagagtttcaacaaaaccctagttttctccaattcgtgagtcccacaacggtagtgactcctctccctcctccaccagctccgtcttcggctccggtaccaaccaccgtgactcctggctcagccacagcatcaaccggatcagatccgacgaaaaagaagagaggaagaccgaggaagtacgcaccagacggaagcctgaaccctaggtttttgcgaccaactctgtctccaactccaatctcatcttcgattccattgtctggagattatcaatggaaacgaggcaaagctcagcagcagcatcagcctcttgagttcgtcaagaaatctcacaaattcgagtat

SEQ ID NO: 12374 - DNA, 1244 bp, Arabidopsis thaliana
cattctataaatgattctatttcagggtttctctgctcattcgtcccataccttccagttctttgcattttgatcaacacctacttgatcatcaacattgggtgagttagcctgatggacccatgtatgatatagtatattgggatgtttctaaacccttgctggtaatttgaaattgcagagctgggacatggatcagggtcttggtatcgctacttatcggaagcatgatctgtctcttctgtggccgatctcactgtttgctgaacaatgtggtttacgttccaacaacgacttgtaccagaaaaacaacagatcatcttgcttaagattggtggtttaatgcagctactgaagggactcgagttcaagctttgttgttgccgatgtagcatctaaagagaattaaacagtttgacacaggaagagtaaacacaggccaatacataaaaacaacatgtcatgtacattgttaagtcattccaaatgtatctctcttaaatgccaatttcatttttgttcttccttttccatttccagtaatatgagtttgccaatattggctaaatgatctcagaattgccgagtcgatataataactcacaacgtaacaaaataaatgggatggtttcgactaaaatgcagacatacacatttaagagtggaaaataagcttttatacgaccatatatacacagttacacacaaatactgaaacaagaccaacttacaaaaccaggtaaatcaccaaatagtaaggccctctaaacccaacttcgattcacatttctcctcctcacgcccaaagagagaccagaaagtttcgagagagatcaaaaatagctgaaacatttttacattgaatcttgcttattttttcaccttggctttggttgagatgcaaacaaaggctggatgagtctatgatgatgcgatgtagcctgagatctgtgtaacatctcaaccattgatggagtttggtaataagcttggacaaagcttgaaccatctcctgattctcctcttgatgttgctctttgccatgagtgtgaactaagtccagaaagaatgtaagctcttcccgatacctcgtagacatgcctactcgccattctttcttgcatttcctttagctctctgtccaaagccacacaaaacccatcacccgatttcgctgagactgtctctgccaacgccactctgaaattctggatggcagtgaacctgcggctaaatcttctctt

SEQ ID NO: 12375 - DNA, 537 bp, Arabidopsis thaliana
atcaagatccactcaactctttcggtgtaccaaaacagagccaaggaatgccatctttcaccagtggttcatacaacaaccagaagccagcagacatcagttccatattcggttcaagcaaaaccgaaccgtccgcaatgaaactcgcaccaccaccttcaatagcaatgggaagaggaaggggtagaggtagaggtggtactggcacatctacctcaaagcccagtggttcacaaccatctctattggatctattatgaccacagttcttggtgttgaacctcttggtgtggtgttggtgttttgtcgtgtgattaagagaagcatatacacatggagattgcgctccgtgctttgtgatgcagagaaaactgttcagaaaaatggagatgttatgtaaacatcttctgggattagcttcttccactatataaactttactacagcttcaggttgttttatgtctttctcaaattgtacaaattttgttatgttttctcacattgcttcatttgtccacataatattattttacgg

SEQ ID NO: 12376 - DNA, 556 bp, Arabidopsis thaliana columbia
  unsure (1)..(556): unsure at all n locations
tggagtgattgcacgtaggaagaacaactttgtttcgaatctccaagcagattccacactcttcttccctctccaaatcgatctccgacatctttcctttatctgttctgtcctttttacggtatcttttgtcgcatatctccttctgtttcctttcttctacatcggtgatccctccatgaagttgcaatagcgaaggaaacaacacatctgcccaacaacatccattgctagtcagaaaaaaacatatcgtctggtctaatcttatacctttagattaagagagaataagtgattaacagattaccatagaattctctgatactagttttgcgttcatgtagcgacattgtggtcttccatcaacatatgcctataaataaaaaacagagaatcacatatcaggcagacaagaacattgtgatcttgaagatccagtagcaataaaacagcaggaaaattaataagagaccttataaataaggatcctaagcaagcccaaagcgccacggganatgacaatcagtccactgaagaaggaagagaaagagatgag

SEQ ID NO: 12377 - DNA, 594 bp, Arabidopsis thaliana
gctctcgaaaaactcgatcctcgtttaccggtgaagcacactttgaagattctaaatacataatcgaaggaacaataggagaagagatataagagtacctatcaaaaggaactgaagcatgtgtgggctgtgaaggaggtgcagaatcatctatcaatgaagcgcgatggtgtcgatcgacaagggtatggtgtcgatcgacattgtctctctactgctttcttctgcgagccaagatgtaagggcctttgtagttggctctggagttgaaaatttgagcagccttaggagatttgtctttgttggtggcaatgctactgataggcaatgagaattccgagccatccatgccaaactccatctccacatggcatatgttaagggagatcctacccttcttcacatcaatcctagcacaagatgtagctaggaatgctctattgaggataagaggatccttgggttcctcatcatatgctaggacaacgaaatcagcagggatgagacaaataccaactctcataggaacatcctcgaggataccttcggggattcaattggaacgatccgtgaagaggagagtgatccttgttg

SEQ ID NO: 12378 - DNA, 842 bp, Arabidopsis thaliana
ctcacttagacgctttagatgcatgatagatgagaccttatcgacttttgttaacctatgttgtggttgtgatgtgtttcatgtcacttcttgtgtgataaaatttcttatatgggattttactgtgtgcaggtctatcaacctactgaagaagagttgaggagttatctcgatccctatgaaaatataatatgcacggaatgtcaccaaggtgatgatgatgggcttatgttgctttgtgatctttgtgattcatctgcccatacgtactgtgttggtcttgggagggaagtacctgaaggaaactggtactgtgaaggttgtagacccgttgcacttggatcagctagttcccaaacgcatattatatccgagcaacaaaggggtagtggcttttacagtagaccgtcacctcttgtagtttcagggcaatatcaagatgtgtctttaatagtctccccacgtacaccatttttcaatggagagaacctattttctccaaggattcctaatggtgatgctcaaggttcttctccatccggcttaggggcaaccacattatccagaagaaggacgcttcacagacacatacaaaatattatcaacggtgatagacttattaatatgggtgctagaactggtggaacatcgagtgatggtttcgtgactacacaaataggtcatggcagaacaatcgacccatctcagcctgtagcgagccaagaaacagggatatcgttgtatgcaatctctgaggaaagactacccaacaacaattcattgatttctgcccatgacccatgagctttggtctccaagttagatgattttggaagtgaaga

SEQ ID NO: 12379 - DNA, 555 bp, Arabidopsis thaliana
ttacctggttgacgaagttctgacactcgttggtatcagcatcagtagcacctggcccaagatagaatagagaaggcgtcctgggaatgaagtccccatcagcaatgattgttggattcttctcctttgaggcggcaacgcatctcgagcacaatcctcacagtacgacaaaatgatgtccggcatcggagccagaagctgaaaaccattcttgagccaatggcgaggatgcgactccagcatagccatttttcgggcaatatcagactttcgttcatcataatacctcaacatctcgcggtattccttatgccttgattcaacacatgataaacacccctcagcttcacgtcttgcctccgagctcgcctggaatagaagagtccagggaactcgaaggttattgaagaacggcatcccacgttcaatcgcctcagcgttcgagaaagtcggaacatttttgccaacagaagaagaagatcagcactctccatcttgcaaacaaaaggaggaaaggccgataaaacaattggtgatcacagagaagtatttata

SEQ ID NO: 12380 - DNA, 751 bp, Arabidopsis thaliana columbia
ccattttattgttttgatgcttatgcaactggtgacaaatggctccgagagttgacaatcagatgcttccaaattttttccggcagttcattataatttctggtggagttgttggtgggtcggatcctcctgcttatcagcgagcagagaaagagagaatggaaaaagcagctagagaagaaaacgagggaggaattggtaacttaaaccacgatgaacaagttaatgtaagcaaaagggcaaaaaaatgttcgggtgagtttacttcatgtcttatcacttatcagcttaaagtttttatttgctatcgttagagctcttgagaatcttttgtgcgcagagaaaggcgaaggagaaacatatgggggtgaaagacatgctgaatattcggatgaatcagacatctgttcggacgacgatgattctgaggtcgaatgcttaaacttttgaatctgaaacatgaaatggagaaatgctctagagtctttttccccttactagagtttcacttgttcactgttttctaggtggaacatgttcttctcggtgaggacgaaacgcggttgaagacaacggcctggaatttacaaaacaaagactatcttgaggtgattgataggctatatcatttatcttctcttggattcggacactcggtgaagaatttatattgtttggtaggagcaagcagaaaaggaagcagctctgaaggctgctaattgccccgaagatgcaagaaaccttgtggaag

SEQ ID NO: 12381 - DNA, 384 bp, Arabidopsis thaliana
cgtctgcgatcgcatcatcaaacgcagacagtacgttatcatcgctacaccctgttatggtgcagactttgtaagctgcgactctagaggctggaacaccgcctctcgctgttccattgcctattccaaagaagcttgtatccgcaactgcgtttccagccgctgtggacgttgtgtgagtaccatgtccttggaggtccctagtgccttcgcttgtgtagtctcttgctccgatcaacttgctgaaattgtgaacacatcaatctctggctaaaacaatactaatcttctattagagaaattttaatgacgtacttgttacaagtaaagtttttgccacctttataaacagctttccaagttcttaggaggaggacaaagcct

SEQ ID NO: 12382 - DNA, 457 bp, Arabidopsis thaliana
tggacgattgtgattgctccacgagtcgcaatctccttagcttgactttaaactgaccctgaaaccttccgattctcccagagtatttcccatacttagcatatagatcattattcttcaaatctccaccttgatctttatgctctttctactttagcttaacttggattcatctccggttcctgaaccaacttgtttagctttatctttctcaagtaatctcacttgactttgattccctaagtaaacccactcagcttcttctccttgagtaaacccactcagctgttatccggagcctaagctccaccttagttcttagaaactctgagcagttcaagggcatcttgaaacttgctcacaggtaacactttggtgaatatgtctgcaggattttcttcagtgtcacttttcaacacctgcacttttccattactcaccaattctctgatgaaat

SEQ ID NO: 12383 - DNA, 653 bp, Arabidopsis thaliana columbia
tgagcagcaaatcgagtttgagcagcatattgatcaaccgaagcaagggaccagcgaacaagagcaagctcattatgaagaaggtgctgactaaggaggagatgagatagctgaagttcacaagaagctcggtgtgcttgaagagcttgggaaccttcatagcaaaacaatgaagggtttcaagaaaaagatgagaacaatgaagaagtcactgaagagtatggctgctttactcaaggacttccagagcaagccaaggccaccgtctcccacccccaaagtaagaagaagtggttcaacgagctcagctgcaaggagacctgaaaggatcgatcaaccctgagcttcatcttttgagcctcgggaaatgatcttcgagttgagagagccaaggagtaggcagagacgagctttcacacgcgcgatcgatagaacgagcaaaaccctcccgcctcaacttcagcccctgcctatactcaagagaatatggacgataaagtctccatctacttcacctgatcactgaggtacaccacctcaaccattgtacatccattaggtttttctttttctttttgtgttttgtgttttggtcttgaatcactttcagatttttattcacaagggactgtgtaatttaagattgagggagg

SEQ ID NO: 12384 - DNA, 561 bp, Arabidopsis thaliana columbia
ggtcggtattttggataaatcttctgggcatagcagtcggagcaagggaagcattgagtccatgtgaggctgctacccgtatccatgtgaagaaattgtttcttttgaggggagccaaaatgaatttcggccatgaacgctagccctcgctgggagtggggtgacgagagtggaagagaaacaactttgctgtcataaaagtttgcaccattatgcacaagagggatatgtagagtgactctttttggttttgcattaatcaagagagggaggaaaaaaagaaaaacaaaattcattgtggttttcatttaaactgtttttagagttattaattaaggatgtgatttgttttttaagatgtggtgatattataatagtgaatggaagatttgtgaagttgtagtttgacactaaagtaagagaaaagttggtttaatggttaaagagtgagggaagaaagaagaagtaggttagttagtagaaattcttattggtaatgtatgttgggatatagtttggtttgatgtggggattttgagtatgtaataataacatatgtag

SEQ ID NO: 12385 - DNA, 448 bp, Arabidopsis thaliana
cctttaatgtattggttaaagcttcagagaagatctaaatggcaggagaaagccataagggagctaacacaaactgtgaaagaactcaaggatcaaattaaggacctccgtgggaaatccaaccaagtaccattcaacatcaaagacaaaccccctgatggaaccaccaccttagttagcaaagctgaagctgaactcaaagtgaatgggcagagagtcaagccttgtatggctgagcagatcattcaagaggagagctcatttcctctcctctcatcaccctttgcctgaaaacagtatgaaagtcaaactaaagactttaaactagcttacttgggaggaaattccatgtttatccttgtatatgcttttttcccttgttagttttgatgtttttgtttaagtatttcaggttttatagtccagagaagtcaacgatcgagtgata

SEQ ID NO: 12386 - DNA, 586 bp, Arabidopsis thaliana columbia
ctacctcactttcagttaaagggcggtcagcagaaagaacaaaaacaagcaaatctgcacgtggaacaaattcttctgtaagacgctgttgcctttgaaggatcacattggtcccaggtgtgtcaacaatatttatctgctcgaaaggagaacaacccaaatcaattcctccaaataattagtaaaaattcaggactgcgatggtagaattttgaattactcacatccttaagtattggtgcaggaagatagcatacatattggccatctggatgtgtttggcaacgttgttgctcttcggattccaagtcagagtagcacagaaacgtgatttcattggtagtggggactacccttctttcaggtatctcttcccaagaagtgcattgataaccgttgattttccagagttaaattccccctagtaccagcaaattgtggatccaattaattatccatcaaaaactattttgaatcataaaggcaacttgtcccacttaaaacatcttccaagaacggcatactcacaagtcacaagaaagcgaaaaaactatgtacacaagcagatggtacagttaagaaatat

SEQ ID NO: 12387 - DNA, 630 bp, Arabidopsis thaliana columbia
tgctattatctctgctcattctaaaaattctaatggtttaaagtattttgagcagatgcaccgtgctaatgctaaaccagatggtatcacgtttgtctcggttttatctctctgtgctaatacaggaatggtcgaagatggagagaggttgttctctttgatgtcaaaggaatacgggatagacccgaagatggaacactatgcgtgtatggtgaatctctacggaagagcagggatgatggaagaggcttactcaatgattgttcaagagatggggcttgaggctggtccaactgtttggggagctctgttatacgcttgttacctccatggaaatacagatataggagaggttgctgctcaacgtcttttcgaattagaacctgataacgaacacaatttcgagctgttgataagaatttatagcaaagcaaaaagagcagaggatgttgagagagtaaggcagatgatggtggatagaggattggagacataaactggtgtctcccaaaaggtacttccgagtttatcttcttaattcacccatgatgtcatgccatgttgagttatgaacttcacacatacacaagagacatgtttgtcatagagaaaagatacatgccgtgtgtg

SEQ ID NO: 12388 - DNA, 794 bp, Arabidopsis thaliana
gaggatccccgtatctagaaatctatgtctatcaagtgatatggactattcgccgtttaaacggatgcattttttcgtttaataagtgtgttttcgcttacaggttgaacacgtgacttcagtagcagtagagatcgttgagacggaggtgaatcaacacccggaagaagtgtctgtcgaagatgcagagaagacaaatgaggatgtagaagagaaggcagcagtgatcactgaaactccaacagttgtggaggaggagaagaaagctgacgaagtgactgaaactccggagggaatgaagactgaggcgttggaggagaaacagactgaggttgcggctgctgaggaagtcgccgttgagaaggccgaggagtaaagaggaaggaagaagctatatatgaccttttttggtctcatatcgttttctgtttattttattttatcaacatttcataagtattttctatgtttgttgggtttgttatgatgaaatcagatgtttggatcttttaatggttgctacattgtttacatgcttggtcgtagcaacaaagtacaaacttaaaccgagaacatggaagattaaaaccgtttatgtctacatgcaaaaaaataaaaaattacatccctttttctaaatatacaacataacattattcagtttttcaaaaaaataagtacagatgaaagttttcttaagagatactataagatcgtacatttatttggaacttttcatattaactgtaaacgttaacaataagacgagagaatctaatcaatgaatataaata

SEQ ID NO: 12389 - DNA, 331 bp, Arabidopsis thaliana
cgccagtgtgctctaaagtagcctcatcgatctctgctgcttcatccacacgttccggaagcgaggtgcttaaacaaccaacaacgatcaagacagtctgtagaatcgcataggtcaagtagcctatcatcaaaccatcggtattcgccaaaccgagtgtactccacagcaacgtaatccgaatcatgaagaccaggaaaggtacaagacggctgtcgacctctagcccaatgatcgatgagcgcggctactctgttactcatattgccagcgatggagcaggatgccatagggataaagatcattacatgcaattaaagacaagacggtg

SEQ ID NO: 12390 - DNA, 531 bp, Arabidopsis thaliana columbia
agttgataatgagtgaagttacacattctgttttactaatgtgggattcataacaagcagatacataaagactttgagttagagaagctgaagattgaactccgtcacattaaaggaatgtatgcagttgctcaaagcgaagtcatcgatgcttctaaaaaggtttatttttgttacaataatttagaaagttgctttatttagatattgggaatgatttgtatcctctgttttctttttattagatgcaagatctgaaccagcggcgatcagaggaagctacaaggctcaagaacttaacgataagagaagaagaagcggatgaagtggtggaaatggagagggagagacaagaggatgcggaaaacgaagctgagctctgtgagagaatgcattgagagagaaaccgaagagagacttgaggcggaacgaagagcggaagaggttagaaaagagaagcagaggttagaggatgcacttgaaggtggaccgcttcaacgccaacaatacatgaaatttgagtgggaagag

SEQ ID NO: 12391 - DNA, 653 bp, Arabidopsis thaliana
tcgatatgatcttcctccaatggcctaaaattctgttgcatattcgcatttccatcttcccacttgatctctgtcgtctccgttactcctctgttcaaatgactttcgttagccgtcacaccgtcactgtccgcggattgtgatcttgcggtctgcgtttgcgtttgtgtttgcgtttgcttggtcatttgaagagaagccatgtagcatttgtggagtttagcggtaagagttgctgatagaagcttggaagaggaagtaggaatggcattagggttgtatgggaaattagtacgagctctcgggccacacattagcctagccgcctcgtcgtaggcccttgctgcatcctccgctgtctcaaacgtccctagccagattcttgttttcctaaaaaaaacaaaaaaaaaacaaaaaagtttagcattactcaaataaaaagcgaccgagggtaatttcgtaatttgagaggatgatgagggagagtttttacaagagagggtgacgaatttcggagacccaagagccccaatgcctctgtctaacgcctcgaaagcgttgttgtggtcgtccattagtgtgaatggtaaatggaaatagggtttcaggtgagtttggtgtgtttgtggaaatgttttgaaagaagaaagatg

SEQ ID NO: 12392 - DNA, 549 bp, Arabidopsis thaliana columbia
actaaaatatgtcatccaactgaattcgacttctacctttgtagccatgcgggtattcaggtacgaaacaactatcgaaatatccgttaatatgaccttttccgtaactatacagataaaatgacactgtttgtgtttgttgtatgatctagggaacaagcaggcctgcacattaccatgttctttgggacgagaacaatttcacagcagatggtattcaatctctgactaacaatctctgttatacctatgcgcggtgcactcggtcggtctctataggtaaataacaacatttcttcttcttcttcgtgtacccgcaaatatgacgaaaatcagcaaactcatatgttcttttattttctgatgttgtacagttcctccagcgtattatgctcatcttgcagcatttcgagcacgtttctacctggaaccggagataatgcaagacaacggatcccggggtaaaaagaacacgaaaacaacaactgtcggagacgtaggtgtgaagcctttacagccttgaaggagaatgtgaagagagtaatgtct

SEQ ID NO: 12393 - DNA, 560 bp, Arabidopsis thaliana columbia
gtaacggccgccagtgctctaaagcatcatggatggtttaacgcccatcgctaagcaggctcgtagtcgtttacaggcgaagttcggcggtcaggagttcctgattggccttgatccggcgttgctgctgggacatacggcggtggtatcggcaagcctgatttttatcccactcaccattttaattgctgtttgtgtgccgggtaatcaggtgctgccgtttggcgatcttgccaccatcggcttcttcgtggcgatggcggtcgcgtgcatcgtggaaatctgttccgcaccttaatctcgggtgtcatcattatgagcatcaccctgtggatcgcgacgcaaactattggtttgcacacccaactggcggctaatgctggggcgttaaaagccgggggtatggtggcttcaatggatcagggcggttctcccattacctggttactgattcaggttttctcccgcaaaatattcccggtttcattattataggtgcaatttatctgaccggtattttcatgacctggcgtagagcgcgtggctttattaacaagaga

SEQ ID NO: 12394 - DNA, 625 bp, Arabidopsis thaliana
cttctccgcagcggttgcctattacgacagctaccgtgctgctgttctgcctgcgaacctgatccaggcacagcgtgactattttggtgcgcatacttataagcgtattgataaagaaggtgtgttccataccgaatggctggattaatctgatttaaccaacaataaaattgaggcccggcgtatattgcaccgggcttttttttgccaaatatcttatagactaaatttcactgcttaatattaacttaataaatatcagctattcttataaagaaaatctgaattgtttttcgttgcgttgaccatcgaacaacgtagcgttaaaacttttagctcttatcaggatgctaaaaacatcatgattcacagttaagttaattctgagagcatgaaatgaaaatcaccatttccggtactggctatgtaggcttgtcaaacgggcttctaatcgcacaaaatcatgaggttgtggcattagatattttaccgtcacgcgttgctatgctgaatgatcggatatctcctattgttgataaggaaattcagcagtttttgcaatcagataaaatacactttaatgccacattagataaaaatgaacgcctacgggatgctgattatg

SEQ ID NO: 12395 - DNA, 394 bp, Arabidopsis thaliana columbia
ctctagaactagcattaagatcaattaaaatgaagaatcctaaagataacctagcaatggggaaaccaactaaatcatctaaatccctaatgaggaaccctaaccctaacaagaaagcttctcaaacatgaacatagaaacacaaatcatagtctgaataagaaatcattaatttgaataagaaatcaatagtccatatatcaagagaaagagtaagaaagatcttctctaaaaagagtctccacatggttttgctcccaagaacaaaagagataaggagattagcctctccaaccttagatctaaacaatgacctttaacactatatatatataaaaacatatatatatatatatatatatatatatgtctcctaacacgtgatgggccttct

SEQ ID NO: 12396 - DNA, 690 bp, Arabidopsis thaliana
gatacaaatacgtgatgcagatatttatgtaagtagatgagcaggagcagggcataactggtgaccattggtttcaatgagtagtcgtcatgatccttcacattctgcttgcagactctgccaaattcagtttctttttatttacacatgaacattcctaaaatgaatcgtgcaaattagcattctgtggcgattggcaagacaattgaaagaagttattttgtaagacaaaccaacatcactcttgaagattatctaaaagcacaaattatccatcccacaaagagtaagaaacattggttcttgataagaaagaaagaagaggaagaagatagtcatgattcatgaagaatattaaaaagcaagtcatcaacaacacttgaaaacggcaataaacataaggaagaagaaactggttgcttgctgcttttgattcttctctctgaagatcaatcattcaaaagcccattggttctctctgcgaacctcttcctcttcctctggtgtgaagtcgttcttaatgttgaacgttgtgcggatctcttctggagtctttcctttgatcatatcagcaactgtctgacatgttagatcaagcaagttcttgatattgaggtaattagcagcctgcacaagatcccaaattcataaccattagatcaaaatccgaatccaaaaacacagatatga

SEQ ID NO: 12397 - DNA, 531 bp, Arabidopsis thaliana columbia
tcaagtctatcatcttccctcattttggagtgccacgtatagtcatcaatgacggaggtaagcattttgtgagagtcaaaactcgcacaatagaatttattttaagggtttcttcaaagaacggatctttgagagattctcaaagaacaacaaaattctcaattaccgcggatggtgttcttgattgtattaatgagaaagtaatgatttgatcgtacatgtgtgttagaatatgaaaataagtgtttctgccttcaaagtcagagcgttttagatagcctgaagttgagagcgtttttgtgtcttttctctttgtttgtcctctgaggtgctttttatagagttcgagaatatcacctctcgcgatattctcggaagatttctctttatctttatcttgttgaaggagattgcccttatcttccgaagattctgggatttctgtatccggtgatatcttcgaagattatctcttccggggttttcggagatgatgtgttttgaatttataccggctaagtcttttgaagt

SEQ ID NO: 12398 - DNA, 327 bp, Arabidopsis thaliana
agtatgttttatgtattggctgagtttttgttatgctgagtttggtttatgtgttgctgagttatgtaatatgtggctgagttcgttgtatgttgtggctgagttaatacaagcttacggctgatttatgcatgatcagatgtctgtagaccaggcagtagattaccctccaagactttaccaagaggaagattctatctggaggctaaagccattaatcacaacatcaagatgggagattccctctgatcgagaatcaataggacaagatacatgggacgaaatgacagagacgacctcttggattaattgctctagctagttgat

SEQ ID NO: 12399 - DNA, 305 bp, Arabidopsis thaliana columbia
tagcgtcagagccatgaggataatagagtatccagtgaaaaccccaacctcgatagtctttcttgcatttaccagtttcagcagtaggcccatcaactggccagcatctgatgtagtaaccatagaaactcgagggtggttatgagtaatgttcctaagctccctgagaacctctggctcacatgggtacacactagtctccagtatatactacaacattgttcacataaatgtatcagtgaaatggagaagtgaactaacgtacagatgagtaagtatgggcaaacttgatagagctctacact

SEQ ID NO: 12400 - DNA, 312 bp, Arabidopsis thaliana
catgagcaatcaaaatcgcaaagaagttggctgaattacacaataaagttgaatgacacttcatcaaacttaacagcaagtacgaatccttgggcattagaatacgatatctggaatgcatctccgattcaccatctattaccaacttcccaggcgagctttcaagcagagctatccacgacccttagcagtaggccactgctcaagccaacactacatgccatgctcaagaggtgtcacttcgacatgcacctatctctatcacaggggatagtgaagttcgggaaggagaggatttggatcagagtcaag

SEQ ID NO: 12401 - DNA, 385 bp, Arabidopsis thaliana columbia
cccaataacaaagatagaatctttaaaagcctatgagcttttgtgtacctttgcttcttcaagaccgtccatttcggttaacagtgtagatagaagcctttctccaactgtagaactattgattgagctctcatcacctctacgaagacccaaggaaataaacatgttaagaagagtctataacacgaagcaagagttgggagagatagagacaaaccttttacaggcaacggcatcagcttcatcaaagactattatacttggagaagcaagtcgagctctttgaaatgtaatccgcaataatgcttcaccttctccaacatacataggaaatagctccgcacagatgcatcggcacccagacaaaggcacgagatggaataag

SEQ ID NO: 12402 - DNA, 549 bp, Arabidopsis thaliana columbia
tgacaggtatatagactccatttttctgtttgagtgttctgtttccgagacttagaatctaaagtgatcacatctgaatgaacacagagatcgagatggaaaagtcacacctgatgaagttgcggctgctgcaatgtacctgaaagacacactcgctaacgacggccttcaacaactaatcagtagtctctccaaagataaaggtaaagaacagagcgatcctctccttcttgagctcttatctccctgaagttgatcttttttataaatctgttattcaacagagggaagaattatggtggaagacattgtaaggttggggagattgggaagcaagccagaagaaaatgcaacggaagaagaatcaagctgaaggaaataatactatgattttaagacacacatagactttttaatactagtgaagagagttttattgagagaagctctacttcatgttttgctgcttagacataagcaggctacttacatatacaagcggctaagaatacgagccattttgctagtaatgtgaaaagaggttgaaga

SEQ ID NO: 12403 - DNA, 553 bp, Arabidopsis thaliana
taataatacaatgccagagttaaatgatagcaaaaataataccctattcttcgttatctgtctcaggctgctgttagcgcccttcagcatcaaccagttgtaaatgcagttattgacggggatgatatcatatacagagactatgtggatatcagtatcgctgttggtacctctaaggttagttcacattctttagctatcattggtttgtgctaaatttcattcttattgcgatcatgtatgtgaggctgaattttttttcttgtggtctcttatccagggacttgtagtaccagtcataagaggtgctgataaaatgaactttgccgagatagagaagacgataaactcacttgccaagaaggcaaatgaaggaaccatatccatagatgagatggctggcggatcattcaccgtttcaaatggcggtgtctatggaagtctcataagcactccgatcattaatcctcctcaggtttaaatttatttcccactcaccgggtcccagtcagaacacgttttttgttacagtaactgtggttttgcagctgca

SEQ ID NO: 12404 - DNA, 594 bp, Arabidopsis thaliana columbia
agtgtgctctaaaggggatgtcgctgtacctgattatcgtcactggtttgttgctgtgtgtatctccgttcctggcattttcttgatctacctgaaattttaaggttttcaatatgtgtgaatcgactttaaatccgttatggcagcgttacatcctcgccgttcaggaggacagtaaaaccggcgctgggatgtactgaaccgatttcactggcgctggcggcgacgcgttgctgcggcagaactggaaggtccggttgaacgtgtagaagcctgggtatcgccaaatctgatgaagaacggtctgggcgtgaccgttcccggcacggaactggtggggcctgcgatggcagcgcgcgtgagggcatcaggtggaaatgccaacgccgggctggaagtgctgaaagacgcaacagcgcaggcaattgccgatgccaaagcacgtcatgcggcagggaaaatctcgttaagatcaggaacttgcgatgaaacctcttacacgcgccaaagtctggaacggtgagaagtgggcgtgtgtcacatcgtcagcgggcataccacattgtgcatatcgagacgcacgatggtgtggtg

SEQ ID NO: 12405 - DNA, 512 bp, Arabidopsis thaliana columbia
tgttaaatcactaaaacacacatcaatagttccaacaaagcataagaaaataagtgcaacaagttttaaaacaaataaccaatagtctgaaataaagcagaaacaaagttagaaaataaaacacgataaggagggtggctagtcctcatgctctgagccggaggtgggtgtgggagagcgacgacgacgacgactgggggcaacacaaccgcagcgagaaagtgtagctatggcgttccagacggtcttgaagctgtcaacgacgtactgctgaaagacctgtggctccatcgggatgggtggaggaccaagtgatgagcgaacacagcaccaaagttgacattacggtcaacttgctcaaatccaaggctttcaggaaagaagtcatgaagagcgtgatagagcagtaacaactcagagagtctcatcttgccaggcttcatcttgcacaacagtgtgctactaatcagcctaaccaaataccgtagaacagggtggcggatctctgagtg

SEQ ID NO: 12406 - DNA, 559 bp, Arabidopsis thaliana columbia
taacgtccgccagtgtgctctaaagttggcttccgcctcggcaaaaagtcgttgacgaatggtcagtaccatatttgtggcgaggacatcattaagccccaattccccgccctgcactttttgcgacatataagccatcgcttcattgacggcgagcatcggccttcgccaccctgcgagacactgcctgcgccatcagcgacaaataccgacaataatggctgctggtcatttaaccaggcaatctgcatctggcaggcatcctgacaaggcaagtccgcgctgatgtgcgacgttccaacggttgatgcatagaccagacgccagctcacactgacgtccagccttttggcgcttccagcacaacttccgttcccggcgtggagcgggaaaccgaacgcagcgaactggataaccagctaaacagttcacggaattgtaatccttgcagaggcaaaggctgacgaacgctaatttgtgccagcgtcttcatatccgcccctgaacaccgatggaaaagaaagcaaaccttttatcttcttcccccgaaacactttgt

SEQ ID NO: 12407 - DNA, 1468 bp, Arabidopsis thaliana
gtgaaacggtttaggtttatgagtaatatcgggagagaagagttttacgatcatatgaagaagatcggacgattgtctcaccctaatctccttccgttgattgcattctattacagaaaagaagagaagcttctcgttaccaattacatttccaatggaagcctcgctaatctcctccatggtaatattatggaactctctaagtgtctgtttatcttcatccaatgaaatgaggaatctgatgagttttgttggattgattttgcagctaaccgaacaccaggtcaagtggttttggattggccgattcgattgaagattgtaagaggagttacgagaggattggcttatctctatagagtgttccctgatttgaatcttcctcatggccatctcaagtcttccaatgtgttgcttgatcctaacttcgagcctctacttacggactacgctcttgtcccggttgttaacagagatcaatcacagcagttcatggtggcttacaaggcacctgagttcactcagcaggataggacttcgagaagatcagatgtgtggagcctgggaatcttgattcttgagattctgacagggaagtttccggcgaattatctcaggcaagggaaaggagctgatgatgagttagctgcttgggttgagtctgtagcgagaaccgagtggactgctgatgtgtttgataaggagatgaaagcagggaaagagcacgaagcacaaatgttgaagctgcttaagatcgggttgagatgttgtgattgggatattgagaagagaattgagcttcatgaggctgttgatcgaatagaagaggttgatagagatgctggtggaggtcaagagagtgttcgatcttcatacgtgactgctagtgatggtgatcatcgttcttcaagagctatgactgaggagtcgcactcatgtaatagcttccattgaaaggcctgtatctctctctggtctttccactagtcttattcttcatctaattctcgtttccttgatatttgttgatcaagttcgtgtctttgtttgtaggtaatgagaattactttttattttttattgccagggttatttattcgcattcagtttttttccccctagttttaacagatatgattgatgagtaaagcttcaagcttttgttcttttgttgattttttcacttttcagctatttccccattttgtgaatattaatttcgtgccatactttggtatcatctagacgcaaaagaatgtcttttatgtccatttcgtattcaacttgtccactttctgatgcagtgttgagataagcaagaatataaaattaatggttttcacaagcttgttgctttagatattgggtaacctaaccttgtagatggtatattctttgaggatattttgatttacttttacttgttcttttgagagagacttcaataaagtttaagtttatatctttt

SEQ ID NO: 12408 - DNA, 469 bp, Arabidopsis thaliana
gtccctccaattcgcccatcacgatggttgcattatctctcatttaatcctcatttgaacccaaatcagcatagttcttaccaataaaacttttattgatggcctccactctcgacagttcctcgaacaatttcggtggagtgatgacgtcaacagtcaaagaatatctactaaccgtttcacctgaagatatatagacaccgacatcctcatcatcactaatgtgtatctcttgagttggtcccaacatcgctgcattgtacttcatttgcaatttaaccttactttcatctaatccaagcttcgagcaaatcctactttctaacatggagagagttatttccctcctggtgtattcacatcaagctgtacgctcgatctttccatctaaaatatatgatcaccttctccaccattgtatcctaagacaacaatacaaaaactctgtcagttatactagttatactac

SEQ ID NO: 12409 - DNA, 573 bp, Arabidopsis thaliana columbia
taatacatcaataataatgtgtgaaatcaatcaagaagagatagaaaatcagcctaaagacttctctaatggtcatagccaaaggtagctcgaaaatctgctcatattcatccacgaaatgaacttcgagcccttctttcacgtttctcgccagctcatcaaaatctctccggttagcctcagggaatattatcaccttcacttgactccgtcttgcagctatagtcttctctttcacctgacaaagcgatattaagagatattttctgtattacactgcttaatacaagaatttggtaactaagaagctaaaacagagttattgtggtgtgaattttcacttacgccgccaatcgcaaggattctaccggtcaaagtgacttctccagtcattgcaagatccttccttacaggcttcttcaaggcaagtgatagcaatgaagttatcatggtgcagcctgcgcttgggccgtcttttggtgtggccctgcaggtacatgtagatgaagcttggaattcgcaaacaacttgttctcgggttcttcgccagcattatcttctcgcgactgtgtg

SEQ ID NO: 12410 - DNA, 1101 bp, Arabidopsis thaliana
gaagcttcaagcttctcttttgcttgtgttgagaaggcacgagctttgaaggtgagcttcatgcttagttctcctgtacccagaatctgaaatccaagaccaatcaaaacgtttaaataaagaaagaaaagacgaaagcacaatcgaaagaagtaggatcaacaagtttggaaaactaaccttaagagggagtttcctttctctccctgaaggattaatcaaacccttttgcttcaatgtctccaatgacacttcatctccctcttgaaacccagctgtttctatgtctttgatattaaccggtaagtatttaggtaatcctgaacgcatacctgtttaaagaacacagtaacgcaacgatgcatcagaaatatatctctattggtttgagctaattagcaaaatcgaaccatgaaatatctctattcactaactacaatcttgatccatagttgtcaattcatggctctcttacccaatattaaatctatgaaacaaatgtgccctaactaaataaaactgaaagcagcatcaccaaatttaaacagagccttttggatgagacatttcatcgaacatttgggctacacaaaacttggataccaaacaaaaacaaaactttacctccagcgattcctctaagtttgggaagacgacgataaagagcagtttgaccaccttcaaagcctctcataatcccaggacccgatcttgatttctgacctctcataccaaaaccacaacttgctccttgtcctgcagagatacctctaccttttctcttctgcttcttcctcgaacctggctgtggtccaagattatccaaacggaatctctccggagctacaactgccgacgacgtagccgccgtttggctaaccacaacaaggggtctcgcaaattgctgttggtttctcgttttaagggtttggttgagtttcagagatagaatctgacttgggtttgcccccaaaacacttacatttccctgtacacatttcaaattccaattttacggattcattcaaaattgacatttgtagaagaatgagagattaccttgaatgaagtagaagataagtggagacggtaacaatggcg

SEQ ID NO: 12411 - DNA, 391 bp, Arabidopsis thaliana columbia
  unsure (1)..(391): unsure at all n locations
ctctagatcaagaggatccccgcaagatggttatacatgtaatgcattgaaaatagtatgtacactgtaatcatagtatcactgtctgcaattaaaaccaagtacttgaataatctacctcagggaattctgtatgaagttctgaaatgcctcgatgacaacaagaagcacatgagagaatgtaccttggctgctcttgacttgtggcttgatgctgtgcatcttgacaaaatggttggtgataatctttttgagccatgtcttcgcttgttgatatgattacattgacttcaantatttaaaaatctgttaatgcagattccttacattataatagaccctaacagatgggacaatgggagcagacggtcgtaangatctttttgattgg

SEQ ID NO: 12412 - DNA, 995 bp, Arabidopsis thaliana
atggctaagatcaatgaaatcttcaacaagcatcactgccatgagataggcagcaagtagaatgcagacggcatagatgacggtgaagctggtggcatcagaagaacggatctgtctgtgaccaccgacgggtctgatgaagaacatgagaggaacaacaacaactgaaggggcaacagcaaccatgaagatgagggatgcacggtcagaggagtggatcattgtgtatacctgggagaggatggcaccgccgaggccagcaaaccccttgaggataccgacgacaggaccacggctcttgggaaagttctgaacaccagaaactaatgcagcggtgttgaagtaggtctccccgttgtcccaacaaaaatgaggatacacatctgaaagatgacaaagagattcagattaagttgatgaattgcttgtaaaaggaacgtcgagcaaagaccaaaaaggatcccaggagatattccaattgcactttcacaatcttgaccagaaagattaatagtcaactggttttcttatagaaacagtgaaggaattcaatttccaagctacagaaggatcactctctctcacacagatttgacagccatttcataggaaccaccaaacaacaaccttaaaaacgcaaactttgggagattcgattctccaaacagacatcattaaaagaaggaagagaaaaaagcaaactttagtccaaaatagaaacagaaagctggagaaaaagaaaggaaacaactcacagcccataaaggaagaatgggagcacgaccggtgacgataagccaaacccagccatagccgacaaggttctggacagagccgacgagaagagcggcccagagaggcaagatctcggagagagtaccagcgaggaagccgacactatcgccgagatctttggcgacaccgagcctggagagctgtttctggttgtagttgagggagctcttgatgacaggagagatgctgccgaacaagta

SEQ ID NO: 12413 - DNA, 668 bp, Arabidopsis thaliana
gggtaccgagctcgaaatcaacactcctgatccatttatctgcatcttccccataagccttagagaaactaaactcaataagcttcattttgaagcgtggatccatcaccacagcaacagccataagcaggaaacattctctccagtactcgtcaaacttatctttcagtgtgtttgctaggttgcttacatcttgatcttcactcgtggctgagttgcctagatctagctgaagctttgtcatttcatggaacaaatcgtttgctgtcaatcgagttgagccagtcaaaacattggccgcgtcaaaaaggatcttcaaggacgagcaaaggatctcaatctttctccattcttcaggagatgttaatattttataatcaagatcgcagtttcccaaacaagagaagacctctttgtgttcacaggcagccaataacatgtcgtaactagtgtcccatttcgtttggttgtcaatgagaagatcttttgtcgaaggggtttgaagttgtttcttcagttcatcaaatctctcttggcaactatctttggttttcacatacttgacactatcacggactttttttatgggtgttttaaaatcctcagctccaagcagatcttgcgccatactgcttaggaggcgggcatagcaattaccagattttaca

SEQ ID NO: 12414 - DNA, 823 bp, Arabidopsis thaliana
gagcaatcgctcttctttcacaggtatttcctctatttcaactcttttagatctttttatctgattctctaacactttggatgcttttagatctagtcgccatggttgaaacaactgtcaaatatgaaaatcaacgatcacctgggaaacccatatatcttgttggagaatctctcggcgcctgcattgcactcgctgttgcagcctgtaaccctgatattgatcttgtcttgattctttctaacccaggtgacgttgatcctttcttatttcctaggactttctcatttgtatgtgtttgaacattagtcttatcacgtcgtctagatttgatctaaagagtattgttgcatttgcagctacatcatttgggcattcttcgctgcaacatcttgctcccctggttaaagccttgccagaccaacttaatcttgcatttccttccgtgctaagcttgattccaggttagctttgatttatcttttcgctgattttggaactctgacaagccaatggcccctcccctttatttaaaatcacgccacacaatggtaaaagcatctttcaaaactctggtcaagctcaagtgtttactactactatgcattaacatgtgagttttggtgatataagacatggtttataatttcctagctgcataaaagctctattggaattttaaggtggccctttaaaaaggatggttgctcactgggtcagaggacttccggagacggaaacagctgcaaacatttttcaagatttggtgataacatccacactaacctctgtaggtgacaaactataaaacttttatattagg

SEQ ID NO: 12415 - DNA, 513 bp, Arabidopsis thaliana
tagtaacgtccgccagtgtgctctaaaggaggagagtaatccaatgactcaagactatgaactggttgtgaaaggagtccgtaattttgagaataaagttacggtaactgtagccttacaggacaaagaacgctttgacggtgaaatttttgacctggatgtcgccatggaccgtgttgaaggagctgcgctggagttttatgaggcagcagccagaaggagcgtccggcaagtcttcctggaagtagcagaaaaattgtcagaaaaagttgagtcttatctgcagcatcagtactcctttaagattgaaaatcctgccaataagcacgagcgtcctcatcataaatatctatgaacacaaaaatcagatacggcctgtcggctgccgttctggcgctgattggtgctggcgcatctgctcctcagatacttgaccagtttctggacgaaaaagaaggtaacacacaatggcataccgcgatggttctggcatatggaccatctgtcggggtg

SEQ ID NO: 12416 - DNA, 570 bp, Arabidopsis thaliana
agtgatcataaaataatgtaaaaagaaagtgaacaacaaaaaaagacacaaaaaagtaaaactgaaaaggagtatttctctgtcatttcccacaccaatcgcataatcgatttcttccaacttcaataaaggggaaccaacgtaaccctaattttgctttctcctctttgttcagaaaattttccctttactctcaaattccttttcgatttccctctcttaaacctccgaaagctcacatggcgtctcgaaactatcggtgggagctcttcgcagcttcgttaaccctaaccttagctttgattcacctggtcgaagcaaactccgaagagagtgctctctacgctcttcgccggagtttgacagatccagaccatgtcctccagagctgggatccaactcttgttaatccttgtacctggttccatgtcacctgtaaccaagacaaccgcgtcactcgtgtgtaagatctcttttctcttatctcctgttttgaacaagttgatcgccaagaatctgtggagattctattgatacagtctgaaatttttgcctatttataggatagat

SEQ ID NO: 12417 - DNA, 307 bp, Arabidopsis thaliana
acgcagcatacaactctccgttgtatagcgcgaagcacaaaatgatcggaatgagcactgcgcaaagataggaggtattactggatttgagcattggacaagggcatattgcacatgggagcgatccaatatcatgactcgcaacaactccggagccatgagcaatctcgagaggagcgcaaaatccgatcgaagtagctatatgctacggatctagcgacaggacatccagcggacattcggagcaaggggggacaaagtggtcaagtgttactctacggtgaccccgcaggtagttgaacgtttt

SEQ ID NO: 12418 - DNA, 526 bp, Arabidopsis thaliana
tgcgatgttcattaaaccaaacagaaattttggccatgatcgcatctagcatgggtattaaagaatacttccttgcattgagaaaaacagaattcaacgattccaaacagttgctggtgtccaaattgtatcgttcccctgggaaacaacacctaacccatttttttcacggttgtatcctccaaataataggccgcagtaggatatctcaccttaaaagttctacactccctctaaaattctgccatggtataaatccgacttaactccatgaatttccaagcgagtacgtctttgttgatgttagtggcatgacctttgacattttgggataaatgccaaacacaatacccgtgatgagccgcagaatacacattacgtatgcgtttgatgaggcttgaatttttgtcactcataaataccaattcaggagtatcgggtacaacacttagcagcttctcgaagaaccatccccaactagcataattctctttgtcgagtacgccaaccactatgatataatgat

SEQ ID NO: 12419 - DNA, 427 bp, Arabidopsis thaliana
tgtgatgatcaatcagtaaattattaactccatttttgatatgagatcaatgatgttattatctgagcaaatcacgtatcatatgtattttacccgtacttacatagtcaaattacttacatttcaattgtaacgattataaataataaacaaacttcctcaagtagtcaaatatataaacacatgacttagacaaacaaaaattcctgtaactaaaaagttaatcacatattcataaataacacaattatttaaatatgatgttgaccaacaatgtgtcatacatttctctttacgacgatacatctaagtaccaaaccaacacaggtcggtttattttcggattggaataccagaaatacctttgagacccatcttaaccgcggttcttcgagacaaagcaggaggtttctctagaccgatagaa

SEQ ID NO: 12420 - DNA, 420 bp, Arabidopsis thaliana
tggcctatgaaactgttgcaacggattttgtaccttttgcagtaaatatctcagaggatggcttataacctgctgcagtttgtgaacctgatgctgctgcttgcccggacgctactgcgagtctcggatcttgctgacttgcctagtgatcctggtgacttgcctactgatgctgctgacttgcctacagatgttgttgcgtccaatggagatgatcctctagcagcagcagtctgacgtggagacttctggtatgctgcatctgcagggctttcatagatagctttgttgacaggccatgcaacacaagacattaaacagtcctcgcagataagttacattcagcgactggcctccatagtaacgtctctggttgaagaactgcatcgacacgtatcttcactgctacatgtccgagag

SEQ ID NO: 12421 - DNA, 617 bp, Arabidopsis thaliana
tcccaaggtgttctatttgaatatcttacattggtgttttttgatgatcacgagaactaagtttactatatacttgtatcaattaaaaatgtcaattttgccatatgtagaatttattttcttacattgtctttctatgtttctagtagagacattgttctacttccgctctcccatcgaagataaagagagtgttttacatgtcaagtgaaggcaataatctgcttcatgaggttaactactctgcttttatatatacagaatgtcctagatatcttcaatgttatctctaatgattctgattccctttaagaaactctatcgttttagttctctacttcatttctttgttttgcacggtgtatttgacattgcaaatgtttggtgttatgtccattaaacaggtcttcccaccagttaacccaactgtcctagagcagttgagaagcgtggactgtatcgtttacgcaatgggatccctgttcacttccatttgcccatcactggttagcacccgcaataaatatgttgtgcaaaaatggtggattactaaatttgtgataactgttatagacaagtctttctgttcatcaggttttgcttggtgttggggagat

SEQ ID NO: 12422 - DNA, 1589 bp, Arabidopsis thaliana
tctcccttccacccatcgggcgtgcagaaccctctcaagatctctgaaatgtctcctattcatacgcttttgaaaacttgcatgtgagatatttccctagttctcgcgggattttatcccactctcatcactaattaacttctctaaatcacgagagccgttattagagaagaagatcttagatttctctgagcttactttttgcctcgaggccccacaaaacctctccaagactgaacggattattcgaatttgcgtaaccgaagcttcagtaaacaaaattaagtcgtctgcaaaacaaacatgtgagagctgcggccctcctcgagacaaactgattggtttccacttcttcttcatcactgaatcctcaatcaaatgacacagccgctccatacataaaacaaacagatacggagataatggatctccctgacgaaggcctctaagcggtttgaaaccttctgtcctttccccatttcaaagtaagctcatgcttggtcctgtgacactctgcataatccagcggatccaaactctaaaaagcctgccaccctaagtgtatactccataaaatcccatcttattctgtcataagccttctcaagatccagcttaattaacatccatccttttacccctttcttacgctgcatagaatgaaccgcctcttgaacaactatattatcagcacttaaccttcccggaataaagctcgattggtctggccctatcaacttactcataaccggcttcaaccactccaccatagttttagtgatagtcttaaacaagacattacacaaactaatcggtctaaattgagtaatcttctccggtttaaccactttgggaataagaacaacaagtgcatcattcgtatgcagcggaagatcaccggaattaaagaagtccatagaaaacttaacaattgatgcaacaacgacttcccatcaatgttgatagaacacaggttaaaaaccatcggggccaggagacttgtacttccccatgtttctaatcgccttctccacttctactccggagaaaggcttatctagatgaaagcaatcttcgcgggttagactgacataacctgcctgcggtaacttctcaaccactgcatccacatcatcaagggaatacaagcgtctgtaatactcgatcgccattttttctaactcacgagtctctgtcacccatatatcctcattattcttaagcatctcaatgcggtttcttctccgacgaataacagtagaagtatggaagtagctggtattcctgcccctagcgctatccacttctctctagacttctggaaccaaatcaactcttcttgttctagaactacatcgaactcctttaaaagggaagcctctgattctaacaaagcaaccgtgggagcactatccagctgctcttggatctttgttatctcactaattaactcatccttcctctttttcacatctccaaacacctctctgttccacctgcggacggtctctctcaaacctgtcagagccttcggtgtactaatatcatttctccaagacgcagacaacaactcctgaaaacctgtgtgt

SEQ ID NO: 12423 - DNA, 554 bp, Arabidopsis thaliana
ccagtcgggacttgacaaataatccttaagtttctgcaatttgactggatcaatcggtgccatagaatcatagattcctcatgaaggcagacaacccttcatcatgcagctcagcccgctgtctccaattactggaaaagtcatagtggtcatttcatcgagtttaatcaatgaactcccatccggggacaacttaacagtttttctcctcgcagcttttactctctgcagcctcatggtttcctcctcatcttcatcagactcaggaagcaggcgattatactcagatacaatctggtcagtaacatcaagtatagaatcatcatcagctaccctctcaccatcagctttttccttggcttccttaggcttattcttggggacagaagaagtatcaccgtcaactttttccttggcttcctcaggcttatttttggggccagaagaagtaccacagtcagctttttccttggctttacctcaagtgattttggctttattattgtcacctttagaagcacctttggaggcacctttgtaggtggctttgtagc

SEQ ID NO: 12424 - DNA, 401 bp, Arabidopsis thaliana columbia
ctacgctctgaactattatggattgcatgaataaaccatttatctgaacacacaatcatgtagaaaaggagtagaataaatactcacagtgcgataagggaaagaagtaacatgctttccatcaacattgatatggtaaccctctaaaccggcgctaagagttagaacgaacagcttctcttccacaaaaggaaacggccattctactttgacccttttcctccttcctataagtctattcaaccaccatcttgacctcgacccttctgagtaattgtcatcatcacgaatccatttttcacacttcacatgactatcaactgcagccacactaaagtattactcaacagatgacaagaaccataactatgcacctaaccatttgctagcttctaatgaat

SEQ ID NO: 12425 - DNA, 569 bp, Arabidopsis thaliana columbia
agctgcgtgaggaaaagagaacgccggctggctcgaagccgtcgccgaacaggaacagtgggctgccggggtcgagaggacaaacggtggaagctctttcgttttccatccttgaagtatttatcacgtaaatctctgagatcatgtttgagatagcggtggcagattatgctcttatttatagagagataggttttttcttgaaaccataaaattaataattgtggcgtgtgcgaatggtttaaaccatttttagaaatcgaaaaaaggcaattattgcctcaaaggcgtgaagcttttcctttttctcgagaaaagatatggcaaccatcgcactaaagacaaaaggttcattaaatataaagaagagtaattaaggcccaagcccagtaaatgagtcgaattgactaaacccgagtttgggaattcgcattttgtaaaacaaaacaatgagctcagttctcgctttttaagagaaaggtctgatcaacctagaaatcttgaaacttagccacatggccaacaaaaagctatttaaagatggactttgcaaatatatactttattat

SEQ ID NO: 12426 - DNA, 307 bp, Arabidopsis thaliana columbia
  unsure (1)..(307): unsure at all n locations
gtgtgctgtaaagatttaggaattagtccagcaaggtctgagacctaatcatgattgtacaaatgagagtgtaactcattattgagaatgttgaaaattaaagtatgtacatgtttgtatggacacttgttcggtatttctttgtacttctgtacatactggagaagcctccagaaatntaattcatcattgccgaaaatgctttaattcgatctaatttgctgaacttgttaatacanataacgagccatcctattctagcagagaattttacttcgtgttgtagacaatttggcagcaaacataa

SEQ ID NO: 12427 - DNA, 487 bp, Arabidopsis thaliana
taggcttctttctcttctggaggctaatctgtctcttgagaccatcttgaagtgaattcttttctcgggattgtgttaatcccgcctttaggttgagctttcttctgcatatgattcagcttactcctaagttcctcaatagtgtgggctagcttctctatagtttcatcttgcttattagacctctttttaagttctttcactctttcagtctcatatccttctcctgagaacgctctatcatttctagaggttcttccatcttctgttgacccttgtggagttctgttgatgttaaagtgcaacttgatgtgctttccaaggttgagacctatattcccttctctgacatctatcactgctcccactgaagctaagaatggtcttccagtattaagggatccttatgctctacttccatatccagcaccacgaagtctgtaggcacttctactctattaatcatgacaggtaggtctttcagcat

SEQ ID NO: 12428 - DNA, 536 bp, Arabidopsis thaliana columbia
actctataccataccgactatgtcatcttgcttataaaaagcatgaagaattgattgaccttgcctcatcaaacaatcagccctttttaatgcattattgtgaaagctattcaccaatcccacgtgttcgcgtaaactctgaggatttttccaagtatcgaaacctttcgtcacaaacgtatcactcccacctttattttcagtgtaatctctaaacaagtagcaaaccaaacagtaagctttatccttttttacaatgtattcttaccaaccactatagagatcaaaccactctggattaaatcgtctcatttttttttctgatagtgttttaggaaaatcatgcccacgagattgataaggacctttaatcagatatttgcgtcttacctcatctctttcattaggatgatagtccaaaatatgtttcctatcgccaggatccgaagcaaatcttctggaatagcttccggaatattttctggaatatcttgtgacgttgattcatgctttcttttgaaaaatctatgaattgg

SEQ ID NO: 12429 - DNA, 618 bp, Arabidopsis thaliana
cgaaaacattgttgaagccgagaccgaaccatgggttgacaaagacatcctcgaaccaaatgagcatcccaaaccagaagctcgaatatttcatgaaatcgaccaaatttcggctaaagattggggggctgattggagggagccaataaaacattacattattacaggagagctcccaaagaatagatggcaggctaggaaaatgagaatcgttagcgcaaaattttgtctatcgaaggattctttgtatagacgaggtgtaagcgatccctatttactttgcatttttgggcccgaggttgagatcgttatgagagaagtgcacgaaggtttgtgtggtagtcattcttcaggtagggctacgactttcaagattaagaggatggaaattactggcctactatgatcacggactgcgttaagtatgcccagcgatgcaaacgttgccaaccccacgcgcctgtcatccatcaacctttggagttatctcttcgatctctgcccatacccgttcatgaggtggtagatggatacattggaccattgcataggtcaaccgaggtgtcaatactcttggtcgtactgattctttttgaagtggatgaagtgcacatatgt

SEQ ID NO: 12430 - DNA, 339 bp, Arabidopsis thaliana
  unsure (1)..(339): unsure at all n locations
nnnnnnnnnnnnnnnnnnnnnnnnnnctaaagattttgctagttaaatttgggatgctgttcttgtggttgcatcttataggtagttgaaggattactttcttgggcataagttccgtcctgtgtgagagtggttgcccgttaacatccttggaagggctggattcgacgtgagatagggtgtgaatttagctttagctaagcgtacattggttctctgcctctaggatgattgagaagtttgcgtggctatagtaaccggggctggtaatgatgtactctgactgtcggcaaaaaatcactccaggaacttggggcgatcagagtctcttgtgagaag

SEQ ID NO: 12431 - DNA, 629 bp, Arabidopsis thaliana columbia
tgatcaatattttccacaaaaataaaaataaaaagagtttttcaataaataaagtatagtacttaatttaaggttgttgctgctgctgaagactgataagtttaaaatatggaccactcttgtttagaacgagcttacggtggctgccttgctctacgatcttacctccgtgtaatacacttatcgtgtcagcgttcttgatcgtcgatagcctgtgagcaactaccacagtcgtccggttagccattaaccgatccaatgcttgttgtacctaacaatattcattcgttgtatactcattagtccattgtgattaaattttacaaagtctaatggtaaagaaacctaccacacgctcagattcaacgtccaaagcgcttgtggcttcgtcaagtaatagaattgctggattcttgagaatggctctagcgatacgggtcctctgtctctgcccgcctgacatttgaactcacgtgtcacgactttggtagagtaccttctgggagagaggtaatgaagctgtgagcatttgcgagcatagctgattcgacgacttcagattgagatgcccttcgttcccatcaaaatgtctcgtagattgttgtgcgaaaagtgctggtctttgtgac

SEQ ID NO: 12432 - DNA, 517 bp, Arabidopsis thaliana
  unsure (1)..(517): unsure at all n locations
aacttaccactttccatggcggcgaanannnnaagccccctcatcataatctctcttacagaagtaacaatgtggcaactttggacctccaggcttcacccagcaacaacagcacacttcagcacaagactcagagatgaagactctacttcaacaacttgtgcaaggataggcttcatgttccatgaccatggataagaagctagctgagcttaccactaggattgattgctcttataacgacttgaatataaagattgatgcacttaacaatagagtcaagagcatggagggctacattgcttatacttcagctcctaagcaccctggacaacttcctggaaaagctgttcaaaatccaaaggagtatgcccatgctatctccacagttagtaattctgccactgaggacagtgggattcaagaaggggaggttttgcgaccaagatcaagacaggaaattaaactcgacttctttgctcggcttgtcgaacgagcacatgacccgagcaaccca

SEQ ID NO: 12433 - DNA, 595 bp, Arabidopsis thaliana columbia
caatccgaatccaagtctctgaatcgcttctttcttcttatgaggaagttcgggataaaactcaatcgaacctttcttcagaacacctaatggaaccgtgcaaagagccatatcgcagtggaactctttgttacctgtgtaaaccagaaccccgttgcttccatatctgatgctctcaactgtactcccgtaaaaaattggaagattttccgctaaagcatgtacaaatatttcgttcccacctgggataaaacaatgatcaccacccatctcatacggatcatcttgatcccaatacgccattgacagattccccaacaatgtagcatttgcatattccaagtttgctaaatgccaatctaagagcattctctcttgctgatcctcagcaaccccataaaccaatcgaaatgtttcaagcgcttctcccaaaggcacatcaactgatttattctcctctatcatcgactgtctaagcttacaaactctatccaacaacttattaaacgatgcctcaatcttagaatcaacactagcatcagcaagctctccattgggaagatacaaaggacaaatatctctaaccttatgaaga

SEQ ID NO: 12434 - DNA, 742 bp, Arabidopsis thaliana
agatcgactcatgctatgatttatcatgtgtagtaatatagtatgagaggccaatcacataaactcttaaatacaatgatattggacatgttatgttttgcatttcaaacaaaacaaagaaagaagaaatgtcgttttttgtttgtataaatccaggaataatggttttggtttttagacgcaatagagacagtatcaccattttcgttctggacaaacaaataaaattaaaattttgatacattaaaatatggttagaacttagaaaacaaatttatttaggttcataggccagtgagtctctctctctctatctctaaaagaaagagaagcaaaaaagtaaggaatgtttcctcgcaatcatcatcatcatcaccatcttcgtcttcttctttgaaacctccagcgacttcctcgtagttctctcacttatacacttactaatacagagtaacagagagagacagagtggactcttcttagagtaagatgggaggtgtgacttcttcaatggcggcgaagttggcgttttttcctccgaatccgccgtcgtacaagctggtcagagatgaaacaacggagctttttctaatgagcccttttccccatcgagaaaatgtcgacattttgcggctgccacgcgccgaggcaccgaaatcgtggccatgtacatcagatacccaatggccgtcaccaccttcttactctcatggaaatgctgccgacatcggtcagatgtatg

SEQ ID NO: 12435 - DNA, 554 bp, Arabidopsis thaliana
caaagtgcttacaaatatgtgtggtccaaaaatctataccgtaagagaggcgactagtacttatagttatggtcgagctatttatatgtacgcacctgagtcaactataaaagaacctgttgtttctcaccccacagaacatattcaatactatggtggtacccgtccttttgttgccaatcccaacaggtttgagaggccgaaaggacgggttattaactgcgatgaggcggtccaactctatggaggggtgcttataaaggaatttcgtaaataagcggtgaaaacctcaagttatgttgaagatccatggtgagtttgtaaataagtgtgatagtttttgtttctgcttgcgaaaaaagttcagaccaacacatatgcgaaagcttgttgcaacggttttgacgtagaataagctttagagcacaactaagtgtgcgtgtctgttatctatctagaagtactttatgttgaagcttatgcaatgtaaaatgttacggtactatgtaaacatgtgtgtcttgactttttgaacataatttaataagcgtatg

SEQ ID NO: 12436 - DNA, 550 bp, Arabidopsis thaliana columbia
tgtaaaaatctaacaggaactatagggttgtatatgtatattagtatatcttaacgatccaaatgtacaataataccgagaatgtgtgaattcttttacggttttggctttctgtcgttatataccacgaggcgatattgttatctctatttgaatcgaaaaatagagaaaatgacatagaatacatgaaacacgttatagaatcactggggtccaaacaaaataagacagtacagattaatggcaaaacaatgacttctcaaattcaacaagacataacgctctagtggaactcacctcacgagacacatcacgatcacgaacaacaataatagtaatcacactcatgagtattgactttgatcaccaataatttgtaacaaaaatccaaatcagaggttcggatacgttacgatgcgcttagacaagaacaccgtgcacccgtcctttggcgatatagtgggacagtatatgatgtcatcgcaaccgtccgattgaagtctcttgaaatcaaacaacgatgagaacatagcgatgaagagcaagaggt

SEQ ID NO: 12437 - DNA, 517 bp, Arabidopsis thaliana
cacaaacacttggttgtgatctaaagcttattctaagtgaaaaccgttacaacaagctttagaatatgtgttggtctgcactttttccgaaagcagaaataaaacgtatcacacttatttacaaactcaccatgcatcttcaacataacttgaggtttacaccgcttatttacgaaattcctttataagcactcctccatagagtctgaccgcctcgtcgcaggtaataggccgtcctttcgacctctcaaacgggttgggattacctacaaaaggccgggcaccaccaaagaagtggatatgttccgtctggcgagaagcaaccggttctctaacagttgaatcaggtaagaatcggtaaggaagccgcttatcaatcatttcgaaacccttttgagcgacccatctattcctatccttttgagccattgccatcgaagcttaaagaggattagaaaggtattttgtcttaaacttttagtgtgttatctatgcatcttcagttttagtttatata

SEQ ID NO: 12438 - DNA, 571 bp, Arabidopsis thaliana columbia
tgccggcctcatgtaccttcatgctcatgtatgctctgcattatataatacttcatcatccacactgaaagtttatatgatagatactcatgattttctctttgtcttttggatgaaacagaatgtaattcatggtgacatcaaacctgacaatttactggttactagtaccgggagagtgaaaataggagatttcagtgtcagccaagtattcaaagtactgatgataccatttcttttcttctttttcttctccgttaatctctgtaatgtgtaatttgatctgctaaaacatgatacatttgatgaaggatgatgatgatcaactccgtagatcacccggcactcctgtctttactgccccagaatgttgtttaggtataacatacagtggaagatctgcagatacgtgggcagtaggagttactttgtattgtatgattttaggacaatacccatttctgggtgatacacttcaagatacttatgacaaggttccgcttctctctcgctccactgatctttttattgaaagacatctgtctagaaacaatttgaatacgcaattagt

SEQ ID NO: 12439 - DNA, 574 bp, Arabidopsis thaliana columbia
cgccccgcctccatcaaccacccccaggcaatgttgtatcaatattttcaatggtcctagggaatattcaagaacagagacatccaaaaatatttgtctcggtaagataagttgttcaaaggagataacgggagcgcaaacatcatcgcctcctcctcctcctcgtcgtccttttcttgggctaattgtctcagcaagaaaactacgacttcggggaataaaatttatgcggaaggagaatgttgagacaccgttagacataagtttcaagagtggtttggttgaaataccactactagtgtttgacgactttatcagcaatcttttgatcaactgtgttgcctttgagcagtttaatatgagctgctccactgagattactagctttgtaattttcatgggttgcttgatcaacacagaagacgatgcgactttcttaatcgagaaagggatcttagagaactattttggaacgggtgaagaagtttctttattttttaagaacattggaaaagacatctcattcagcatatccaagagtttcttgtcaaatgtgttcgagggagtgaatgag

SEQ ID NO: 12440 - DNA, 383 bp, Arabidopsis thaliana columbia
attgtactgagctaccactgcatattacggtttcatggatgatggaaggaagaaccctttcgcatgtagttctcgccaagggttcggtaaatctgaggcaaacggtcacccatgggacgtgtgagaacccttaatccaattttcacctgagcaacacccacgaaaaatatcagaaacacagcaactcctttaagaaagacaatggagactaagttcattcatgctcaacctaagtctactgaaagcaagtgtaacttgtctcttgtatttccagttaaccaaacactcacacagttcatataaggatcagcattgatcgtgtaatatcctcatagagtaagtgatacttaatctacagcaccataaactcaaaccacacccaa

SEQ ID NO: 12441 - DNA, 480 bp, Arabidopsis thaliana columbia
gatccaaggagattcgtataatcacaactgtgcgatgaatctgtggaagatgggagggtttttgactaacagctacagtcctaagaagtttcgatctaggcataaaaagctttgctttggtccaactactatgcctgattgtgtcgttgtgtttgattctgagaggaagagctctgtgatacttgaggcatcgaagcttcagattccggttgttgcaattgtggacccgaatgtgccattggagttctttgagaagattacgtatcctgtgccagctcgtgattcggtcaagtctgtgtatttgttctgtaatgtgatcaccaagtgctttgtggcagaacagatgaagttggggatcaaagaagggagcaatgaagatttgatgaaggatttagctgcttgattttgatatttgcaacaaaagtatgagactttacagttgtatttctgagtctggaataattgttcttcagaattgtg

SEQ ID NO: 12442 - DNA, 691 bp, Arabidopsis thaliana
ggcgccagtgtgttaacggtccagacgtagacatctgcttcgcgaattcggagcttccacagcaaaccttccattcatcttctccgatctccatcgccattttttctctcttttctccaatcctcacttctgttgactggtgtaagatcaaaagtcatctaattgggccttttcataaacgggcttttcaaaaatgggccttttctttatcttcttcctttttttattcatcatcttctatatgtgaattattcagaaacagaagcgagaagtttcttacaatttgtaaagagatctgttttagggttttgccttgttcttgtggcgggaataacaaagacatcgccgatatggggaaagacgaagaggaaatgcgaggtgagatcgaggagcgactaatcaatgaagagtacaagatctggaagaagaacactcctttcctctacgatctcgttattactcacgctctcgagtggccttcacttactgttgaatggcttcctgaccgtgaagaaccttccggtaaagactactccgttcagaagatgattctcggtacccatacctccgagagcgagcccaattacttgatgctagcccaagttcagcttcctcttgacgataccgagagtgaagctcgtcagtacgatgatgaccgctctgaatttggtggctttggctgtgcaactgg

SEQ ID NO: 12443 - DNA, 1094 bp, Arabidopsis thaliana
caacggatctaagtatcgctgttcccgaagaacttacgcgagaattgcgccgagatctggtttggcttggaaacattcgattgatgttggtgctggtgtgattgatgctgattatagaggacctgttggtgtgattttgtttaatcattctgatgctgattttgaggttaagttcggtgatcgaatcgcgcagttgattatcgagaagattgtgactcctgatgttgttgaggttgatgatttggatgagactgttcgtggtgatggtggttttggttctactggtgtctaagtgataatcatcttcttcgtttatgaatgtgttttggtttttaatttcgtcgaacagtttgtgggcattattattgtactatctctttgcttcatctttagactattcaaacaaactctcactgttttttttctttgttgggctacaaaatgaatcaattacaagaaaagaaagaagagatgacttacacaaaaaccaagccaaaacagaaagaagaggtctctttaatggagagagcaaataaatcaaagcaaatagagacagttgattataactaaaacataaaccactggctctttttctctatgcacaaaaatgagtgactctagacgtctcaagcgaatttaggcttaggtaaggctgagttgttgctgctgctgccgccaccgctgctgtggtggtggaatgatccgaatatatgaatccagaatttaggacatttctttagttctggacagatctggctaggtaaaagattaagttttccttcgcttgttagagacttcttgaaatgttccaacactttgacaatctgccagaattccggtctcttgtctgtttgcgatgaccaacatcgctcgatcagctctttcatggccgctggacaatccgtcggtataactggcctaattttctggccaatatcgaaacaatgaaatgtttaataacaactgaacaataatgatctaactcagtcagatctatgcaagatcacaatcatgaaataaggaggagatgcagaatgatttaccttgtatataactagatcacaatcatgaaataaggaggagatgcagaatga

SEQ ID NO: 12444 - DNA, 571 bp, Arabidopsis thaliana columbia
aatctgatttgctgatggtcacgatgctcccgtaactgacgtaaatcacggatttgtcttcttgtttgtctaaccatggaatgcaagtctcgtcgggtgtggacaagctactagaggtagctggaaagtggctgtgagatggtccaatcccatagataggaattttgaaatcttcacgtgcctgactcactgagtcgtggtccaactcttcacatgacatgaatataagacctgaagacgcctttgtcatttgtagaactttgtccaagaatggatctagtatatctgtttctacatcaagaatacgtacaatatccttctttcgaagcggcgtaaactcttgaactagatcctcctgttctgaatctgtgagacaatttagatatatgtttttaggataacgagttgcttggtctatacttaaaatgtaagaaataacaataccttgaagtggaagatacacttcacgccgaagcttaggaagaacaaattggcagcgacagaaggagactgtatacacacttgaggaccaatattgggagtttcaaactctgagcaatggggttgtgtg

SEQ ID NO: 12445 - DNA, 604 bp, Arabidopsis thaliana
  unsure (1)..(604): unsure at all n locations
tttatttattcttggtttccgaattcattaatgggcttggtttcagagtaagacttgtgaaatcccactactttacttttaatttgacaatctgcggccatgaaagtattgaccataaaatggaatttcactgagacaagaaggtgtgctgcaaaacgaaacattgcactatctgctagtgatcactgctaattagtataatacctgaagctcattcttcccatatgtggtttcttggcataaataagatcttccgtcggagcaacacttgtactgtctgcaatttggagtgatatacaattaagtaaggatgtaaacaatacgaattcgtgtacgtacacaagatttatccacattaatactcaaaagctgatttttggcgtaaacagagattttcaattcaaatttttaatctccagacggaaaataagagaaacttatccagttccaccgttgcctttgtcgaagcangttttctcctcggggaaactctgagtacccgcttctccttctcagccataacgaagttgctatctcgcgccggaggtttctcaattcctcttcgccggaaaaagtgcgatttttgcttcgccggattttggag

SEQ ID NO: 12446 - DNA, 530 bp, Arabidopsis thaliana
ttcatcataccatatgtcaagagaggatgcaatatatgattcataaactgaaaattcgaccactgaagatgaggacttctctattcctctcttcaaccatttttctgactaagctctgtaagattcaagcgtgacttaaaacaagctcacttggtaggaagccccatgtctatccatgtatataactttctattttccttgttatttttgacgtttttgtttaagtgtttcaagtttatttcattgaccatgatgaagtcaatggtcgaggaaattcaaaccaagtcaagaaagatctctaccgttgatcgagtagaatgagaaggagtgttttgaaccgttgatttgaatgaccaaatgagataagcatcaccaccgtttgattgagtgacttcttgaagtttattttggtctgtttgatcgagtaaacaagaacgaggagctctccaccgttggatcaaattttgtgcaactcaagaagatgctcgatcctttactcgagctcgaattatttggagccaagaagtgat

SEQ ID NO: 12447 - DNA, 562 bp, Arabidopsis thaliana columbia
aattaataagtataaataaatgcattcatatatacattaataaatgtaaaagaacatacatattctttcacccacacatgatattcttcagatcttttcgtagagagttctttttcagacattcctggatattttatagaaagcatatcctcgaacatactatacaaattaaaccaaaacatatatgagaattttcacaaatatgctaaatttttaaattaaactatatcatatacctttcaattggttgaaaataatcacaattgcgtaaaacatattcatgtgcgcatatcaagtctttctctgaaagccatacttcatgcatttccccacttggacgaccaacgtgagtaaagatatttggtactccaggaacatgatacacaggggcttcaccttcattgaatcttgttaacctgatcgaaataaactatattaaaagtcatgattttttattcatagaaacttaaatttctatagatatttgattaccttgattttgtttgtatactgtcggcaaagtagtgctttgagaaataagcaatctcgtcattgatataag

SEQ ID NO: 12448 - DNA, 694 bp, Arabidopsis thaliana columbia
taaaggatgatattaataaatctaaaatcataatttttaaaaacaaaaagtttttttttttctacaacaacaaatgaaatagaaagtatgcatatgttatatatttacctctcctttattaactgtgaagctatgcggcgtgaagtcccctcctccaagcctcatagacatgtcaccttcaatcaaattaaaaatacactcaaacccatctgaattctcgtagtttgtttaataacaaatataattcttacatgtttaagtaaaaaaaaactaaattgtcatgttatgtcttttccttagattaatttccctatgccctaacacaagacaagagaatgtagttttccaaatactttccactgattgatgaaccctagattcatattttctaatggttattctttcttaagacatagcagatttagttttgtcccatcgccaataacgaaactcaaatagttatattatcgtattacatattattagttttattgtaagagaccaaagctttacctctcctcttcctcaacgatgacctcggcgtaaatgtcccagatgctgtgataaacctccctttataatcacgatacgtcttcggcctttctctcttcctgctcgcgtcgttgacacctccaccaccgtggctggtgcgcttcggagtcttggtgacggaaagggagagatgggcgttgag

SEQ ID NO: 12449 - DNA, 854 bp, Arabidopsis thaliana
cacaatattgtagttatgtttcaagatctctttgtaagaactctccaaatgtccaaatatggctagaatacccacatcaaaggcgaactgcaagagacaagattatcttgtgtattaggagatctcagagaacctgaatgtgtgagttcgtttgctgtatacatctcaacatatatataccttcttcatctcctggtaggtggagacaatcggcatattggcccaagattgtaaggaagaaagggcaatgtgctcgatatcagggatgagtttacggatggtttcagggtagaaagaggattgaacaagtttccttatatgggaatgataatctccttggtggaaaaagagtgcagagggtcctatcagcttctctttgcttctcggataagttggtttgaacatatgggcatgagtcacaagtacaaacctcgcagcctcagggctagccaacatcacgcatggatagccgaggattcgggttttgaatatctctccatatctacacatcagaagatcaaacacttctaaatctaagagcataactaaaaaagtaacttgagggacaaggtttcgaaattacctcttttgcttggaggtgaagaaaacattggggttttgtgaatagagttgtagagtctctcctaagtaaggccatcccatggaaccaggaggaagcttacctctactgttctttttcttgtttgaaacaatcactcttaccaaaagcaagcataagatgaggattggtacaaccaagaaccaaatttcagccatcgattattatttaatttaatatgaaatgtttcgttgatgatagaatgttttggaggatgaatttttaaggaagaaga

SEQ ID NO: 12450 - DNA, 533 bp, Arabidopsis thaliana columbia
gagcaaacaattggatggaagtggaagacaaagaagattagcttcacttcacaaagaaaagtaagccggctatgccaattgttattgtcccttccaggaagccgaagttaaagggcaacaaagagatcaaaccacttggattaaacccgtttaacaattatgtggagagaccatctctatgaaaaagaagatttagacaaccatctcttacaacatggagttgcgataagatggcctacgacaacatccatagagtaaataatcatattacaaaagattgtaccgatttgaagaagcatcttgctgagctacggacaattggtgacctcgcaaaacctcgacatccgagagttcgtgcaaacttaccacaaagaaaaggcggaagtgaaaattcatcactagctgagaaaatacctaaaacgtctaatcccggagttgcttttggttctaagaagaagattaaaaattgtcatgaacgagtctaagttttgtagagattcgatcactatacaatcaaaaagtttaagggaatg

SEQ ID NO: 12451 - DNA, 223 bp, Arabidopsis thaliana columbia
tcaaatagttttaccggcaaaataccggctgaaataggaaagttaaccgagcttaaccagcttattctgtacctaaactatttctctggttcgattccttctggaatctgggagcttaagaatattttctatcttgatcttagaaataatttgttgtccggtgatgttcctgaggaaatctgcaaaaccagttctttggtattgattgggttgattacaacac

SEQ ID NO: 12452 - DNA, 487 bp, Arabidopsis thaliana
gaggaagtccgagattctctagaactgaatatggatagaggaactagttacaaggataggacatattttagtgagaatcatgaagaagtgggtaatgttgtagaagatccatatgtggatatggtgaacgatgcatttaattttaacgtggggtttgatgataactatcatcaggatagttatcatcaggatggtacttatcagaatgtggaagaactggtccgtaaccattcaaagaaattctacgacttgttagaaggtgcaaatactccattgtacgatggttgtcgtgatggccagtcgcatttatccttagcatctcgactcatgcagaacaaggcggagtataatatgagtgaaaagttggtggataccgtttgcgaaatgtttacagattttttaccagaaggaaaccaggctactagttcacattaccaaaccgaaaagttgatgcacaatttaggacttccatatcatacgattgatg

SEQ ID NO: 12453 - DNA, 581 bp, Arabidopsis thaliana
cccgtactggtaaacttgagtgcaaaatataatgtgataggtggaaggtctgatgaggttgatggagggagaacatgtcggtccatttaaccttggtaaccccggtgaattcaccatgctcgagctcgctaaggtacatttttctcttgttgttacatataatctgatcactcaaaatctttgtatctgacccaaacgagtggatggtgggtgagcaggtggttcaagagacaattgacccgaacgcaaagatagagttcagaccaaacacagaggacgacccacacaagaggaaaccagacatcacaaaggccaaagagcttcttggttgggaacaaaggtggctctacgccaaggactcccacttatggtcaaagatttccgtcaacgtgtctttggcgaccaaaagcaggattcttccaccacttcatcatcaacagagtaactgtcgctggagattctcgtttctcttcgttttcatttttaattttgatatttctattcctgtcaatgtagtgatattgaacctcaccgattttaaagttttattttttttaatgcaatcaccgtagttttgagct

SEQ ID NO: 12454 - DNA, 459 bp, Arabidopsis thaliana columbia
cctcccaaacattctatcaaacgcttcaaacgaatcaaaccacaaacaaaaacagagcaattttacattcacatcgaagacacaaacacaagctatcgaacatttttcctttgctggattttccattccaagtatttctcgacaacatcaagtccacaaaactccgtcacaataggcattgttgctggaacaggcaattcgaagtacatatcagtcccttgtgtattactattccatgacaggatctgtttcctagcttctttaacagctgctcgtaccgcgcagtgaacagaagccgctaaaagcaatggcggttcacccgaagctgtatcgaaaccaaaacaaaaggtttagaaagaatttttgagttgttgatattttgggtttcagtagaagagaaaatagataagtaagtcacctttggatgaaaggacacgattcttgtgttgtcactgttga

SEQ ID NO: 12455 - DNA, 533 bp, Arabidopsis thaliana
tagtaacgtccgccagtgtgctctaaagcgcacccaggaaagcctcaccagtatccgcatgatcaaagcctttggtctggaagatcgccagtcggcgttatttgccgcggatgccgaagataccggcaaaaaaaacatgcgggtggcgcgtattgatgctcgtttcgacccgaccatctatatcgcgattggtatggcgaacttgctggcgattggcggcggtagttggatggtggtgcagggcagtttaacgctgggccagctcaccagttttatgatgtatttaggtctgatgatttggccaatgctggcgctggcatggatgtttaacattgtggaacgtggtagtgctgcgtacagccgtattcgcgcgatgctggcggaacggccggtggtgaacgatggtagcgaacccgtgccggaagggcgtggcgaactggatgtaaatattcaccagttcacgtatccgcagactgaccatcctgcgctggaaaacgtcaatttcgccctgaaacccggtcagatgctgggta

SEQ ID NO: 12456 - DNA, 613 bp, Arabidopsis thaliana
cgctaaataataagagacgcaacatttcttctaactttatcatcgaacaccaacttcacaagtttgtcgtgtattgtttccccatctatctgcacaactctacaccctctttcatcggtgttaaatacgtatttgtgtttctatccccaattactggaaataacaaataccggaaccggatcaaccatatcgggagaaggatgaaagacattaaagaagaatgaggaagacgatgaggaattagaagttctggtgatgtgaaaaactcaggtgaagaagaagagatgaaaatatttggccctattttattgtcctttaatgatgctgacatggaatgatgacgtggaatattgcagtcgatgtcgttttaaattgatgaggtggcaagtaagccactaaatgaacatgtaaaatttgtcttataactcagccaccaaacaaatctataagtcagtcgcaacatgaatactattacagtaattaacacacaaaaaaacgccaagttaattcagccttgtaatgtcgtaactcaaataactcagccataacatttaataactcggccgtaattgcatgatattatagtaattaaccttttgcacataagtcagtc

SEQ ID NO: 12457 - DNA, 607 bp, Arabidopsis thaliana
tgattcaagcatgtatcatttcagtgagcatgtagctccagcgagagagagtaagaacttgagtgaagctcacagaaacaataacaagttacagaagtggtgcaagaagcaagacaagttcatcatcaaatgtctaaagactatcaagtctctgaaaggccatgctaagctgctcgacttccactacatctattccgcagggacaacctcctcaggacatgccatcgaggagatttgacgagcctgagccaagtcagctcagacctgagcctagtgcgcagagagtctcacatgtccctgccagacatttgtcattcgagtcccgggagcacaagaagaagaagaaggctatgctcgcttgctctagcagcagatcacgccttatccattcgaggagatcaattcgaccacggtgctggccgccacagaggcattgaggttgagtaccacatgctggagctaagatagaacaaggcgactcttcaatgtcctgggagcaatcacaggcaactattgacgaccaactccgttcactcttcgactgaggtaagcgcatcactttaccattgtataatacatcgtttgtttaatttatttatgtgaagtg

SEQ ID NO: 12458 - DNA, 580 bp, Arabidopsis thaliana
gtatcttagattcatatatatatgctactataagaatcaatctaagcaactttgagagttgaaaacaactcttctttttcattattttatgaaatcaaagctaaagtgttattgttcttggtagcaaacctaaagcttcttcatttcttttctttacatttcaataaagctcattgagctattgtattttctaatattagatttctttgtcaataagctcatttgagcataagtttagaaatgtcaacatggtatcagagccacctgatcgttaggccaccctgttagatgttgttcccacatatgtttgagctttagagtgagtgatttatgagcgtgagagggggtgttaatgaagaaagtctcactctggaagtttgagatattatcaagtagtatatacagggttaggaccactccacctattgccaattggttttaggttggaaggccatgttaagcctgaatctatcaaattcctctttcactcagaagttgatctcctctctgtccaacgacgtgaaccgtgggttttcaacattggctcgtagcgtttcaacgttgtaaggagaattgttga

SEQ ID NO: 12459 - DNA, 678 bp, Arabidopsis thaliana
cgtaaactaaatcaaagacacgtaaatatatatatttgatataaaaaaaagctttagtatcttccgccacacgactctttttcatattctagaaatcagacgcggaagttcttgccggagtaggtctggccaaattgccagttactgggagcaatgttgttggaggtggagcttcggccatcagaggttttgactcggaaagaaagagattggccgacaagaagtgcgttggattgccagttttgtccccagttccggctcagatctaaccattgtgtgttggatcctttcacactcaccttaatgacgtctccagctccggctacgttagtgaccagcaccaagttgaagtacttgaatccattgattgtgaatctgattcctcccttcttcctacatgggatcctacaatcacacaaaaaataatactgtattgttagttatgtacgaaatattaatgttgctaataaaaaatttgacccggcaaatgtatgtggtggagtgaggaagtgtcggtcctttgctcttggctgagttcaaggcaaaataatgtttgcttattctaagggatggagatatgtgtacatgactcaatcaaccttgggatttttaacgcggatccatggtttaataactgacccggggcttaaggttttcgtaattttacattgggatcct

SEQ ID NO: 12460 - DNA, 1009 bp, Arabidopsis thaliana
gctttgtagccttcctgtttccaggtagttgtggccacaggagttgtctccggttttaatgattctcccattctcctgaaacccaaggaaacatacatgagcttaccaaaatatatatgatcattgtgtagccagtaaagaaggctggtttggcaacaatgctcaccatgatatgtatgagagttggtttgatgtagtcaagtaggcgttggtagtgcgttatcatcagaacagagttttttggtgtcaaaagcccgttcaccgcctttgccacatcttgaagagcatcaacatccaaccctgaatcaatctcgtccagtatagccaactcagctccaaggacctgcaaggacaggaaaacgttgcattagcgtacttccatgacctctttccatatattgcttacaaagaataggagactaatagtgttctcatgttatcgataaaccagaaatgaccactccttgggaggcagatatttcaagatcaggaaaatataaagagatatgaagacatataacatgccatgtctttttagctaaaactgcagtcaaatacttgtaatagaatactaactgccatgcaataaccgcgtctacttatggtaaaacctgtaactgcttaagctaatctacccagatatcctgaaattcctaactattagccttgtggttttgcacactgtagcatggaacaagcttagtaatccactaccttctctaatcacatttgtttcttatcatatgcagtccttatggatactgagaaacaagggaagcagaaccattaccgctaactgtagaatctcattgcgtttcctttcaccaccactaaatccttcattgacatttctgttgagaaaatcggtcttcatattcacaacttcgagttttgataccaagtggctgtagaactgcatgagccatgtgatatcagtaagacataatacatagacagttctacaattgggaccatttagcaaacaacaacaagtaagaaacagtgcaaa

SEQ ID NO: 12461 - DNA, 562 bp, Arabidopsis thaliana
gtaacgtccgccagtgtgctttaaagtgttggcggtttgctcaaaggcatcggcgtcgaggttttccggtacaccagtgtagtagagcgtgttgttgtggattactacatcagaccagcgggcttcagcatcgatacgaacgatagtcatcattttgtcctcattatacttccattttcgtgctgcaaagactgccacaatgtgaggtcgccgtcaccacttcaactggcgaaacgccctcatcctgacataatccctgttcaaatcaacagggggtagtgtgacggacgattttgcaccagacggtcagctggcgaaacgataccaggctttaagccgcgagaaccacagcgacagatggcggtacgtcacccaggcgatagaaaaaggccagccgctggtggtggaagcaggaaccggtacgggcaaaacctacgcttacctggctcctgcgctgcgggcgaaaaagaaagtcattatctcgaccggctcaaaagcgttgcaggatcagctctacagccgcgatttgccaacagtctcaaaggcattgaaatatacgggc

SEQ ID NO: 12462 - DNA, 589 bp, Arabidopsis thaliana
caactagtcatttaattttgtaaagacaacattttataaaagagaaaattgtaattggtcaacaaatgaacgaagatagtaatcaatgtccgtccggttttgaagaatcgtttacttttcaaatctgaaaaacgcctaaaagagagagagaaacaaagtaaatataggggcatcatcgtaataaaagaagaagaacgaggctaaaacagtaacgcaccttcgtctacttaaatacaagcgaaaacccaaatcggttttcactccccgtcctacaggtcgactcagtctccggctagttcgactcggtaaaatcacgattactttctccttccatttatcacgatcgtggatccagaaactctgaaagatggcgtctgagctgacaaaccggcgacacgagatagagcaaccagaagcggaatcttattatccaaagccgataaagccatggttcgtagcgattcgtccgatccgttacatgctcagagaacagagactcgtcttcgtcctcgtcggcattgcatcgccacattaggattccaatcttctcaaatcatccaccaccaaccaattccttacgacgtggatc

SEQ ID NO: 12463 - DNA, 516 bp, Arabidopsis thaliana columbia
cagactctacgtcgtgcaacacgaagctcgtgtctggtacatacccgagtctcctcatctctttacccaggtcttgaagatagatgtaaacagcttctgcttctggatgtgatgtatcatcaactagaaatgtatgcacttgtgtctccatttcaatccaactacaagctacttctttttttacacctcgatcccgcattagtttacgtacccttgccacttcctcccactggccagtagctgcgtgtatgtttgataagagcatgtatgtcccatcatgttctggtatgagaccgaagagtttgtctgcagcgatgatccctagttccatgtttccatgcactctgcaaccagaaagaagagcttcccagatttctgcagtaggtttgaaaggtaatgattcgattacactttccgcatcagagaatttccagaacgacaaagcaaatcgatcagccttgcgtaatgatctgcacctggaggtatacggtaaacagtctccatagaatcaaaata

SEQ ID NO: 12464 - DNA, 641 bp, Arabidopsis thaliana columbia
gaacaaccacttttaaaccagatttcgctagaacagaagctgctacgcctcctcctgaaccagacccgacgaccacaacatcacattttattctgatcgcatcatgctccgtgtcaagaaccgcttctaggcctttatgagcaagtgattcaagaagagtctgctctgtttcttccatcgtctccactatccctttctcaagtggtctttcgttatgagtttcagaaggtttgttctcatcggggttaacacgataccctatggcttcccatgccgggttttcgccatttggattcacctacacaaaagaaacgacatatccataaattcttgaacattttctataagtagctctgtttttacgacagagttaacatatataatataggctctgaatccggattttggtttagttcacgattctcaaaattttggatcggtttattgtaaccaaatcagaaaatgatctagttaaatcgcttggtactcatttaagatcaaagtttttaataatgggatcaaattgtttatgtatagtaaaatagtaaattttagttataaacaaatctcatatgaatacgttacgtacggtttcaggtttaagatttcctaattttagtatatatgaatttggatgattt

SEQ ID NO: 12465 - DNA, 158 bp, Arabidopsis thaliana columbia
gatagtgtcaacgaacagatgctctctacaggaaaacctcctatgggctttggttttgctttgcatgaggagcactgtaaagcagtagcagatccaaaagaagaacacctgaaaaagaagttagatgaagttactaatgttcatcacttaaacgtcaa

SEQ ID NO: 12466 - DNA, 509 bp, Arabidopsis thaliana columbia
tgatatgctaagctaagttccttgtttattattactatttattctgcagtttgaaataagcttgtcattgcttcttctaattttacacaaagctcttcaatcttctttttgctgttattttgagttttcttgtgccacgagatgattgctcttcaacatgcgcttattcttctttccactgaagcattctcttcctcattccaagcttctaaaagcatttgtttcacctcttcattgtcctttaatctcctgtcatatcaaaatatccctttttgttttttcctaacaggttcaaaggaggtgacaattggtctattatcagagccttcgaaaacaaaaatactcacttcttggacggtaagcctcaacccaatctctattttccattgccctatagtgtctaaccggacaagatgagtgtatctctgacccctccaagaaagaaattaccagaaaacttaagatcatataagtcacattttgacatgaatgacctcaagtccgtaaag

SEQ ID NO: 12467 - DNA, 565 bp, Arabidopsis thaliana
  unsure (1)..(565): unsure at all n locations
gtaacgtccgccagtgtgctctaaagcagcatgattattgttgcgtcgatctacatcagcagtgcgctcgtggatggacgcgcaagatgattgttcaaccactggccattatcggtatgcattttgacagcattgctgcgggtaatctggcgcgtccgattgcggtatatggtcgtaatgagatcaccgccatttttgccagtctgaagaccatgcagcaggctttgcgtgggacggtaagtgatgtgcgtaagggaagccaggagatgcacattggtatcgcggagattgtcgcaggcaataacgatctctcaagtcgtaccgaacagcaggcggcatcgctggcacaaacggccgccagtatggagcaattaaccgccacggtagggcaaaacgccgataacgcacgacaggcgtcggaactggcaaaaaatgccgcgacaacggcgcaggctgggcggtgttcaggtcagtaccatgactcacaccatgcaggagatcgcaccagctcgcaaaaaattggcgacattatcagcgttatcgacgctttagagnnnnnnnnnnn

SEQ ID NO: 12468 - DNA, 962 bp, Arabidopsis thaliana
taaacatatggtaatattcaaacaatggtgatctcataaagacataaagcagaagcacaaacaattccaacaaaatgtgaatatggtataacgcacgtaaataatggtaatctcatttattgacgacacaaaaacaaaacaaaaacctaatgtttgatactttagcattggatttaataccaccaaattaccaacggggtagcatgggcatgacggtgaacttcatggtaccattgctgcaatgagcaccgtcatgctcgccacacgaaatgtagtaaggcttcatctgttttagaacaaactcaaagccttttccagcaccttgcttcggagacgcaatcattttgcctttcttcacgtcacacttttcataactcgatgggttcggaagcaagtaaacgctgtgcgtgaacggggctggtgggttgtatttgaaaactgcatccgcatgaatatttttgttaaaattgctataagtgtagaaacgtatacggcagactacttcattggaatggaacctaaacgtatttatgtgtggatacgtaaatatattttttgttatccatacggttaggaaacaaaatgttatggatagattatccgccccaaaaatcaagtggtctcgcaatagattactcgaccgccatcaaaagtatatgcatttcctaaataatgcgagataatgtctaaaatgactcaccaagtatgtcattgagaaagaatggagcagtcttagaagcccagtcagcgtaattgaatccataagtccactctttgtctccaccgactatgatctttctaggtccattgtaggtggcattatagttttttgaatgacctccatatccccagcccgaacccgagccgccagatcccgagctgtaattgttgttaggcccatgcccaacccgagccgccagaccctgagctgtgtgtattgttgggaacccgccccaacccca

SEQ ID NO: 12469 - DNA, 540 bp, Arabidopsis thaliana
ctaaagatgtgcctcttgtgtagtgcctgaatcaggctcaacggggaaatgtgctgctgacatacctgccagagcggtcaataggcggatcaatcagtcaaatcacgcaggctggcaacctccgccggagaatgggtatagcgacaaggaatagagagactggcgcagggaataccatcctgctcaacctggatataaccggtttctgttatcacgccgggagccacttctcgctgcaccggaatgttgtgttcaagagccgtctgttccaacatccgtatcaggcgaggaggcgtgattaatccggccagcgttccccgaccatggtagttcaggcaggtgatcccaacgccctgattaatcctgacctcggaataatcgtgtaaatcaggggtgtcacacgatggagtgatatcaataccaatcgccaggtcaggttttacacggcgtaatacgggaacaatgccgcggatattaaattcttcctgtaccgaagccaccagataaacggcgatatcaagctccatagtactgatagca

SEQ ID NO: 12470 - DNA, 565 bp, Arabidopsis thaliana columbia
catttgctttctgcagataagtaaaaacccaaaatcagaagacatatccatccacctgttcaaactctaagtctctaaaactagtaaaagggtcgcaatttagacaagaaaccatctaaagtcccaacattttgtctacggaagctaaaaggagatgccaagaacatggtcatcgatccctttcaatctatctcgataaacccacttaaagaacaacacgaaatgacatctatgaacccaatgaattgtcaaagcacgaaaattgagctggcgaatcaattaaaaaaatcaaaatttacggaaagtactgaccgattcccaggaagtgcgacgtttgcgttctaagacaggagttgaatgaaaaaacgcggttttgagctgagaagaatagctttgtggtcggagaatcgctgctctaatggcggcgttcatctctgtgagatcggaggagaaaagtttgtgtctttttcgccgttttgcaaaggaagaaaccaaaagccgatgtgggtaacgtgactcgggcttgactcagtcgatctgacccggaaaagggcattttaatatt

SEQ ID NO: 12471 - DNA, 539 bp, Arabidopsis thaliana columbia
tgtagattgagaagcaagagttcgggctcaaacctatgaattgtcctggtcactgcttgatattccagcatagggttcgctcatatagaggtgtgactctgttcctgttgtgctgttcgatatcatcaaaaacagatctatgaatgatattagttgtagaaattaaagttcactccataacagactatcaaaactcttttgtgaaatactaggtgctgattttttcaatgacaggagacttgctccaaagtgtaacttgtgatttgtaacctatcaccgtggacaatatgactactgtttctcctttatgaatcttactaaagaaattgtctatcatgtatcttgactgacaccattgttttgcttatataatctgatctgtagagttacctatgagactggccgactttggaagcttacaccgcaatgaggcaagtggagcacttagtggattgactcgtgtccgacggttccagcaggtagattttgtacctagtattacttaattatgattttacgctttccatgatgcatatttg

SEQ ID NO: 12472 - DNA, 510 bp, Arabidopsis thaliana columbia
ctttcaattatctaagaaagttttggtaagtcttaatatacattctcagtttcctgcacatatccagctaatcccatctgatcatatatctcatcaagcagcaagcaaacctcatctgaagctgagtgagacttatcagctgcagcaaacagatggtctcgtttatctatccgaatcgaacttgtcccaggacatatcttttctatacccaactctctcatccttcccctaatctctgcaacatctctccacctgttttgttctgcatacatgctaactaaaaggaaataatacccactattcatcggctccaaaaccatcagtttgttaaacgctatttcagctatcacgagattcttgtgaattctgcacccatcaagcaaggccccccagataaccgcatttggttcaaattccatatttccaatcaattcaagagcctcatagatcaacccagctttgctgaatagatgaaccatgcctccgtaatgttcaacattagagacaatg

SEQ ID NO: 12473 - DNA, 1115 bp, Arabidopsis thaliana columbia
tgcattctacaaaatgacaagtttgtttcattggtacacatattttccccatgtgacatttaaacatggaataaaagtaaaaagggatacaaaatgtttaagggagcttttctctaatccaaagccagtcctattttatgtcatgttgcctgattaaggccctgaaatgcggaaaaagaagtgttagcagttgagaaacttaactttgtttagatggaaagtgaacatattgagtctcgtatggatattttacctcaacgcttgaaaaagaatgacttaatcttttattactatgtctggaccaaaagctcttcttcgaggtagaatccctggctttactccacttggtgctgacggaaccgaagtgccatttcataaaagacttagacgtggagcctttggtattcgaactaggatccatcttcagaccttttccttctcgtttccctagattctggaacataagatcctcacattcactgcggacataactatctaccacacggttcttacaccttttgtaactcgttgccttcaattctgcctcggcttttagagctttcctcgataatttagtaacctgtgtctctgtgcatatgggacacgtaggatcatacttctctgtttcatttgtcattgtctctaagcatgccgcatggtacacatggccgcacgctagaccagcaggaattggaaggtcaaacctggcaactggagacctttcagttaaaagctttgagcaacgcccacaagtctgctgatcaacagaaggggagcatgagaatctgctactactacacccacttagtcttcgtcgtccggaacctaagtgctcattatcaaaagaccatctctccctttgagactgagccacgagctcacaaaaggcgtttatggaccagccaccttcagaagaagcaaaatgggacccagtggcagtgtcattactacaggtcgaaagcacaaaggacgaccttccttcagatgttgagtaattattgggagatttcaatcccaaagtttgactatcagaaacctgcctaaacaactgctgcccaggtgaacctcgagcacgtctagacggagttgatctgggaggaagtgaatgtgtgtga

SEQ ID NO: 12474 - DNA, 595 bp, Arabidopsis thaliana columbia
  unsure (1)..(595): unsure at all n locations
ctnnnnnnnnnnnnnnnnnnnnnnnctaaagtccgaagttggcgatgatggcaaagccggaactgctgtgggttatggccgcttaagtgatgatctctcaaaagtgaccgacttccgcaccgtctttcgccagatgccaaaactgtctaccggcaaccattttggcgggcggctggtattcgacggtaaaggttatctttttattgctctgggcgaaaacaatcagcgcccgacggcgacggatctggataaattacagggcaaactggtgcgtctgaccgaccagggcgaaatcccggatgataatccttttataaaggaatccggtgcgcgcgccgagatctggtcttatggcattcgtaatccgcaaggaatggcgatgaatccgtggagtaatgcactgtggctgaatgaacatggcccgcgcggtggtgatgaaattaatatcccgcaaaaaggcaaaaactacggctggccgctggcgaacctggggaatcaactattcaggctttaagataccggaagcgaaaggggagatcgtcgcgggacgagcaactgttttttctggaaagattncccgctgtgagcgcatggc

SEQ ID NO: 12475 - DNA, 566 bp, Arabidopsis thaliana columbia
tccccgaagtatctaaaaccatcaacagactcaatactaaaaggaccccaaatgtctaaatgaatcaaatcaaatggactagacgctagattattatgagaaacatatgctaatcttttctgcttagctaaaggactaattctacaatgcgaacagtagatgaaacagactttaaagaaggaattgaactaacaagtttctgtaatgcaggtaatgacggatgcctagacgctggtgccacagaagacaatcatcttgaacggttccagtgaatgaactagctgcaggtagtgatggtgagaaggatgtacgttgtgtctcaagaatatagagattattgtaggttttaccctcccaatcatcaagccccgagtaagttcctggatataacaacaatcagcaaagaaatgagccgagtaagacaaggttttaacaagacaacagacactaatcaagttaaatttgaaatcaggaacaagtaaaacattatgcagaatgagagtagacgtgatgcaaatggttcctgtgtgtgtaattgcaccctagtaccatttggtaatgtacag

SEQ ID NO: 12476 - DNA, 490 bp, Arabidopsis thaliana
aaaggttgatggagctgaggaagaaattggaaaggagatagtatagtatggatgaaagaagataaaagtatatttgtgcttgtcgagtgatttgacatgattagctgtcatttgagaggatttccctcaatgggataagtcttcttttgtatgtgttgagtagtggagtattgaaggtatattttctcggaggtagtgagatgagtgattgaaaatagatgagattagtaataaaagtggtagaaaaaggggttggttaagctaaaggtaatgttatggtgggtggagttattgtaaaagataatgagatgatgggagaaggtgatgaggagtgttttggtggggtagatggtgagagaaatggtgttaaaaactgtagagaattggatgtaggagtgatgctttatgtaatagttgaatggtgttgtgagttggggaaaagatgtagctgtatagatggtataatggatagtggtattgaaagagtagt

SEQ ID NO: 12477 - DNA, 234 bp, Arabidopsis thaliana
gccagtgtgctctaaaggatgctgaagctgaggaagatagaacgagaacaagttgaagttgttgaattcttaaaatatccaaaacgattcacacaactcggaaaccgtaatccagcatttcagcacatggagggacctccggggacacgtaagacgttgccagctagctacactcgcacgagaggcagatattccagtctttagtacctcaggatctgacgttctagcaatgta

SEQ ID NO: 12478 - DNA, 638 bp, Arabidopsis thaliana
gttggagtcatttacagatgccaaagcaaggaaaaaaaaagtgtatgtaggagaaaaaaaaaaacgagaaataaagacaattaaactttgcagaaattgagttgtccatttattgtgttgtttgcttctgtacacccacccaccaatgcgtacctccttttttacactgaaacacctgattcaaaagctccacctctgttcatgtctggatctttggacgctcctctcgcctgatgttttccttggtgctgcgaccaatacccgtatgccctcaagactctgtctagcagttcttgtggcaccggctctcctcttcgttgctgtggggatatacttgctgtgtgaactagcgtcttccatttgtcctgcatattcacatgttcttgagatattaacctgactgtaagacgtgatatgttccagattacatgtttgtgtctgatgtgtttaccttcaagtccacgtaagtccgatgatctgcatcctcgaaagcacgcaattttacatcacgccatctgtgtgatcagatatatcgaccattagcttttgagctttgacattatcccacgaccaaactacatgagttatgaaagaactagtgttatataccttccagtcccgagttcctcaactgcttg

SEQ ID NO: 12479 - DNA, 548 bp, Arabidopsis thaliana
  unsure (1)..(548): unsure at all n locations
tagtaacgtccgccagtgtgctctaaagtgcggaactgtctggttttgcacacattcaatgaagtgccgcgcacagccgacaaacccacgttgctcaagcgtactctgccaaccaggaatcggtttatgcactacgccctgcccgcgctcctcacgccattcgcgcatatccgtaatgtcgatgagcgcaccgtcagtcacggcctgcacggtttcacgctgacttccggcacggcgatgcatacaggtggtgatctgcaaaggaccagccgaaaaatggtgctcggcaaacagcatttcgccagcgtcgttagtcagtagcgtaccgccatccagagaggctttgccgcccgacaaccacagcgcggtatccacacatgcagataatcatccagcaacgtgaaataaagatcgtgtggcccgacgctattgctacgatgtttatccattcttagcgaggctgcggtggcgagttgcgtttttaactcactgtagagtggtgcgaaacgacggttaaaactgaccatcaacgtcagtctttagagnnn

SEQ ID NO: 12480 - DNA, 517 bp, Arabidopsis thaliana columbia
ctagaggatcattttggagaggaaggagttctttggctaagatcgtaatacctgttgctcctccgacaagctcaaataacctgaaaaccaaataaagttttaattaccatctagaccgtaaaacaaaatttgtatagacaatggggtagacagtgtccaaaaaatggttgaagacaactcctcgtatccatgaaataagtggaatagtagagttgctaaagatgaatgcaagaaagggaagtcaaaatattatgaaagagaccaattataaaaggcatcggcaatctccaacaaaagtataggcatatataaaataaaccaaaccttaaacacaagaaattcaagcctcactacaattaattctacatcagcaaacatgggaggtgggagatcgtctgatgtaatgagagaagtaatgtaaagttctagtaatctgatatctagttctcatcataggtttaacaatacgcactcaacaaatttagaaacatagtatcagaggaaggaactgtaggat

SEQ ID NO: 12481 - DNA, 432 bp, Arabidopsis thaliana columbia
tcaaaatataattatacagctgtaaaggattagggtatttcagtaaatacattcaaccaaccccaattcttttacccattaacatcttagaagattttacaaaacccctatcacttagttttcgacttttcgggaatatattagccgatgaatttagtcgttgttgtccttgtttcattagtacctttagtggttccgatacctgtcacgtgccttggattatttacaagcgggattcataaaaaccctccgtggactctagctgcggcttatataggtgagtctatggaaggtcatcattaacgggtggttttttaatatgcctttttaggttagcccaattaagtatagcgcagttggcgtacactatgtaagagacacttgtatatgtgacatctgatactgcctaggtatatatgagtctaagatcta

SEQ ID NO: 12482 - DNA, 543 bp, Arabidopsis thaliana
tgttgtcttgttaaaaaactttttgctttgcttaaactaacattaatcgattcgttttttattatttacagattactttcagtactccttttgctctagcatccatattctcaagctgctccggtgcaggccaaggtaaatatatacatctttaatattaaagttactaaagttacaaatatgtgggaccgtaactattatattttggtttcatccaccttatgcaattataacataggtatttaaattgtttttgtgatgttttgatttacaggactttcattaggagttttaaatttggcgattgtgataccacaaatgatagtctcactaggaggtggacctttcgacgccttgttcggcggtggaaacttaccggcgtttatggttgcagcaattgcagcggcgattagtggagtattagcgttaaccgttttaccttcaccaccaccggacgcacccaaggcaacgaccatgggaggattccctagtttactattttttttttttaatgaactcatcaaatacagtattactgtgcga

SEQ ID NO: 12483 - DNA, 487 bp, Arabidopsis thaliana
cacattcacttaccattaaaccactacatcattagtctcattttcctgaagaaagaattggtatataaagtacctggcacaagctatgagttgaatgacagatccaaagagaaggaaggtgcagttaaaggctaaaccaacattcctccaatgcttcccaagcaatccatcaagaacctcaaaccacttcacattaaccaacaacatgtcaaatgtttttgtacaaaaaacatgtcagatatatactttgaataatagaaaagatcagtaaagaaacctgaatgacatggtttctgaagttaactttctctctttcctttctggttctgtattcaacatagagaatattgatgaggtaagcagtccaactacctaagatgccataaaagagctgacacagaccccctgagagcctccccagctgtgagaacgagtatggctgtgtcaacagcatttgctccacctatatagcagcacattcatgaat

SEQ ID NO: 12484 - DNA, 597 bp, Arabidopsis thaliana columbia
taagtacttaaactcggtcgaggttagtaagagaatgacactagacaacctcaaatcaagccttcccaatgtctttcagatgttgactgctctagctaatgtctttgccaatgggtttgaatccgttaatggccaaaccggtacagatgtttccgacacatcccaacattccgatgaatctcaaccctaagaaaagacctcattccctttttgatgtttgtttctttcttggtgcttcagtgaagaggtttttgtatatgaatgactgtaagagaaactcaacttaacaactttgtccagctccaaaatctgaaaagggtattattgtgttgctgcttgttcatgaatcatgagatcccatttatgagttagaaggatactcaagtaatttctctacttatcacgaagaacacaacagggtttgattttctttgcaggtgaaaattaagtttatgaaatggaaaccaaactaataattttggttaagataaatatatgtttcttacggaagagacaatgattcctagtttaacatgaacttatctacatctcgacgttgtccagtcaaatgtatttcttcgaaattgtaaccggttg

SEQ ID NO: 12485 - DNA, 548 bp, Arabidopsis thaliana
caacaaccaatacccttctcgatttcccaaaaaacgcaagcaacacaaccaccgatatccagatcaccataaccgccggaaccgcaaccgcagccgccgcaaccatcgacatggctccaaacacagctcctaacaccacagacgcgtaaaccgccggtaatcttgacggagacggcgatgacgtgtactggagcttgtaccagctaagcacagatgtgagaaagttccatgaggaagccaggagaatcgcgtagacagctacaaagagacaaacccatgtccgtctcttgctcatgattcgcataaagataaggtacgatcttggaggagagccattcgatgttcttggcgatcctgttggatccatcatcggcgatctgattgagattttttattgagggattttttctttctttgtgttggaaattgaaatctccgtgatttgagatttgtgctgaagaactagaagaagaagaagaagaagaagaagaagagagagagcacaaaagaaaaagtgaaagtcttcagatttggcggaaatagattag

SEQ ID NO: 12486 - DNA, 955 bp, Arabidopsis thaliana
agcaaaagagtctaataaaggtgcttcaacagtgttgtatactgctgaaagaggaagatctcagttcaggaatcagcagcagcagaattccaaaggtaaaagcagaagcaggtctaactctaaatcaaagctcacatgttgtatctataaaaaaggagggtcatgttaagaaggattgttttgcgagaaagagaaagatggaaggtcaagaacaaggagaagcaggggttataattcacagtcttgaattctcagaggctttgaatgttggcgaaaagctggttaaggacatgtgtgtactacactctgcatgtacatcccacatgattgctcgaagagattggttctgtagttttgatgaaacaaagaagaccacgattttacttggagatgatcactctgtggaagcaagaggtcagggatctatcagagttaacactcacggtggatccataaagacacttaacagtgtcaagtatgtaccagaacttagaagaaatctaatctcaacaggaacgttagataaacttggtgttagtcatgaaggtgggaaaggcagagtgagatacttcaagaatgatgtcactgctctatgtggaagtttaaagaatggattgtacgttctggaaggtgacacagtgattgaagagagctgtgttgcagagaaagaaacaggaaacacaacactttggcatagcaggcttggacatttaagcctaaacaacatgaaaatattgtctgggaaaggtcttctggataagaaagatgttaaggaactgagcttctatgagcactatattatgggaaagtcaaagaagctaagtttcaatgtggggagatatgatactgaagatgttttaggatacattcatgaagacttttggggttctcaaatgtacacctcactctcgggaaacaatatttatgcaataattgatgcaaactcataaggggg

SEQ ID NO: 12487 - DNA, 634 bp, Arabidopsis thaliana columbia
  unsure (1)..(634): unsure at all n locations
atttctccaaggttgttagactgtaaacgcttttaggcaatgtatacataaaatgacgatatgatatatcaccattgcttctccaagaggggtttgacaaatcaacaactaaattcttcactcgtgtggagacagcgtattcgatcagagcgtcgatcttatcctcgaaacccaccagatgggagaaacaaatctcgaagctttcgacgacttgatgttgagttatagagacccatttatccacagaacaaaagaatgaacgataagctacaattctcgaatattcagcatcggtgatatcaggattcacgtaatcagattccttaaaagaaaggtttgtggtctccaagcagagatacctccacctcttggagagaacactggtccttacacattcctttaacggcaagaaagagatgatcataattagaagaatgtcgggaagactagataatctgtcttgttgaattgaatccattgaaacagaagtgtggtgatgagtttcgaaagaagagatgtgtttgtgaattgtgatttaatttgatccaatggtgtgaacgtgacagaaatcgttaatcctctatattgtctttagaaagttcgtgatatntttggttttgatatggaagttttg

SEQ ID NO: 12488 - DNA, 578 bp, Arabidopsis thaliana columbia
gttcgtagagtattttgtattcttctggtaaatcaagttaatggtctcttctgttcttccttaaagacgaattatttttaaaaaaaaaatacactcaagtttcaagacaatgtgtgaaaaatagtaaagcagaatttacaaatttgtgcaaaacctatttgacatttttggctacaagtaaaatgaaagatctaaccttccacgaattcaaatgatttcaatcctttactcatacaatttacggacaccaaattcttcatttgatttacatcgtaccttgtaatggctccatgcttgtgacattagatcagaattcagacaggatcgtcatgctgttgttgtgtagatgtagtcgcatgagccgacggcggatgatgatattccccggtgataccgtgaagtgaactgttctaggctgccctgactgaagcaccaacgcaaactgtgtagccaaagctgcagcttcctgttcaatcgggttacattaagtcgataccagtgactcagtttgattcataaaccagtaagaaaacaaaaagactgtccggaaaaatccttgcatgagttcttatactact

SEQ ID NO: 12489 - DNA, 485 bp, Arabidopsis thaliana columbia
aacaaagctaaagagaaagaaaaaaacgtaaaaatcgaagaagaccggagaaaatggcgaaaccgttgggaacaacaggtgaatttttccggcgaagggatgagtggaggaagcatccgatgctatcgaatcaaatgagacacgcacttccaggtatcggaatcggtgttggtgccttctgcgtttacctcgtcggtgaacagatctatagcaaactcatggctccttcttctcaatcatcgcatcagaaacaacccgctccatctctctgagagaatcattaggtaaaataaaaatcaaatcttctcgaatttgttttgcttctcggaggtttatatcctaaatcgatttgacttctctgtgaaagattggataaacaaaaactttggcaaagttcttagaatgtcacgtttgaggaagatagagtaagatttttgcatatggttagaatcaacgtgtgggattagtcaaagtacatgtttttt

SEQ ID NO: 12490 - DNA, 600 bp, Arabidopsis thaliana
tcatacaaaacaagcatcctccaatatgatgaaacaatcaccattctcacttttaacatcaatctttctcatagctgctctttttactgcaactaccgcactcgatcctgcacccgaagacccgatttttgaattgtacatgcacgatatacttgggggaagcagtcccacagcaagacccattacgggtttgcttggaaacatctacaacggtcaagtaccgtttgctaagcagatcggttttgttccaccgcaaaacggtgtagccatacccaacgcaaatggggcaatgccaacggttaacggtatcaacggtattccattaggtactggtttgtctggaacagcgttttctggtcagaatctaaatgggattcagactcagttgggtcctgatggtctgagtcttgggtttggaacaatcacggtgattgacgacataatcacatctggtcctgacttggggtcacaacacttggtaaggctcaaggtgtttatgttgccagctcagcagatggaagcacgcagatgatggcttcacagctatgcttgaaggtggagagtcaatgataactaaattctatggaactataggatagg

SEQ ID NO: 12491 - DNA, 553 bp, Arabidopsis thaliana columbia
gagtctagaggatctgctcaataactggactatttatcccatctatcagaagataactcataaacagctgacaccactgcaacaagtcggtataggccaagttttcaacatccttagcatggcaatctccgccatcgtggaagcaaaaaggctgaaaacagttgaaaatgagcatcctatgtcagtgttatggctgttaccacctcttgtgatagttggaattggcgatgcctttcattatatggcgaatgttgcagtgttctatggagagttccctgagtctatgaggaacacagcaacctctgtgacctcggtggcgtttggaataccttctatttaagtacagctctaataaacttgatacagaggaccaccgcgtggttaccagacgacattaaccacagggagagtggacaatgtgtactgggttttggtcattggaggtgtcttgaaccttggctatttctttgtctgctcttggtatttcacgtacagagaaatccaagatgataacagacaagatcctatagatgttacaactaagcacaacatg

SEQ ID NO: 12492 - DNA, 509 bp, Arabidopsis thaliana columbia
gagcgtatatagaacaaaatgtcggtccctagctcgaaatctatggaaacccagggaaacttacgagttggagtaagcgagtgggtcggattttttgccatgattaacccaagaccaccagcatttattactgcggctatagcagcatttgatggtgtagatgctgcgaaacacaacacaacttttccttccattgtactgttgggattagcagagagcttctcgcagtcactgcaagttaaaagctatatcatgtccaaacacgcaatctcgcaggttttgaacgtattgaacaagcaaatggtcaaaacatgaaatatgtaaatcaatgttaccctgaaagtggactctctggataagtaagaccaacgaaaccgagttctggaccgccgtatattgcttgacctacattaaacaaagaggaaatcttagcataatgatttaaaactatagaaaaacagtttatgctatagtaaaacagacatatgtataccagtattgttatattg

SEQ ID NO: 12493 - DNA, 538 bp, Arabidopsis thaliana columbia
  unsure (1)..(538): unsure at all n locations
nnnnnnnnnnnnnnnnnnnnnnctaaaggctggcgaatatcgacttttttcggcaccagacgattttcataaaacagatctgccgtttgctgctgtaaggcggcaacctcggcgttaaccggtttgatggtggtaggagggcgatgatctaagtaagaggcaatcaccggtgccggtaagcccatcgtttttgccagtaaagcgatgctttgctcgcgctggctgcgggttaacgcatcggcctcactaaaggttgccagtacgccctgaataaaagcgccgtttttttctgcatagggacgagctgccagataaaacgatccagtttgattgagatcggtgccgtctttcagcacccgcacgccgccctgtaataatgcagcagagtagtagggatcccagatagcccaggcgtcaacgttaccttgctggaacgcggcgcggcatcagcgggcgtcaggtaagtgggttggatatcggtaaacttaagtccggcctgacgcagtgcacgcagtaaaaggttgtgtgaactggaacc

SEQ ID NO: 12494 - DNA, 1396 bp, Arabidopsis thaliana
catcgttactcgtacacgaagcaatcgatctcctaatccagttattgttctccgtggatctgctgctgctccttcttctgatgttgtttccgaagtttagatcgatctgcttttcagatgtattacgatgatggtactgattctggtcttagacctttaccaccgagtatgactgagtttttgttaggttctggatttgatcgtttgttagatcagatttctcagatcgagcttaacaccaatcggaatcttcgttcttgtgaacatccaccggcttctaaatcggccattgaagctttgcctctgattgaaatcgatccgactcatctcttatcggattctcaatctcattgcgctgtttgcaaagagaatttcgttttgaaatcatctgctcgcgagatgccttgtaatcacatctatcatcctgattgtattcttccttggcttgcgattcgtaactcttgtccggtttgccgtcatgagctaccggcggaggatctcaccgacggaaccggtgctgctttgactgctgttaccgctactgcagaggaagaggaagactcagctgcggggttaacgatttggaggttaccaggtggaggattcgctgtagggagaatccctggtggttggagaggtggagatagaatgatgccggtggtttacacggaggttgatggtggtagactcggtgatgagagacttccgagaagagtagcttggggttcgagaagaggtggaagagatggtggaggtagtagagagagaggtggtggctttgcgggtcggatcatgaggcttttcggatgttttagtggatcatctggatccattgctgctgctgctgctgcatcatccgggtccgggtccagaattcgggttactcgtagaaccaggtcgttctctatgttcagtacggcgtcgtcttcgtcaaggagacgaaattggctagcgtgattactagaattaccaagctctcttctcaggtgaaaactaaacacgaaagaacacactcttcttctgttaaaatttttcctatgttccttattaagtttttgtctatttcagtgtaatgattatattcattcctaaaatgtgaatctatgcgagtaaattgatacaaaattaggtgacatagtgtcttcagtggcaaatttaggaggatatgttactgtgagtctgtgactagataagtgagagtgtagatgaattgaagaatgtactctgaaggagattcatagttgttctatttgtagaaatcgttacgtgagtctatggattgtgatactaatgttaagcagcttaaccataaaatagcgaatgatttccaaacgatattatcattacatgacttttcaacaaacttgaaaagttattttgtggagtagatttcctg

SEQ ID NO: 12495 - DNA, 558 bp, Arabidopsis thaliana columbia
caaggaactgacaccatcgaaactcttgcagatgttacccaggattgaagcatttggctccaatgatttccaattggtatgacaaactgaccacctcctaagagctctcatccttcttagaatgtaaaatctgatatatatctatttgcagaatcttattgcctccaagctgggagtccagaaaatcgctgggatcacggccttggacacaagagagaaaaaaacctacgaacttgttccagatatggaggtcagtgtactaaccttttttgtatatcttctgggttctaggtccctctctttagtgaaaacaggaaattggttcaccataatcgatattgttgttggcattatactgcagatatttgtagagacagactaagttataagacagcctcccctgagtggtgttcttcctcgacaggttttgttattgcacctcctctgtgttgttaattgtttttgtttcttagtagaaaataatttggctcctttgtagaagaagagaaaaactaaacggctttaacatatggactacgccgtttgtatcttgttgtt

SEQ ID NO: 12496 - DNA, 562 bp, Arabidopsis thaliana columbia
ttcgtataaccaaaattaattgcacacaaaaactgattaaatatcttattaaaataaaaaaatcttctttaaaaaattaactttaaatatgttcaaaactgaatagaaactaaaacaaaactataccaaaacaaatttattaattttattttagtttgattactactgtttaaaaaaacttaaaccagagacctagaattttaaaattcagaaaacttcttttaaaacctcaactagaagaagagtaagtagtaccgcaactttttgtgatgtaacgaaataaatatgcttttttccactttaaatacaccaaagacactctcaccacaagtactcacttaagcaaacacgttccacaatcaagtaccctctctctatctctccctccctccctctccaccatggacaccgcaaccaccacatgctctgccgtagatctatctgccctcctatcctcttcttctaactcaacatcttccctcgccgcggcaacctttttatgttccaaattcaaacatctccacaaactctccgacacaacttatgctgtcgacaacacgta

SEQ ID NO: 12497 - DNA, 1047 bp, Arabidopsis thaliana
  unsure (1)..(1047): unsure at all n locations
ctcagaaaagcttgcagtcaaaatgacagggccaatgtaattgtaagaaagcttgagaatcaaaatgcagagattcgagcagagcgggaggatccaaattaagtgcatcagaatcgcttaaagcgtgcatggaagcatcaaagaaggagaaaaaatgcttgaagaagcttgtggcatgggagaaacagatattgaagttgcaggatgagattacagctgaaaaagaaaagattaaggccctatataagactttagctcaaatcacagagtatgaaaaggagattgaggtacgttggttcatattatattcatttatactgtgaaagttctctagatcctctatacttttaactctagaattgtgggaagtacatttacttaggattcaaaatatttacgtacgttatcatttgaggcacacatctagttgcgaagttggttctgtcttagatggtagtatgccataagacttcaaagatcattcaagaggtatagtctgtgtctgccacatattttgctagggtagatggaacctggatttgatatgaatataatcttggagaatccgtctcgagttgtagaagccaaatgatttgctatacctattgatatgttccactggatagcttttctctctacatggtggtctatattttcttttcgttcctgacgttttacctgtttgcgccttgcgggtacgttatctatgttgctgcacattgtgttcaaaaccttgctctagatttgcttacttggactgtggttgatgactgataattgaaatatcaatttactttacctcaattaaacatggaatgatggttagtctatcaacttctttttatatttacctgttcatatgttatttgcaggcgaaatggaggcaagagcagaaggcaaaagaggaggctctggctcaaatggaggaagaacaacgctcaaaagaagcagctgagggtcacaacaagagaaagcttgagactttacgactcaaaattgaactagacttccaaagacacaaagacgatcacganagactggagcaag

SEQ ID NO: 12498 - DNA, 472 bp, Arabidopsis thaliana columbia
gttatcccaagtttcttctaattactttttcatcacaatgtacaccgcctaaagagggtaaaacgacgacgtggcgtctatctttcggatttgttttcttaatcatgagaagactttctcacatggatatagacgagtcacgacgactcacgcgtatcgaaacaaaacgttgttgttagagagaaaattccagttcttggattccggcgacctcattggtgaaagatcttcagagattattatatttctcttgaccggtttcgatggcggatggaaacgccagttcgcgttacgtgaaattgaggaaagagcaggctcctgtcgaagaagatatcacacccggtgaactcaatcagcccattgatgttcctcaggtacgttagattctccctccctgcattactcttaacgcacgtttctagagaactccgatctcgtaattcctttagatctgtaccttaatcgatttgat

SEQ ID NO: 12499 - DNA, 541 bp, Arabidopsis thaliana
tagtaacgtccgccagtgtgctctaaagttgccagtagttttctcagcgctacactattacccggcaactccgaagtcgtgctggtggcaatgttgctttccgggatcagtcatccctgggttttagttttaacagcaacaatgggtaatagccttggagggttaactaacgttatccttgggcgtttctttccattgcgtaaaacatcgcgctggcaagagaaagctaccggctggctgaaacgctatggtgcagtcacgctattattaagctggatgcccgtggttggcgatttactgtgtctgttagcgggatggatgcgcatctcgtggggaccggtaatcttttttttgtgccttggtaaagcgttacctatgttgcagttgcagcagcgaccgttcagggcatgatgtggtggcactaattgtaggcctgcacatatggtcaccattacagttatgctaattaaaacgattttgacaggctgggaggtcaatttgatcccggacgtatcacaggcgctggcctggctggaaaaac

SEQ ID NO: 12500 - DNA, 602 bp, Arabidopsis thaliana columbia
tatatggcgatctttttttggaatgttagaggccttaatagccgctctcgccaacgggtagttagaaactgaattgtttcgaataatctcctggtaggttgctttttggaaactcatgtggcttagaacaatgatagttctgttttagctgctaccctaccagaatggagaatggattgtgtggattgtgtgggatccttgtgtgtctgttttggttttcagcaggacggatcagttgatgttatgctctataaaaatccctaatatactgcaatcctttgctgtcacttttgtttatgggagaaacacggaggttgggaagaggctcctatgggatgatattagaaggttgtcttctacgtctcctctttgtaatactccttggcttttagttggagattttaaccaaatcgcctctgtcactgaacattactcggttctgccttctaacctgtccttgaggggcttggaggacttgcaggagtgtttaagagacagtaatctggtcgattaccaagcagaggtgtgttatcacttggtctaatcacagcaattcaacctattgttaggaacttgacaggcccacgttgatataattggtt

SEQ ID NO: 12501 - DNA, 403 bp, Arabidopsis thaliana
tagtaacgtccgccagtgtgctctaaagatctccgatgacaccagaatgaactcaagcatcgctttgaactggttaatcagttgatagatctcttttttcgcgccgacatctacgccacgggtaggttcatcaaggatcaacactttggggcgtgtcatcagaccgcgggcaatcgcactttttgctgattgccaccggaaatcagaccaattgcctgttccatcgacggagttttcacattaaacagacgaatgaaatcactcacagcctgctgttcatcggcatgcttcaaactgccgccagcgcgcgtgaagtagcgcagctgtgtcagcgacatgttctctgttactgacatgcccaacactaaacctgtcaagtttacggtcttcggagatatacaca

SEQ ID NO: 12502 - DNA, 546 bp, Arabidopsis thaliana
aaaagtcgccagtgtgctctaaagggaattagcgatggcgttttaggataattggaatgaatatcaaatataagtttcaacttatatttaaataacaataaaaatcataaacttaaaataaaaacaaaagcaattaatctgcgtattttccgaaataaacaacgattaaaaatctattttaggattaacctcacggtatgatttccgttaaattacagacaaggggatttatctgataaaaaaatgccgacataacgtcggcattgttattaaggttatttaatcaatcgtgctatgtattaattgccgaatacgatgtacatatcggcatcgacctgtaggcctgataagacgcgaccgcgtcgcatcaggcatcggttgccggatgcggcgtgaacgccttatccggcctacatatcgacgatgattaaccgcgccacgctttatagcggttaatcagaccattggtcgagctatcgtggctgctgatttctttatcatctttcagctctggcagaatacggttcgccagctgtttacccagtt

SEQ ID NO: 12503 - DNA, 454 bp, Arabidopsis thaliana columbia
caataatcttcagcaattgtctctaataaattgttcacgtgttgtggagctccccgctatcgagaatgcgactaatctccagaaactagatcttggaaattgctcaagtctaatagagctccctctttctattggaactgccacaaatctgaaggaattgaatatatagcggatgctcaagtctcgtgaaactcccatcctcaattggagatatcactaatctcaaagagtttgaactatctaactgctcaaatctggtggagcttccaatcaacatcaacttgaaatttctcgatacacttaatctcgcaggttgctcgcagttgaaaagttttcctgagatctccacaaagatcttcacagattgctatcagagaatgtctcgtttacgtgatcttagaatcaacaactgcaataatctggtatcactccccaacttccagactcccttgct

SEQ ID NO: 12504 - DNA, 849 bp, Arabidopsis thaliana columbia
gtgtagcttaaaactagtactatcctgtcttgactggaacacaaatgctagtgttctatatgtgttccttaaaatgattttaatgcatgcttcagaaagatgttttgcctcttaaaagctggctaattatggtgaggatggtagaggttgcatagaaagaaagaataacacattgattgcataaaacttatacttgtctttgaatttaacatattcaaaaatatagccaagaaaaattaaacaatcgaactactgcatcgagtcttacaacgctatgatctctttgtatgcattgttgcgttctatataccatataccttaaagtcctcttcttctatctgtctccattactgaatccagaatgtgcatatgtatagttaattcatcatatgttgaggggatcttcttctgtgtttctttcttcaaggggtgtccagtcatttgtttctgcaaaaacatagagatatacttatcgtcagcggaaagcgtgctagagcaaatagataaccctgagccaaatggacatagagacaacatacttggtttgtcaacaatcatcatgagccgcctttgtaggagacttgcaacaaagaggaagatcgagcacattccaaacatgaccgtgatagggaatgcatttaccttcagagcacataaaactagtcagtaccacaacacagagacatgggacacgaaatctcagctactatggtgcagaaaaagaatgttggggggacttacattgtacaatacaacgcagacaaagatattcagaggaatgcggaaaaagttcattattgtgcttctggcttcttctgggatgtattgggatctcatctcattatggat

SEQ ID NO: 12505 - DNA, 594 bp, Arabidopsis thaliana
actgataattcaaatatacatggtaaagtttttgaatgataaaatgtgtctgattatgggaatgcagattaaatcaaaggaaagcaaatttggatgtggagaagaagaagaacaccgcattagaaagacaatatataagcaattaagttttcgagattccgaaatgatgaacctccaagcttaaggcattgttcaacagtttccttcatgggcataatcctcttgcggatctcttccccttccgagctcgtcattagtgttctaaccgcgttttcgatcactagtctctctaccttgttttccaaatgcaatccgatcttccaaacatcgttaatgtatctagcattcaccctctggtccccaaaagatggtctgcatatcattggtatagcttcacatatgccctcaagtgttgagttccatccacaatgtgttaagaatccgcctgttgcacggtgagctaaaacttcaggctgaggtgcccatttcactattttccccggccctcgagattttcgatgaacctttaggcagaatctcgatccattctttcccgtggattaaaccgggtctaccacccatagaaaaggttgg

SEQ ID NO: 12506 - DNA, 609 bp, Arabidopsis thaliana
tagtaacgtccgccagtgtgctctaaagtcatcgctgttgaactgggcgcacatttgattgattttttctcgcccgatgccatgttcgccactgatgctgccgccaacttcaacgcagagttcgaggatcttcccgcccagctcttccgcgcgggcaaattcaccgggttcgttggcatcgaaaaggattaacgggtgcatgttgccatctccggcatgaaagacgttggcaacacgtaaatcatattgctgcgataaacgggcaatgccttccagtacgccaggcagggcgcgacgcgggatggtgccatccatgcagtagtaatccggggagatacgtcctaccgccgggaacgcatttttgcgaccggcccagaaacgtacgcgctctgcttcgtcctgtgccagacggacgtcagtcgcgcccgctttcaacaagatgtcgttaaccgctcgcagtcttcctgtacgtcagactccacgccgtccagctcgcataacaaaatcgcttcggcgtcgacgaggataccggcatgaatacaatcttccgccgcgcgatccgacaggttatcatcatctccagccgccggggataatgcattgcgatga

SEQ ID NO: 12507 - DNA, 577 bp, Arabidopsis thaliana
ctcgatatttgatgctaaattcagaagttgtgaatgggctttactttctataaaatgagcattatttgcagaatgttacttttggatttttatcatctaaattcatccaagatttgcataaaccaaaggaatgacatgcgttaataggtcacattgctgaattgttaagtttcactaacgataaacctcacatgtatcttttgatagaaccgcctcattgcaataggggtgcttttgaaattgctaagagtgtgataattggttttagatgtcagtcttatgtcgctcggggagctccacgttggctgaagttgctctttgatgaagaaatgggttttatacaaggagggtatgattagattttggtttttgtcctttatagttttagagatcaagtttgtttttagaattctatcttttgaaatcattactcttaatggttaaataagttttgttgttttctggcttttttattaatatttttacttaatcgtctttttttttttgttttcctcagttcaatattttctagctttaccgtctttgacttagacttttttttttgttttttagttga

SEQ ID NO: 12508 - DNA, 531 bp, Arabidopsis thaliana columbia
tcatggtggtgaaaccgctgtcgaaggtaatgtctcttgttaaagttttgatttttcgggattaatctgcgattagagctgtgaattctgattcaaatgcgtgtttttgtagctccgatgtggcggttagggttgagcggcggcggcggaggtggaggaggtggagaatcgtacccggagagacctgacgagcctgattgtatttattacttgagaaccggcgtttgcgggtacgggtcaagatgtcggtttaatcacccacgagatcgtggagcggtaaatgatttctcagtttcagattcttctccttattcaccaatttcaatttcagatcagctactgagagtctgatgatcagatcgttaaattggtcactgggcattgttaaattaaagcacatataaacaaaccaaaatgcttaagaagaagttttttgtaagctctgattttgatgattaggttattggaggtgtgagaggagaagctggagctttaccggagaggatgggacatctggtttgtcaggttttg

SEQ ID NO: 12509 - DNA, 570 bp, Arabidopsis thaliana columbia
tgtctaattataattatttgtttcattgatttatcacaagagtcttcgaacaagagaaagaaaaagaatcccattttttaatactaaagtcaatcacctatcatttgattttgatcttgtacaaaataaatggcaaattgcagaactccacgaccgtgcgttggcaagctcagccgcggcgtggtttgggaaaactccgattttcggtctgaacctccaggttcttggggatgtccgaagcaaatgagacacaatcacgtgtcttcttcgacaacggagcatcaacgacgaagctggaccaacgctaacggtaaagaaacaaagagccattccaattttgcagactctggtgggattgttgcggtggaggaagcggagttagtggcagtgttgagggaggctcatccgtacgtgaatttacatagagacagtaaatttgtcgttatgttgtcggctgagctacttgactccggttcgaccctcgacggcattctcaaggtcattactatttactcttttcacattactagatccaaaaaagacaaaacgcgtgactcgtgagcaagaaat

SEQ ID NO: 12510 - DNA, 951 bp, Arabidopsis thaliana
cggaagcgtgttggcgttgaagaggtgagcctttctcacccttaccgtaattttcctcaagatgagcaaattgtctcttaaagcgatcaacaccactgcattttcatttagattacaaaatctttatcttcacttctcataattcgtagtaaattttgaacacggattctaaatgtttttatataccttgggtacatgaagctagtctgttctccacctcgaagatattcttgcagcatctgaggatgatactctaatatctgcatcacattcaacttttgtaaggattacgattacccgatggatacgtgcgaaaaaggaagaagatacattttgccattgttcagagcttaatcaatccaaacaagtttagtgaagcaaaaacagtaagagattagtgtacctctctgtagatcaattctctcacatcttcttttgttatcttccttctttcaaactcaaactcgagtttcggaatcggttgagtagatggttcccgatcaacgtttgccagaccatagaagtaaggatctgccagtgcctgtatatacacacacacatgtatatataatgtttccttttctgagagcgattgaaactgctctgaaattttgaagtggaaacgctagaaaaaacaagtatagaggagctaacctcttcagctgagggacggtctttgggatcacatgcaagaagacggtgcagtaagcgaagggccaatgggtctacatgaggaaatttgtgagtgaatggaactggcggttttctcctcatattgccgagatatctcctcgccttttcattacgaatctgcaacaacacaaaacactgatcatcattacaggaaatagaaatctgatacaatcaatcctggtctagtaatgatatcacagtagtatcccatacctctgtgggacacatcctaagtgagtttcctaccaattaatatga

SEQ ID NO: 12511 - DNA, 615 bp, Arabidopsis thaliana columbia
gttgtcgtgaattctgctcaataccttccattaagtaatcagttttggtttgtgatgaatagccagagatcggaggaaggagagagagataccaatctctgttgctttggttttaaggtaatgtgtttgtttccttcctcatgagaatcggaatattaaggtattttgtggttaagattttagttgatttttgagaatggttttggtcagggtttagaggagatgtcaaaccacccgaagatcacatcggcgcatcagaatgtggaggagaagctaagggaacttcaggagaggttctgtcatcttcaagctgctaggaaagaagggcggcatggtgaccttgcgcttttagaagcccaaatctctcagaatattcgggagtggcaagctgaactcactgctccttctcctgaatcttctctgttggttcgtcctactccattaccatacttctctatggtttatggtccaattctttgaaaaatagtgaatctgtaagcttggttgagatttagctcttttggtctttaacatgttgcagggtgaaggtattagccaattccttgaggagtttgctcctctgttgaaattagacgaggaggatgatgcactagt

SEQ ID NO: 12512 - DNA, 626 bp, Arabidopsis thaliana columbia
  unsure (1)..(626): unsure at all n locations
ctcatcctcatccaccaagaatttgttgggagcttcattagtaacaatagcgtacgttgtcacaaccacatcgtattctgctaattcattaggatctttggtcctattactaccatggtagactaacacagaaagtttggattcttcagaaaccttctcatcaagctctcttgcccactgccttacaacactcgctgggtcaacaattaatgtaccagcagctggtctcttccactgaaatgctcgtgttgaagaattagcttcttcatcttcggctttctccatatctgaactgtcattctcatcattaccacatgcactcagaaccgaggtctcactgttgcttgaaaccttgagctctggttttacatgactaccactttcatgctttgcattgtctgactcatcatcagcatccaggactaatgcctcagtttcttgcttgcatgaactttcggacttcagttgtgacacaatcttttgctttaggataagagcaatcgtcgagaccgtcttaccaagtccctgcagagtagacgttacatagtttgaggtaaataccaagcagcagantcacagtatcacagatatttattagtcaagaaatgtaatcaaatgtgacctga

SEQ ID NO: 12513 - DNA, 570 bp, Arabidopsis thaliana columbia
tcagcaatcagatcatatggtttgttgatgataccaatgtataccgtgtcacaatccacaagacatttgaaggaaatctaacaacaaagccaatcaatggtgtgatttttattttcaacccaagaacagggcaactattccttaaggtaattttctctcccataaattccactagtaacatgtaaatgtattgtaatacgtagccgctgttttatctgaaaaaactataataacacccattggggatctttgtctcactagatcattcatacaagcgtttgggctgggcagaagcgccttggtcagcttgcaaaatggaaaactgctgaagaggtcgctgcacttgtgcggtctctccctgttgaagaacagccaaaacaagttattgtgactcgtaaaggaatgttggatcccttgaggttcatctgctggatttccaaacattgttataaagggaagtgaactccagcttccgttccaggcttgtcttaagatagaaaaatttggtgatctgattttgaaggcccagagcgcagatggcctcttcaatatctatgatgatttggtgat

SEQ ID NO: 12514 - DNA, 601 bp, Arabidopsis thaliana columbia
atgggatcgtgcactttaataaccatatttaaaggtaatgacatttctaagcattacaaaatacattaatggttatcgaatattaaatccatgtttaaaacattaacattaagtggcgctgaatttacagatagtagcttgcaaatggtatccacactacaccagcgtgaattgcattactcatataatagaatctagattgcaagacacatcctgtcacacttacaaaggagaaatagaacagaacttccggagataaaaaatagtaaaaagaggatatctacctttctcaacacaaaaggtcgtttcagctcaagttccaaagtatggaatgcaccaatctgcgatacaacacatcagcacaggaaaatctatagaataaaaggcggcctcgcatctacctttacgtgctcattctccaggatatttttgccacgtatgcgcaaaacagatccgtctttgtcatagtccacctcctaattgaacaaataaagagaactgaagacaatcagattcattccatgagattagactaagatatcttccaatgtcaagagtagcaagattaaagggcaaaagaaaccgataaaagaacatatgt

SEQ ID NO: 12515 - DNA, 546 bp, Arabidopsis thaliana columbia
gagcttcttcagagagagatccaaaaatccaagctttgaccaactgatcgattcgagtccatttcagaaattcttgatttgcttcttcagactgaatatcatcctttgtgacaatgatggtggaggcaggccgaggagtggcgccggtaacaaatcctagaagaagatgagatgaaaggtaagactcaaattgggttttccacaaaaggtagtttgtgggagtgagtttgagagtaacaacttgagagatgttaagagaggaaacaaaaatagattcttccatggcttaggaacaaagtcctaagctctgataccatgaaagtagaagcaaaagcttcagagagaaaataattgtgtatttcttccttagtgaattcgattacaagcagagaactatataaagaggaggattacataatagctaatgacaggtgtcctagttgcatgaaatgctgctgcttccaagaacatcaaaatgattgtgcacgtttatgtttgtcgacggcggtgtctcgcgtgatgttctctgctttgattgttgcagag

SEQ ID NO: 12516 - DNA, 517 bp, Arabidopsis thaliana columbia
gctgcgccgcaagaaagcgcatgggggcctgctgcaactattgcggcgcgacagtctgctaccggcactaaaaccgatacgccgattcaaaaagtgccacagtctatttctgttgtgaacgccgaagagatggcgctgcatcagccgaagtcggtaaaagaagcgcttagctacacgccgggtgtctctgttggtacgcgtggcgcatccaacacctatgaccacctgatcattcgcggctttgcggcagaaggccaaagccagaataactatctgaatggcctgaagttgcagggcacttctataacgatgcggtcattgacccgtatatgctggaacgcgctgaaattatgcgtggcccggtttccgtgctttacggtaaaagcagtcctggcggcctgttgaatatggtcagcaagcgtccgaccaccgaaccgctgaaagaagttcagtttaaagcaggtactgacagcctgttccagactggttttgactgtagcgattcgttggatgatga

SEQ ID NO: 12517 - DNA, 524 bp, Arabidopsis thaliana columbia
tcccccacttcgtttaagttacttcaaagtgtcagaaatgacgggtcgaataagataagctgtcttctagatgcgagtttaggaatcaaatattatttttctttagtttgcttgagttctcatggaagtggaagtaacactttgcttttgttttttttgataagggatatgctttgatagaatatgagaagaaggaagaagcacagagcgctatttcagcaatgaatggtgctgagcttctaacacagaatgttagcgttgactgggccttctagcagcggtcccagtggtggtgaatcttacaggagaaagaactcgaggtttgtatcctaatctcttttctgatccgctacgacttgtctgatcttgtgccgatatgaagtcaagagtgtcgaaaagtatcaattaagatatagacttagaagttttaacagttgacaaggtagtatattgtactaagcacctaccaaactttactgtctttatgctaatgaatcgaaatcacttgtgacttgtcaagtagt

SEQ ID NO: 12518 - DNA, 613 bp, Arabidopsis thaliana columbia
  unsure (1)..(613): unsure at all n locations
gtctttaaaaaaaaaaaagttttggtttttgtactgataaaacggctttaagttgctatcattttgcaatgtattattatgtgtcttttatcatgcgaatggttaggagacatccatagcatcaattatctcaaagtgcatttgcaaatcagcaagtctatcagaaaaatagaacctttcacagacctgtagtttcccaccggaattctcagtttcagctttgagcaaacgaaccaactcatctttttccttgcgaatccagcctcgcagctcatcacaccactgcctaggagttccatgaatgacaatgcgtacggagtctgcacctcgtgcaaggcgttgggagattctctgcacgacattgtgatcagtaatgtaggcaccagaagagttcagtcctacatctatataatgaacttcagaaatgctgttgaggaagctttctttggaggctggaatgatctgaatcttttcatgctggctggtagattcttctaccattgcagatgaagttttcgcaaagttggtaccaaggaactgatncactcatgagctggttcacacaactccaccttgctaaaccgagccaatagttttgggcagtgatgactga

SEQ ID NO: 12519 - DNA, 594 bp, Arabidopsis thaliana columbia
ttccaagtgaattggcagattcctgttgtaatgagttttgctggtcctgagagggatcgttctcgcgaaattcgtaaagaagcagcttacttcttgcagcagctttgtcagtcaaggttagtcatcaaatatttataattttgctgcttcttttttctttctgtaagtcataaagttgatatggtagcttcttggcagccccttgacgttgcaaatgttcatagcttgccgtggaatacccgttttggtgggatttcttgaagcagattatgccaaatacaggtgggtactgtttatcatcttcatatggtgtctggactattgaacatattaagtgcagaagttaatgtatgtggtgtatttgttcaattgaaaacctgcagatacttttaacgttagctgacaattatcttaattagctcttctctctttaatcaattctggttcctttagctctatgtggtactagatcttactaatctgggcttttctgttcagggagatggtcacttggctattgatgggatgtggcaggtatttaactcaaaagatccccccaagaaatgatttctgcggtatagctgcaagaatgga

SEQ ID NO: 12520 - DNA, 444 bp, Arabidopsis thaliana columbia
ttgtgaaagaagacgctactctaatgatcttgagaaaattgtgtttagatttatagcttcttagcctgaacttgttccatttgtatctgattcaagaaatctcagaaagctacaatcttggtggaatttgcagttttctaatatgaattgtgtcctttagcctaatcttggaatgtattttttttatatgtaactctcaggtggacacatcaacccagcggttacttttggtctgttcttagcccggaagctgtcgcttactagagctctgtactacatagtgatgcagtgcttgggagctatctgtggtgctggagtggttaaagggttccagcctaagcaataccaggctctaggaggaggagctaacactgtggctcatggttacaccaagggaagtggtcttggagctgagatcattggcacattcgttcttgtatacac

SEQ ID NO: 12521 - DNA, 333 bp, Arabidopsis thaliana columbia
tgatttctcaccaaccccggagtatagagttgtggtgttagatggttatgacatcagtgctgttggatggcctcaggaacatccgaatactatcgctgcattgaacatacttgacgaaaagagcccagacacagacagtcaatagccccgcagctatgaggatgttgcaaggagctttgtgacgtataatgttggtgttgttgagcaacagctgctatggctagccagtgttcttctggatgcgtcgaattcgaacccgcgagttatcgtatgtgggcatgtgcctatgagccctggtgtggcatccaaagcagctttgttatggtgttttga

SEQ ID NO: 12522 - DNA, 575 bp, Arabidopsis thaliana columbia
  unsure (1)..(575): unsure at all n locations
gggattggtgaaaaaccgtttccagatgatttcttccgcgtttgtactgtgtggatgtataatttcgatggttctaatgaagaggaatttgcattagcgtcacgttttgtgacacaaggaacagtgactgaaaagttgatgataaagacatcgacgtatcctccagtgaagcaattaatgacagaagcaaaagtggccaagctaatggaacttcctaaaggttacgagtatttggacattgaatgcttttgatgatggttttggttcgaatctatccattggtactctttcctttattactctgaggattatatggttttaaatttcaacaactgtgtttttttgggtatttgttctctatttttaatgtgacatttggatatgtattggtttggatattatttgaggtttttgttttggtcaaatgggattatgttataattgcataacaaaaccatattgggtaaaagctgattcaaacaaaagagtcaagaggatttagggtaaatcatgtgtgtctacatttataataagatcatatctatatatgactantgaagatgatgacatatatg

SEQ ID NO: 12523 - DNA, 584 bp, Arabidopsis thaliana columbia
  unsure (1)..(584): unsure at all n locations
cnnnnnnnnnnnnnnnnnnnnnnnctaaagaatgtccgggtaacgctctggaaaaaggcggaaaaggatcgattaccgaacagctgcttaacgctcgtgccgacgttacgcttggcggcggcgcaaaaacctttgctgaaacggcaaccgctggtgaatggcagggaaaaacgctgcgtgaacaggcacaggcgcgtggttatcagttggtgagcgatgctgcctcaacggaattcggtgacggaagcgaatcagcaaaaacccctgcttggcctgtttgctgacggcaatatgccagtgcgctggctaggaccgaaagcaacgtaccatggcaatatcgataagcccgcagtcacctgtacgccaaatccgcaacgtaatgacagtgtaccaaccctggcgcagatgaccgacaaagccattgaattgttgagtaaaaatgagaaaggctttttcctgcaagttgaaggtgcgtcaatcgataaacaggatcatgctgcgaatccttgtgggcaaattggcgagacggtcgatctcgatgaagccgtacaacgggcgctggaattcgctaaaaaggagggtac

SEQ ID NO: 12524 - DNA, 609 bp, Arabidopsis thaliana columbia
  unsure (1)..(609): unsure at all n locations
gattcaacaactttgagtgagtttttttttttgtcatttacctttgtcgcttcgacgtgagacgagccgtggaagaagacgaaagggctcttaagctctctttactcttttcttctcctcctctttttgagatgggaagccctaacgccgccgccgagacggatctaacaaccgatgatttcatcggagacacacgacgggactctggttctgatacagagaccaacaccgattgtgacggagaagatttgcctcttcttctgctacctgctcctcccggccacttcgaagaaggagagagagttttagccaaacacagtgattgcttctacgaagccaaggttagtgaaatacactctctgtattcttgaattagagtgttcttctctgcttatgctttatgtctctgatcgtttccttttttttttttataataatattctcaggttcttaaagttgaatttaaagacaatgaatggaaatattttgtgcattacattgtaagtagatactgtatatgtttaaaatcattcttttgagctattttgctcntatctttagttttgaagatgtaaatgatttcttttggcagggttggaacaaaggtta

SEQ ID NO: 12525 - DNA, 603 bp, Arabidopsis thaliana
aggaaccattcgagcttgtgtggtgcaactctgtcagacccattagatgattacaagaaagctgcagcttccatcattaacgaatacttcagcaccggtgatgttgatgtggcagcagctgacctcattgaacttggttcaagtgaatatcatccctacttcatcaagcggcttgtctcggtagcgatggacaggcatgacaaagagaaggaaatggcctcggttttgctttccgcattgtatgctgatgtcattaacccgaaccagataagagatggatttgtcctgctgctcgagtcagccgatgactttgtggtggatatacctgatgctgtcaatgttcttgctttgttccttgcacgtgctgtcgtggatgacatacttcctccagcttttcttcctagggctgccaaggcacttccaataacttctaaaggttaccaggttgtccaaactgcagagaaaagctatctatcagctgcacaccatgctgagctagtagaaagaaggtggggtggacagactcgaaccactgttgaggaagtcagaagaagattgctgacattttgaatgaatatgtggagctggagagactatgagcat

SEQ ID NO: 12526 - DNA, 297 bp, Arabidopsis thaliana columbia
tgctatgaaggaggattctatcgatgtggtcaatggaagacggttaccagagatagggcttatgcataaaaaaataagcccgtgtagcagagttctccatcagcctggctaccggtcgggcagatatttacacggaaacaccggtcaaagtgtctggctttaagcgcgtcatagacgagcaggactggacaatcactaaggtgacacattttctgaataatagcggcttcacgacgtcattagagcttgaggtcaggctttctgatgtggggtacgaaacagaagataatgagtgat

SEQ ID NO: 12527 - DNA, 632 bp, Arabidopsis thaliana
atcttgtgagttagtaacttttgaaaccgtactttatataataagattgatatagtttttgacggttatactcgacttaatttttgagacttttttttttttcttttttttttacgtttttgagatatctaaactcaagtttgttaatatgccaaaagtttggtgaaattaatacaaaaatttagctcattgaataaaataacttatatttgtagtacttatattacgtctttgatttatcattgaagtaaagttaacaatgattcgccaaacaaaaggaacaaatactagcagaaatcagatgataaataacggtcctggtaaaataacagaagtccaaaaaaattccacaaagtaaagaaatttatcgaagtgtttcatcaatttcaagaaaacagaagagtcgttaatctgaatcaatacatcaatcaagctttcgatttcttccctttggtatcagcaactacgggcttggccttgaaaggcaaaaacgtctctccgcccataaacggctgcagaacctcaggaatgtcgacaccatcctctcgctggtagttctcgagaatgcagcaaatggtcctctctgttgcagtaagtgtcgaattcagcatatgcacatactgctttgtctg

SEQ ID NO: 12528 - DNA, 431 bp, Arabidopsis thaliana columbia
ctgttttaactgagtagtaatagtgagcaaattaaacaaacttgcaaagtaagttaccataacaccgtcgacaacgcaacgatctccgacgtcataaggatgcatcacaaagacgaacataaaggattcgaagatattcttacaagtacttccgatcatgaaagcaagacccaaaaattgtgaggagaagaccaataaaagcttgggtcgatgctatatccagaagtaccatccaaacaatgaatgtgataacggtcaagattccagttataagtttgtccaactgcttaaccgctgtttttgtgtcgttcagtgaatgccctatagttttccgacttgtgtatacattaacctgtcaaaaaatggcacaacacacctactttaacttaacaacttctctaaatagacatgtgttatgtttttatctaggg

SEQ ID NO: 12529 - DNA, 634 bp, Arabidopsis thaliana columbia
tttttgagccaatctatgaccagacagaaggtgcggatggctatgtctctgttgaagtttcacctaggcttgctgatgatacccaaggaactgttgaagctgctaaatatcttagcaaggttgtcaaccgtcgtaatgtctacattaagattcctgctactgctccatgcattccttccatcagggatgtcattgcagctggaataagtgtcaatgtcacggtaagttatcctagtatgtttcattattcaagtttcttattgcaagttttaaagaacttcaaaataaaataagtcataatacttcaaattcatgtattgtgtgatgatgtgctagatcactggatttcttgggcgttttaaacctgaaactagattagttcaagggtgttccaaggatgcactgatgttaccttttctaaatcgtttctcatatgttctgttctgtttcagcttatattctcaatcgccagatatgaagcagtgatcgatgcatatttggatggcctcgaggcgtctggacttgatgcctctcaagagttccagtgttgcttcctctttgcagtcgggtggatactctcatggcaagatgcttgacaaattggtaccctgaagcttagactcagtgggaaggt

SEQ ID NO: 12530 - DNA, 573 bp, Arabidopsis thaliana columbia
ttctttggtagaaaaataatgtagtctctaatcaaatcttattccatctatcagcattcttcattcatttcttgtgaaaaccaaggcctttaaattaaacataatcacaaacaccaagttctatacattacatatgtcttccactggataaagaggaagaaaaggctattccaaaaaacattttgagctctttgttccgcaagagaaggaacagcacaagtgaaacacactgaaaaacaccaagcttgcattataacatatgcaggtaagaatcacgaatcatgggcgggtcttgtattgtctgagaacgaatgagagccagatgagggatcatgcttctgcgatgtgaagagattagggtatgagtaatagggatcatcttccattgaaggcagtctcatttgctgatggtcctggtcagggctgagtctgtcaagtggtgaagtctctggcctttggagctctggcagatcgccatagctgctgactgatgagttctgatgatcaaactgcggtttcccattgacgggaactatgtggtgaagatcgcatagtgctgctgatgagtctgat

SEQ ID NO: 12531 - DNA, 575 bp, Arabidopsis thaliana columbia
ctaccacttaccagctcacaccacatgctattctcaatagagttgaaattagactggtaaacattaaaaagtctttaaaacgagttatgggtaattaaaactctacgttctcctgtttgttcaaaaaaaatttacgttctcttcaaacaattttattcagattcttatacgataaaaatgactatgtatcataagtatgtaatatatgataaaaatgtgaaatataatgccccatgaaattttggaaagcctgtaactaaaaataacgaaacacgagatgcagatccaaaactgtcggcactaaatcagataataagtgaacccaatgctgtaataaaattcctcaaaaaagtaaaataaaagggcaaaagaggaaataagaagataaatcgtgtcgcaatcttagcaaaacctataatcaccagagtcaatcgtagcgttcgagccgccggaggaatagcaaaatgccataacctcccggcggcgttgactctatacttccggcataaaaactcctcggcaaaagtcttctccacctccgattaacatcgtgcaagacacgtgcgtactcccgg

SEQ ID NO: 12532 - DNA, 412 bp, Arabidopsis thaliana columbia
cttcctttttttatttgagtcattcttgttttcttctcgattgtatatccatctttcattaatttgtttgtgtgtgtatcttcaggaattcatatccgctggtgtgaatgcatatgcgctcggctgcacagatgaagatttgagaaaagaactaatggctatgaaagattcgggtttagagattgagagaatggagaattacggcggaagacacagactaaatccaaaattacgctgtctgaggttagttagttacaacgaacttgtgatatcatcggttaatatatgagctaagtcgtatcagatcgattttaactggcggttttaattccgcaagtagatgaatgcatattgtggcttaggattgtattcatcacgatcttgtgtacgccgcaaccaacagtcataagat

SEQ ID NO: 12533 - DNA, 989 bp, Arabidopsis thaliana
gtgtatgcatgctgtgcaaaacgacaggcttccgttaagagtagtggtccaagtactcttctttgagcaagttagagcagctgcttcatctggaagcagcacacctgacttgcctagaggtatgggaagggagctacgcagctgcggtacctatgggagctcaagatcagtgccaacagttaatggaagacgaatgggaagcggttgcaacggaagaggagatgagagcattgaagagcgagatagcggcgctgaagctgcaggaagaaagtgggaggaagagcatggacagagcaggagtcacggcgataagcaaaataagaagcttgataatgtcaaagaagatatttgggaagaaggtacagttgcagagtaaaggaggaggagagaagaacaatggaggaggaggcggtgggtcggattcatcggaaagtcttggatctatgaatgcggctgaagaaacagcgaaaaccgctacgccttcgagaaacttgactaggagggtatctgtttcttgatgaacaattttcctttttttcccaaacatgttttaagttaaaggttttacttaggttatttttcaactttacgtcaggttatatgaatcaactgtaatttctttgactttgttcttttggtctgtttgatgatacacagaactttattacaagatatatttagttatagaggaaaaatgagcaaatgtatcattatccttcttggaaaaatgtagtatttcaacctcaacatttcgcatggtacttttttacctagagaaagtgcttttcgatttcaattgatcaaaaattcaaagttactattcagactctatgttttgagtcgaaaccaacattaacttcaacaatgttagtcaaatggtaaaaatcgatgactcaaacgacacggtggcgaggttatcgacgaggtgagaatctttttaaacaaaactacgtcgtttattgattcttagtgtatcacaacttcaatct

SEQ ID NO: 12534 - DNA, 1180 bp, Arabidopsis thaliana
ggtcgactcgatccccgcaaagagctaagtttgttgtggtgaagttcagaattcgagtaatatcacttgaaattgctactctctgcctattcattagggtttatgaatacatagtttagggtttatgtttccattagtcacttcttgaggacctgcttatcttcgagccattgtgtatttgataaactttggaagaagtgtccactatatctagcgtaggactgaatgtagtagattagaactgctaagagttggttagagaaaggggtgggtaatttataaggattttctagggtttggttaggtattcggtagagagtttctggtttggtgaacaagacatagctttgcatcatttgttttgagttgagatgtttgtgtgttgtgttgtggcagtggaagggaactctttacccgaagaagatgtagagatgatggagaattcagatgtaatgaagacagtcacagatgaagcttctccaatggtggagccgttcattggtatggagtttgaatcagaagaggctgcaaagtctttctatgacaattacgctacatgcatgggtttcgttatgcgagtggatgctttcaggaggtcaatgcgagatgggactgtggtgtggcgcagactcgtgtgtaataaagaaggatttcgtaggtcgagacctcggagaagcgagagtagaaagcctcgggctataacaagagaagggtgtaaagctctgattgttgtgaaaagagagaaatccggaacatggcttgttactaaatttgagaaagagcataatcatcctctcttgcctctctcccctaatgttcgccggaattttcagctccctcaaacaccggtacgtctacgcacttttccttggggtaaaagtaaaacagtgattattggcattgatctaagagttaccaagaacataaagctcaaaaaatgatatcgaaatcttgtacaaatgaacttttcaggacgagaaagacgcaaagattagggagctgagtgcagagctgagccgagagagaaggcgttgtactgctttgcaacagcagcttgatatggtccttaaggagatggaagaacattccaaccatctcaccattaacatcaatagtgttatccaaagtgttagagacattgagtccaatactttcaccaaacaacaaacataatgcttca

SEQ ID NO: 12535 - DNA, 931 bp, Arabidopsis thaliana
caaaatatggcatttgttggatgaacaaatacaaacaagtcggaatcggatcttgcaagtttttggatagaaaactaatacaaataagttgtttcaagctttaatttctcctatcggacaaacaaaaataaaacacagtcatcagtttggtttagtacaaaagcattactcttatgtttcacaactctcagcgttcaattcgcattacaatccacaaaagccttttgctttggcttatacaacataacgataggtaacataacgaccagccgtttcactcggacgaatgatcttcacgacttgcccacgttttagtccaaagtatcttgcgattggatcagtcacttggatccttggaagctaacaacacccacaaagttccaaacatttaataacacaacaaaaatttcatcaccaagaattcaaacaaagtttctatatactactaacctgtgtctccttcactgtgtatctctccagtaaagttttcttctcttcagtggtaagaacttgatgctcaggaacaagaacatgttctttaatgttcactagcatttccgcctcctgcagcatccaccaccaaatcatggtttagtaggattgtgatgtggatacatcatcatcaagagtcaagacacaaagtgatttgttttacctggaaaacttccagatgaaacttagaagagatctcactaatgcaagttcgagcaaacggggtcaagttctgttgcacaaccaaaatagctctgaacacattctctgatttcatcctgttcgtgtacattttcatcgtcttcacaccaactttcgcctcatcagggaagaatatatagagctacaacaagagcacatgaatcagcgactaaatcaaacacacataaacaatctttctaccatatccacagcttcttagagattacagagatgacat

SEQ ID NO: 12536 - DNA, 920 bp, Arabidopsis thaliana
ttggtccacagcaacattacttaggggcacaaacgagaacctgtcaggtaataataataaatatctgatagtcaactcacaaaaagcaatcttgagggaatcaataacaatcagctttacctgtccctggccctgttttgccatgtgatacacaattgctgcagaagtcacagttttgcctgtgccaggtggaccttggatcaagctgatgggcttctgaaggacacttttcaccgcattaacctgctcaaggatacaatagagcctgttataaatccgttatatagataacatatattattcatcgtgttaacaaggaacacgggatcaaaacgactctgaaaattccgtgaagacatttacgacgaacattattcatgaactggataagctgaaagccaatgattacctgagatgcattcagttctggaagaccaggtaccccaaaacgtcgaggtagtgtgttacgaaccatctgggcctcaacttcatgtcccaataactgatggtagatataacttcaaagaatagaaacatagtgattcagtggttgattagcatgcagtaacaaatggacacgtaccaagaaggagctaggctttccgatgactgacttacccactcacacttgtttcatctacagcaaaattcttcattgctccctgcattcgatcaaagcttgtacttttccaaacaaaatcaacactgaatccatgatttacgtcaatcggaactccctacacacagagtaagtgaggttgaacatatctccgcaagtcgatgtcaaaagcaaagctaacatcagaattatactcacctgattagctcggagttcaagagcaacctcctcttgcgccgttagcttgatctggagaattattaaaattctatggtaaagacctaaacactctcaaatacag

SEQ ID NO: 12537 - DNA, 433 bp, Arabidopsis thaliana columbia
attgaattctaaaaaaaaagtgaaagaacagtaagattttggaaagaaaacaaagacatattcagtgaatttaaaaacataataataacaacaataatagaaaattggtaggtccaaaatcattgtgacaaatcgatcagtgattagctgtactgaaaatctaagctctaaatgagaccgttcctcaataattgtacatacatttgcctgcatgcatctccatataaatatgccttcgatcttctacttccaaaacaaactcatcatcataagcaacaatggtggtgtcactcttctcttccagaaatgttttctatacgttaagcttatgcttatttgcagcattataccagccggttatgagtagaccggctaagtttgaagatgactttaggatcgcatggtccgatactcatatcactcaaattgacgg

SEQ ID NO: 12538 - DNA, 579 bp, Arabidopsis thaliana columbia
taatcccctcatgaacgaggtagctgcacgtgctaataagcattttacacaggagcaaaaactaaatgagttgcacaaggatactataaacccatacctttagagtgctttcatccttggcccaatttctttccagaaagagatactccgagaaccacattgaccagcctatgacctgtatgtgtgtgaaaattctgtttatgagtactatgaatatgtaacagataaaaaaggcggagaagtgtattaacctaaaacaatgattttttctcaaacgcaaagccaggtatcaaatttctaacttatagaagagattcagaaatagaattaaagattactactattttctctcaaatctagcaagcacacagcagtaagctaaaatattcacatactggaaggaatttggaagacttcttcattacagctaatgcgcttcccaggcaacctgaccgctgcaaggaaagaaaatatgaaacaatagattaaaagatgtaaacagcataacagggagcgtgttaagagaaaatatgatgatgctatctctctcactactcatcagatgatcactagggactg

SEQ ID NO: 12539 - DNA, 807 bp, Arabidopsis thaliana
ttgtataaattggactcaaattcctgaggacaatcatagcaaacaatcacatcatcgcaatatacataaacaaaagaggaagaaaaatggcaaccgagtggtgtagttatattggttcgtctttcatcctcaatttctacttttcattctttgatattggtaccgccctttatcgattttctttaatcttttctcttctcgctcacgtcaaatcgtttactattatttaattctcatgtgtcagtttcacatagcacattcttgaggaaattaattataatttggagcatgcattgtttatcgattgacacagatttatgtttcatctattgtttgaataacaatggattacacaacaaatccccaatatatgatatttggagagccatatagtattagtagggatatatagtttgattccataataaccgttggacctactgttttaccaaatgcaaatgatttaccaatctgatgtggttgatttgaccacacacagggaagaactcatggccggagcttttaggaacaaatggagactatgcggcttcggtgataaaaggagagaactcgagcctcaacgttgtcgtggtttcggatggaaattatgtgactgaagacctcacgttgtaccgcgttagggtttgggttgacgaaatccgtatcgttgtcagaaacccaaccgccggctagacatgtatatggaccaccattatgctatagccatgtaggcgccttactatgaataaatgaaactatatataatgcatgcatagttggttggttggtcataatgtaacatctatt

SEQ ID NO: 12540 - DNA, 473 bp, Arabidopsis thaliana columbia
aaaaccgtccgggcgtgctaactgcgctgaacaaaatcttcgccgagcagggcgtcaacatcgccgcgcaatatctgcaaacttccgcccagatgggttatgtggttattgatattgaagccgacgaagacgttgccgaaaaagcgctgcaggcaatgaaagctattccgggtaccattcgcgcccgtctgctgtactaattccccttctctgaaaatcaacgggcaggtcactgacttgcccgtttttttatcccttctccacaccgttgccgcgttgcgcattctactttgcgagtctgctccagaaaataaatcaaagtcagatcaatgcgttgtgtttatttaatggggatttacgatggcagggcagcatggggctgtaacggtaaagccctcaccgaagcgagggcttgaaggagaagggttatgatgcgacttgtcatcatactgattgtactgttactcataagt

SEQ ID NO: 12541 - DNA, 589 bp, Arabidopsis thaliana columbia
tcaactactacattataaacatcaactcaaggaagatcacaacactagcccctatatatataaagaacaatccgagatcagaccgttgcgtttcggctcgcaacataaatccttttatccgatcgaaaattttccaaaaaccttcaggtattaatcaaacgttaaaacaaaacctaagaaagtgaaaaaggtaaaaagtgaaaaagaataagaagacgaaacttatattatcaatgatattatcttagaaagacggtcgttgcgttccccaataagcttcacctggcaacgaaacagagttaattaaattcgacggcgacccaataaacgatgtcgcatcttgcattaactgtttctgcgtttgcgttccaatcgccctagccgcgtttccatctatttctctttcagtttcctcctcctcctctagtggcagcctctcgtaagatgcgtttccaaatgaagctgccataacgaccaccggacttgatgccgtaagcggtcccaccacactgcctccgatcacttgaccttgaccaccggctaagtaaacctttaaaccagacgcagctggtggtgccggtggaggaag

SEQ ID NO: 12542 - DNA, 532 bp, Arabidopsis thaliana columbia
ctcattgtttgcacctctctccggatcccatcctacaagcaattcagttcctattcattcagattaacagagacaagaattccatggtgttcaaaactgcatctgaatctttacatctagcttaagctcgtaaaactttaacatgaaaataaaaataaaaagagaagataagatagaaacatgcaactacaatttgacagactgatctggagttctctactttcaaaggcaattaaactacaattggactcgctattagtaaagcatgaagcaggaaaacaaaagtaagagaaaactaaacttctatctttgatgtaactccaggaaatagctagagactaggaataaggaagttgttctttcataattcagaataaaagttcctaccagatcgttgttgcacttttccagatcaagaaccttgatagcaactaccacattaagcggtatacacaaagctctatgcacagtcgcactgacaccatctccaatttcttcatataacttgtagtcttgtgcattgagagggaac

SEQ ID NO: 12543 - DNA, 538 bp, Arabidopsis thaliana columbia
atcattctctactacttcatcatcatgatgttcatattcttccactgcttctcaatgtacaaaatctgcatcctcttgacatgaatctctgataacattatggagagtcatagttgttgtcacaagtttcacccactttttcaactcatattaagggtgtttgcgattccaatatcctccacttagccttccagactccaaatgttcgctcaattatcgaacgcaaatcagagtgcttgcggttaaacaattctctagtattaaaccccgaaatatattacaagtaagaatcaaaaataaagagagagatatgtatacctagaaccgagctagcgctaatggaaaagaagatcgagagctaacgctaatggagaagcagatcgaagagtgagagataaagggaagtgaagaatcctaaagatctctttttcttctttgtccagaattgtcgagaaccgtagggtaagaaatggctttttgtagttctcaatttttaaaggtgtattttagtcatttgctgtttttgactgcagctgat

SEQ ID NO: 12544 - DNA, 408 bp, Arabidopsis thaliana columbia
atattagagaaagagaagcaaaagaagaatttagagaaagaggagcagaagaagaagagtcgagataagctgagtagaatgagaagtagaagtggtcgtcagaaagtgatcggtcgatatgtagaaacagcgcctgagaacgaaactgttaccggaaatgcgactttggtaaatgtaggagacgcatagaagagtacacatgagaattgcatctttaggtgttaggtcactaattatgtatcattcaatgtgtaaggaaagattactgtataaaaggtctcaagtcgcattcatgcactctgacgctctcatctcagctgtcttcgatttaaccgacggctaaaattcaccggcggtggagcttcgctgtggtcatcagagtgagagaggagatggaggagacgcaag

SEQ ID NO: 12545 - DNA, 468 bp, Arabidopsis thaliana columbia
gaaaatcaaatgaaatgtggtaggtgaaggatttgacggaactacccttcaagacacgtcaagactttctttcttttacaacattccactatataaacacttccttctccaccatcatctctcagcttgcaagttctctctgaaccatagaactccaagcttgaactgtactctactcgtcgtttatatcttactcttttgtttcctcttaccagaaaaaataaataaacagcaattttttcatttttcgactcaaatcatgcaaaccatttcgcctgcgttctcgtgcgatctcaaatccgtaattcaaccgaatctaacggctaagaaagcgcgttactctcacgtaaatggaaagcgcgtgtctgttcgttgcagttacaggtctgagtcgtttagctccctaacggtgttggctcaagcgagccgattggcaaagctcatgcgccatcttagccagtaaagtag

SEQ ID NO: 12546 - DNA, 597 bp, Arabidopsis thaliana columbia
gttacctttccgcagtaaggtaacagatactgcaaacatcgttgtacaacgtgattaccgtttacattctttatcaaatgcacaatgccatgcttcaaagcagaaatgatgattgaaatctcctcctctctcttagccgtttcaactatcttttgaacagctctagtcctgtatcaaaataacaaatgtcaggtcaagtaaagatcacaacacagattaatttacatatcgaaagacaactttatacggttttttacccgtgcatatcacaagagattttgataagcagtcctggttttctagttatggaatgaacaatctgcatcctctgatcctcattgcatacttctagcagcttttgaaccaaatagttcccaaaaggatccatcattagctcactgatatagtcaatgatctcattaaagatcatctctatatcattcccatctttctcagaaaatattctctgcaagaagcgacaaccgtgctgatccttggccaagtagtatatcttcctcttgcctctgcaatagagttatacttttgaggctgcaatgacagattattgagactcattgtgagactgcattgagttga

SEQ ID NO: 12547 - DNA, 559 bp, Arabidopsis thaliana columbia
atattaacaggcttaagagtttggttttattttgttcaggagtgacgatatggcttcttgccttaatttacttcatagcgggtgttccaggaggctatgtgttatggtatcgaccactctaccgtgccttcaggttcttacatgatttttggagttctctactttcaaagtgtagatatatttttcataatgttattatgttactgatttatcaattttttgttgaatgtttgcagaactgatagtgcattgagctttggatggtttttcttgttctatatggtgagctataattagcttttatggatatttttacatttatgctcagtataaaaaaaatcagttctgaaatcttgttcttgctgcagctccacattgctttctgcgtctttgctgcagttgctccacctgtcgtcttcaaaggaaaatctcttgcgtaagtttctttgtcatcgaacttctaaacaattgaagttgatcttgtcactgtgtttggtaatttgagtgtggagaaaaccatttgaattgatcaaaagcaaacaaccacaagtttttttgc

SEQ ID NO: 12548 - DNA, 540 bp, Arabidopsis thaliana columbia
acataagaaatcaaaattgagacatgaagaaaaaatctcaaagttttagtgcttacattgttgagcattgaagaacttgagagctgtacggagagcgatagtgtaattatccggtggtggttccttgtggtggtggtgtggcaatgttttaacgatcaaagttatgaatccagagagaagagcagttactacaatggttccaagagtccaaagaaagatcttacggctgactaagatacatccaagatcgacgtactttttcttcttaagcacttttggtccaagaagccaactctgttgcgtttcgtcgagtggccgcgaaggagtcgcacggtcaaggtcttgtaggtatcgactacgatcgtcgtctgtaatggagtccgccgcattgatctctagaggaccaccccatggatcacgtccgtacataatgatcagtcaaaatccgatgagatttgctgaaattactgagggaagaggaagaggaagagttttggagtgttctgtggttttaaggtaagtgaggcgtgtgtgatgtgg

SEQ ID NO: 12549 - DNA, 805 bp, Arabidopsis thaliana
gatctgtccaagagtaactacattagtttcatgttcttaagatctgcagaacttatgaatttcacattgatcaaccaagaaagagtcatgtttttttttattcattaactaatgatctggctttgttcatacatccataatcacaatggaactgacattgaagagaaatccgatttaattaatgatatgattacagagatttgtttatactttcacaatatcagaaaatcaatattaaaaaaaaaaaaaaaagaaggagaaagacatcagaagctgtaatttgttttaaacactcttttgtctgctcctactcctgcctgttccttagccaccgcaacacctctgttaagctcgtcttctgtttctccactgttatcatcagctgtcgcaaacgcaggatggcttaaaacgcatttcagaagctgcgttcctctcaaggcgtttgtgagcggtaagtgtcctaaaggcgtttcatcgttaagctcccacttgaattcgtcaggaaacgctctgtaattgtattgaacaacctctgtgtcaagaagcttcatccactcaactttaacgaagaatcttgtgaaatctttcttcacttttaaccagattttgcgttgcacgctgtatccgaatctaccatcactgtgtttaatccatagattgtcgatagcttgaagatcttcgggggagattgttttcactcggagaagaaaccgtagccacgtttcacggcggcttctccggatatctgaatgagtaacatccgtgtctcctcgtcggcttgtctgaagttttgattgacgagatg

SEQ ID NO: 12550 - DNA, 576 bp, Arabidopsis thaliana columbia
agaggatccctaattttgtgagtcagataattcattggcaaacacagagggacggtgtttctccagaaaacttccgaggcctaatccaccaactgaatcatatttatggacaaccaaacgctaacaatcacataattgacaaccacttaagaaacagtaaccaaccatagcaatggtaataaggctgactaaatcaacaaaccataatccttagtttgaacccatgtcttaaattacttcaccggataaaatttccttaacacaaacaagacaagtacagacactttcctagcatcaataaataaaagatcaatagctcaagtaacaacaaactactatcgttttttgaatccatatttcttacgttcatagaacagatcagttttggcactgccaagattgactatcttaggacaaccatctctatctttctcctgttgtgtacactctttgcagtagtaagcatccgagattccaactcctccgcatatgacacaccgcccttggaacgaaccatagttgcattcatcgcaaatcctaaccagagtacacgggcggacataggaatccatatga

SEQ ID NO: 12551 - DNA, 559 bp, Arabidopsis thaliana columbia
ttctgtattgaaaaggaagttcctcccgaagtagcagagaagattaaacagcttcgacttatatccccgcaagacgaagaaaccagtcccaagatttcggagaaattgcttgaaagaatcggtaaaattctcaaggccttggattcagatgatgttgagcttgtgaagcttcttttgactgagtcagatatcactctagatcaagccaatggtctgcattattctgttgtgtatagtgatccgaaagttgttgccgagattcttgctctggatatgggtgatgtgaactacaggaattcccggggttacacggttcttcattttgctgcgatgcgtagagagccatcgatcattatatcgcttatcgataaaggcgccaatgcatctgagtttacatctgacggacgtagcgcagttaatatattaagaagactgacaaatccaaaggattatcataccaaaacagctaaagggcgtgaatctagtaaagccaggttatgcatcgatatcttggaaagagaaatcaggaagaacccatggttctagatacaccaatgtg

SEQ ID NO: 12552 - DNA, 1191 bp, Arabidopsis thaliana columbia
tgcccatacattgataaaatagttaaataattggtttgggcccatggatgttttcaatcaagtaattaagagaaaaaaaaatctcgcattttgaatcttctctgtcatcattttccggcgacgacaatggcgtcagctgccaagaacactgagcaaaaccctttctccttgaaacccccaagacctccgtcttcctccaacgctgcatcttccaccgctgtggcttccacttcagttgaaccccaaattcggaaccctaaacctagcacaaacgtcttaccatcgacctcgaattcaccgattacgatgttacaagaagatgaaatcctcgcaagctctagtcacctcacacgcccagagcttctccgacgccgagcagacaacctaaagcagctggccaagtgttataaaaaccattattgggctttaatggaggatctcaaggcgcaacacagggattattggtgtaagtatggggttagtcagtttaaagacgaacaaaatcaatcgaataagagacggaggcttgatccagaaggtagtggagataagggtaatgatggtgatcagtatgcaaacagcaattccgggttctgtatgtatggatgcaaagctaaagctatggcgcttaccaaatactgtcaattgcatattctcaaggatagtaagcagaagctctacactggttgcacaaacgtcatcaacaggtttgcttcaagttgtgttcttttatattgtatagtcggtttaagatgttgtagtgatgatgaattgaaactgcaaagcaatgtttgtgccaagaaatagtttctttcttctttgagcctgcggaaaggttttaggattgagactttgctctgtttcaaagatttccgtagggattgggagaaaattttagctttggtaaccgtatatagattcggtactttgacttgtttcataaccttgattgatgtgctgcgttgatatacataagtgacaaagatgtctctattaaggtatctttgcaaacgaggtagggttatgagtattattagcattattatgtcatctttgaaaatgtgttccaactgaacattgagatgagctctttgaaaatgtaagtgacttggaatacaacattaacctggtttcagattgatacactgttattatcagattcggtttgttacaatccagatttcatagata

SEQ ID NO: 12553 - DNA, 450 bp, Arabidopsis thaliana columbia
tgtagaatccccgattaaaacattgtagtacatccacatgtgaatctataaatagagattgatgcaaaaaggaggtcattttgtagtcgaactgttgaagcaccagaactgtgagactcagtgatagtacaacccaaattaacaaaggcagataaacaaaaaaaaagttaacacaataacaataaacaaaaaaacttagatgccataacaatataaaatacttaacaacccaaataaaaaaataatgacatatgaataaaaaaaatgtgaacacaataacattaaacaaaacaaaaaatatagcgcgtaactttattcaactgtttatacgcataatggattgttgcaagtagaacgacatgatcttcttatctccccgtctttgggcttactaataactctcaccgatcccaaattcaccattgcctgaccaaacctaaccaagaaatc

SEQ ID NO: 12554 - DNA, 589 bp, Arabidopsis thaliana columbia
ataagaagttaatagcggcggttctgggaaaataaaggaaggattttgtaattaaaagacaaaacaacccttgtctttagagaaaaacagctcttcttatcttgttttctttgtcttctgccttcttcccttggttttataatctctctccgcttcccccaaaaatccaggggcttcttacacgcacacaatcctttaaagctatcgtctttcttatataatcagtgaatcttcattaacacctcccacaaaatctcagaaataactttcacaacagagtcaaagagttccaaatcgtttgtttgtattttgtacgatcaaagttgttggtacttgtaagataatcgaaaccaaagatgcggatgagctgtaatggatgcagagttcttcggaaagggtgtagtgaggattgtagtataaggccgtgtttggcttggatcaaatcgcctgaagcgcaacgtaacgcaactgtctttctcgccaagttctatggccgtgctggactcatgaacctcatcaacgccggtcccaatcaccttcgtcctggttagtggtttttcttttaacttttgatggcagttttgaatta

SEQ ID NO: 12555 - DNA, 536 bp, Arabidopsis thaliana columbia
ctgttgaacaacaacggtccgatcaacatagtaaaaacgaaaagtaaatccaacggttaaaaaaacgaaacaaaacaaaagatccgacgaggaagagtagaaccgtttgccctctctctctctatcttccttatctctctccgccactctccttctctttctccgaactcttcgatggccggtctactcaaaacgccgtctttacatctcacaccaactcttcttcatgctccttctgtaccctttaagcccttttgcgtatctttcgccggatgaagaaacgttagcgtctcactctctcgccgagcttctctccggtctgtctctagcggctatcctctccgcttactaaacctcgtaccctttgcttcgggagaagctgagacgacggagacggaggtggaatcgaacgaacccgaagttcaggtttttcgatttcggctcacttctgttcaactttcttgggggttattcattgttagttcggtgattagggtttcgaatttgggatatggtaatttagaattgcttgttgt

SEQ ID NO: 12556 - DNA, 526 bp, Arabidopsis thaliana columbia
cctcattctcatacttcaaccctctaataactctcacttcaatcccataatacatactccgttccatcgcaaggtttccaccttccagcctctgatgttcagcttgccttccaagcctatcttgtccaccctgacctgtatacataatcacatctccttgatcatcatcatcctcatacccaccagaaacaatcacactagtagctattggctccccattagaactaagactccctgtaagaaaatcgatcccagattgagggtgtccatgtaagcccatgacacataactcaaacctaaagaagaagatatccccaacttgaacaccgggaatcgaaccgacgattcgtttatcacgattcatccacaacatacaatctctcatcattgaaccagctttaccagctttaccatcagctctagctcttcttccaccaaccccattacgtttagcttcttccatcatcaaaaacatcctaagagaatcataaatcattctcgtcttcctcacatgttcacgaaactg

SEQ ID NO: 12557 - DNA, 564 bp, Arabidopsis thaliana columbia
gatgaatcacagtgttcatgcaagctcggaaggaagagttggcttcatgaatgcaaaaccttcaggcagagtaagaagtggatctttcccaactgcgagtccctggaaagctgttcccaaagcatatccaagggccttcgctactggcacagctacagcgttacctacttgaatgtacctgaaaaacagaaattatgtaagattagtcttaagaactatagcagcaataaatccaccaagaacacacataaactcaaggtcttaacaatactcacttctgtttgggtgggccaaagagtttgtagtcatcaggaaagccttggagtctcgcattttctcgaatggataaaacccgattttgctctggatgaatgatcacctgcaatcaatcaccagcaacatcaaacaattatactctttaagttggttccagtgtaacatgcatactaataaatctatgcaaacctagaacactagaataacaactagccaagattcagaacaaatacttgattgtcatgagaggtctccctggttgtggggtctgccgtgtgatacagtggg

SEQ ID NO: 12558 - DNA, 456 bp, Arabidopsis thaliana columbia
agaactgaaagaatccagagctgaagtaagaaacacatttcagtgtgtgaggactactactacgtagtacgtacagatgagaagaacaagtcgcttagccggcggtcagagaatctcggaggcacaggatccatcccgtggactatgggcgttttgaagtaaatgtcgaagatgcttagcatgtagacggcgtgaagagcaacaccgagaaccaccagccatgtttctcgcctctttagccatcttcgtctactagcgaccacgacggctgttgctcgactctgatccgaacctccaactcccaagatcccgtcgctcctcatagatcttcccaattctccgaccaaaaacatttctccttggatttttttgttaaatctccatttttcagtgttcactattctcagaactagagcccagaccttcagcttacgatatacaaaactatgatataag

SEQ ID NO: 12559 - DNA, 621 bp, Arabidopsis thaliana
taacggccgccagtgtgctctaaagtggctcgtccaagaacaacagcagcgacggcttgctcgccagctcaactgcgatggtaagtctctttcgctgctcttggttcagtccagtcccgccagcaccgactgtggccccagcgatctgccgcatttctagcaggtcgataattttctcgcagtaatcgtacttctcttcgatggggacttcttgaggctggcgcaggagagcagaaaacctcagagattctcggacagtagcggttggctcatggatatcttgttgttcggcgaacccagtcgctctctggaagctgcgaggaaggggtctgggattgtgagtacaagagtgacacaaatagttaggggtttctcactttccgtcaaccaggaagtcccctgtgacaacgccaaagtctaatcgctgggcgagtgcattgagaagagttgttttcctaggatgcttagcttgaactctttgctataggctcgagtacacttaccctgcaccagaagctccaacaagcgcagtaagacgaccgggacgaacatatccttggacgtctttcagaagctgcatctttcagcactaacaggaatggtatagtcacattctggaag

SEQ ID NO: 12560 - DNA, 818 bp, Arabidopsis thaliana
tgccatctgtcagctgtgtggcgaagaagatgaaacagtaaatcaccttttgtttcaatgcaagctcacgaaggaaatctgggacctcactcctatttcaactccttcaggtgaatttcttaatgcttacaatctagccgataatttgcaggacctaatcatgattaatagaaaccatgccaatgagctgaaacttttattcctccttgggtggcgaatttggaagatgaggaatgctctcatttttgaaaacaaaagaatggttgttcctgatgtcattagtcaagcgcttgttgatttatctgtgtggaatgaggcatgcaaattaaatcagaataagccatgtagtcaatcgaataatgtgaagctgccaacgaaggaaatatgtactatggaagaggcaattcacagctctgacgcctactgttgttttgcagatggctcctggctttcacctacgcaacaagccggcattggttgggcactctataacaaggacgctgccctccttcttcaaggctctgctgctatctcccctatggtctcttctcttgagactgaagcagaagcacttagaatggcggtgctccaagtcagaaacctgggatattcacgtgttacttttgcaggtgacaacatggatctttacaaagcattagagatgaacgaagctgcacatcccttacaaagatgggaacatactacagtctcttcgtatatcagagacatcctgcagataaataacgctcgacatgattttagctttatacagatcttagaaacgcgaaccatgtagcagattctctagcgagaagtgc

SEQ ID NO: 12561 - DNA, 896 bp, Arabidopsis thaliana
gctgagagacagtgagaaagagatgggaaagggaaaaaaaaaaattgttttatcaaactcacgaccaatcaggctgtgacacgtcaagtccctttagcttcacaaaaacctcttaatttaggaacgttcctttgggcttttataggaagagtcttttgctctagagccctttaaagcctttcattggacctgctcttaaaggactttaaccttgctatgattgccaaacaaagctggaggcttctccaacaacctcactcactactagcaaggctttacaaagctaaatattatccccactcaagtttgttggaagctggtgtcaagtggcaatctagccatgcttggagaagcataatgcaaggtaatacacttctagctgatggactaaaatgggtagttggtaatgggcagagaaaaaatatatggcaagataaatggcttccatcgaacccaccgcgtgcccctaaacgctaggaaaatgttcgtacctcactaaaactggttaaggatcttttcataccaggtaccactcggtggaatgaggagttgatagataaggtaatagctttggaagacagaaatctaataaaggctattagaccatctttagtggggggtcagtgatagtataacttggatttattcaaaagatggtagctactctgtcaaatctggctattatgcagttcgtagaagaggaattgagcaagacgctactgtgaacagccaacacactcattttctttttaagtacatttggaatgtggacgtccctccaaaacttaagcatttttggtggcgctccttgcataatggcttgcctgttgcagataatttgaagaaacgaggcctacgggtagatgccatctgtcagctgtgtggcgaagaagatg

SEQ ID NO: 12562 - DNA, 1173 bp, Arabidopsis thaliana
cataatattcatcaaggtaaactgcatggatttaaggcaagcagaaacggccctcctatatctctacttgctattcgctgatgattccctcctgttctgtaaggctacagtggaggaatgtactgccctcctgcaagttcttaaccaataacatgcagcatcaggtcagcaagttaatttccaaaagtctgccgttacttttggcaagggactcaactgtcaacaaaaacatgatcttactaatattatgggagtcactaaaattagtggttttggacgataccttggtttacctgaatttgttggcaggagtaaatataatgctttttcttaccttcaccacagagtttcacagaagctccaaagttggtattctcattttctctctcctgcagggaaagaagtcctcatcaaagctgttgccactgctctcccatcttactgtatgtcatgtttcatgttgtgtacaaacttatcaaggaaatcacctcagtcattcgcaagttttggtgggcagcacacaacatcataataaaatttcctgggtagcttggagcaaaatcaatgacacaaagaagatgggtggacttggcgtcagagacttaaaggactttaaccttgctatgattgccaaacaaagctggaggcttctccaacaacctcactcactactagcaaggctttacaaagctaaatattatccccactcaagtttgttggaagctggtgtcaagtggcaatctagccatgcttggagaagcataatgcaaggtaatacacttctagctgatggactaaaatgggtagttggtaatgggcagagaataaatatatggcaagataaatggcttccatcgaacccaccgcgtgcccctaaatgccaggaaaatgttcgtacctcactaaaactggttaaggatcttttaataccatgtaccactcggtggaatgaggagttgatagataaggtaatagctttggaagacagaaatctaataaaggttattagaccatctttagtggaggtcagtgatagtatatcttggatttattcaaaagatggtagctactctgtcaaatctggctattatgcagttcgtagaagaggaattgagcaagacgctactgtgaacagccacacactcattttccttttaagtcatttggaatgtg

SEQ ID NO: 12563 - DNA, 759 bp, Arabidopsis thaliana
catcacactcctacacaagtcatatgagtttgatacaaatgttgtcatggtccaattagtcctcttatgtgcactagttagctaacttggactgcattccatcataagatgtgcaataaggtactccaatttcttattatcagaagctagtgagctctcagtccgcttggccaacaaagggtcaaacaaaaagctttgaagagtttccaaacagtaagctacactgcataactgaagctacatggcctagatacagagtgtgtcatatgtctttcggagtttgtatccggagagcgagtcaagcttcttccaagttgcaccatggattccatgtccggtgtatagaaaaatggctcagttcacactcatcttgtcccacctgcaggcactgcctcattcagacttgcaagaagatagctgggtacagtgagacagtatcatcacctaatcaaccacaacaaaacatgcatatatcaccgctaggaccggaatcattgatacgcggttttagctaaacacagtcaactaggcttaggtgcagttatcttttataacctgatatacatgtactgccacacctttagaaatagtcaagatcccaaagtatctgaagttcaatattcaaaaacaacgtaatcgtttccactgtaaagttttaaacattatgaaatgttgttttcttcactcttttacgccagaaagtgtacattcgcacaacaacgacacatccacatagaagatcttagactctcacgtcag

SEQ ID NO: 12564 - DNA, 335 bp, Arabidopsis thaliana columbia
  unsure (1)..(335): unsure at all n locations
gatccccgagctcgatagcttcactatgtttctgtgtctgatgttaccgagaatctgaatctctgcagcgaatgaatctattgttgattctccttcttcgttgttgtctttagttttccagagtttcttcactgctacgatgtctccgttggggatttcggctttgtatacgattcctgaacatcctcttccgactacgttttcgtcggttaaggaagtgacgatgttgtcgacggcgaaaccgagtctatggaatggtatgaatgtccacgtgtatcagacatcttnnnnnnnnnnnnnnnnnnnnnnnnnnnnnnnnnnnnnnnnnnnnnnnn

SEQ ID NO: 12565 - DNA, 342 bp, Arabidopsis thaliana columbia
cgattctgattccttaccgtttcttgaattagtatgcttttggcacaaactatttgttcttgttgttcttgaacttctaatatttcgggtttttgtaaaaccatggcaggccctaatttagagcttccagcacatttctccccaatttatttcccgatgggaaacgcagccacaggattctttgtgataatcgcgttgctagcgggagtagttggagcagcttccacaatctcaggccttagccacattcgttcgtggaccgtgggaagcttaccagcagcagccacagctcgaagcattgcctggagcctcacagatcttgccatggggtaaactctcttg

SEQ ID NO: 12566 - DNA, 491 bp, Arabidopsis thaliana columbia
caacgaattcctgctcattcccactggtccagagttactgtcgacttggctattccatgtgagaaacctggtccgcgggtgtttaagggatttacagtcggtttgcatccacgctcatgggaaattgtaagaaacgaacaatcccaattttctggttacagctttttcttcaaactgaacataaacttaaaattggatttttcacctgcagatctataatgggatgacacagtttggatttgataagccccgtcgtgagtttaggtatgaaatcaagaactttgtatgttcacgttagagatgcagtgtatttacatcctgaagtgtttccgatttgtagcttcaagaccgagcagactcatctcactctctatatgactgcaattgcatctctttcaacattggtagggaagcctatcaccaaggttccccagagaatggtcttgatgttcagatagctggttcttcatgactgggaatcatcaacaact

SEQ ID NO: 12567 - DNA, 465 bp, Arabidopsis thaliana columbia
acaactttgttttgcaataattcatgcatgcgtcgctttatcgactaatattcgtacataacaagttgtactcacacaagtcataagtacattatcattaaataacatagactatggaatcaagtaacatttaggtcacttatattttaatgcaccgcatctaacgcgattagtcattaatacacggatcgtccgatctaacataaaatttgtatttatttatatatatacagtatataacctttctcattatttcatcttaaatcattacaatcatcacaaagccatcgcaaattagacgagatttaagatggccaacaacatctcctttccttgcgccatcctatttttcgctatcactattttcttcttaatcaagtcatcacacgcaatgccatcgtttaacgtccacaggtacggagctagtggtgctgggagagcagatgcgaccaagtcctttttgac

SEQ ID NO: 12568 - DNA, 335 bp, Arabidopsis thaliana columbia
tgactctgatatcccgttgatatttcccttcaagtgcaggcgagagaatactttgagatggctgctaataatgaagatcctagcgggcattataaccttggagtgttgtatcttaaaggcactggagtcaagaaggatgtgaggcatgcaaccaaatatttctttgttgctgccaatgctggtcaaccaaaggctttttatcaactcgccaagatgttccatacaggcgttggacttacaaagaacttggaaatggtaactatcttccgtaccatgaatgtcatatacaaatagttttaaaatctatacagttctgttagaatgaaactccaact

SEQ ID NO: 12569 - DNA, 570 bp, Arabidopsis thaliana columbia
  unsure (1)..(570): unsure at all n locations
cctctccgttgtaatgtgccatattcatcaaatgacaagagttgcaactccttatcttaaggaataagattccaatatgattcgaataaaccaaaaatgagattaatttatcaataaattcatcaaagctactcactctcttggaaaaatgagggactttcggtgcagaagaagctccaggaaccgaagaacagttacgggtagctccaagaggattagacgaaacccttctgaacaaaaactctctcgcccatttcgccgacgacgtcgcagcccttccggccattaggtaagatgattaaatcgacagtggaatcaaacagagttcgaaaatggttgctttgaaatctataagaagagggttttagccttctagctcacggcttgaatcttgatagagagaaaaatatacgctttttgtttgttgttcggttacaaaggatcgtcagagtatttgctaaaacccttgcttccttcaggttgatctttccggttcgatttaccggtttaatgtagttaactggggtaaaatcttatatgttaaccggtttgnaaagagattgataagga

SEQ ID NO: 12570 - DNA, 1117 bp, Arabidopsis thaliana
caatgaaaccagagaaaaaaatcacagcttacgaagcataagagaagggtcaaagaaagtaaccgacaatgagggagagaaaagagcaatttcgacggattaagaagcttttgaagaaaaccctaacaccagtaatgacgcgagcgaaaatggtaacacaaaactccaaaggcctgatgaaagagagacgaagaaaacaagccaaaaaaactaagaattgatcatcgggaactgaaacaagtaacttcagaagctgaaaaagacagagaagagaaagagaaccgtgagcgtgagaagaagaagaagaaggaacaaggcgtggaggccccgtcatttgttttaatcaaacaccgacccgcgttacgtttagggcccatttcgttttagggcccaataataagatagagtaactgaggtttgggcttcgttgttggacctgagctcgttatggaagagtcaacttaactttctatgaacactttcggacaaagctggagtgtttggctctgaaaactcaatttctctctactctttacacaagcaactcctgccatttgcgtttttgttcaatcgattcaaatagacataaatctagtgacgataagactcgcatgaagattttatccgtaacaactaattcctcgatatacatacttgtactttaatcatctaaaatgacagaagagagctaattatttataaacttacaaaataaaaattgttcttctttgaacgacgaacaatccaagaaacagagaagaagaagaagaagagatttacagtaatttcttgtaaataagttttgagatagagagacagagaattacacagttaacaaaaatataatttaagaaggaagaaccttcttgacaatgtcttcactaagagcagcaatctgagaatccaaagctttaatggtttcttctttctgactctccaagctcgccaaagcttcttttagctcttcctccaccttcttccttccctccgctagcttctcctcgacttcaacctgcaaaaaaaatacacaatccatttaccaatttcttcactctgagtgcattgttgtttcttttatacctgagtctccttcttcatcttgttaagcgcggcgcga

SEQ ID NO: 12571 - DNA, 530 bp, Arabidopsis thaliana columbia
cctcgcctaccttttcttcaaactatcaacctctcaaacaacaacttgtccggtccaatacctcacgatatctttaccacttcgtctccttctctccgttacctcaacttaagcaacaacaacttttccggctccatccctcgaggctttcttccgaacctctacacgttagatctttccaacaacatgttcaccggtgaaatctacaacgacatcggggttttctctaaccttagagtccttgatctcggtggaaatgtcttaaccggccatgtaccgggctatcttggaaacctctcaagattagagttcttaacattggcttcaaaccagttaaccggagtgtaccggtggaattagggaagatgaaaaacttgaaatggatatacttgggatacaacaatctctcaggagaaatcccttaccaaatcggtgggttatcctctcttaaccaccttgatctcgtctacaacaatctctctggaccgatacatccttcactaggtgacttgaagaagcttgagtatatg

SEQ ID NO: 12572 - DNA, 457 bp, Arabidopsis thaliana columbia
agcaagaggtaatctgagatttttccttcataatagtacaagcactcttgcaaagttgcaataattcactatggaccatcaattacgaacatcactattacatcaagcaataatgagctctgagcaaagctgtggacaaaagacagagacttttcgttaaacaagataagaacaacaaagatcaagatactcaagataaacgaatcagaaccaaacgacaacgaaataatgttctcaatagactagacagacatatcacatcagatattttttttcaacttttcttacatcgtttaataattaactaattaaatctcttacaatcacatagcaatgtcattacgaatgtgacggaggatgacaggaataacagaatctggtgagctaagctgaggaagatgaccatcagaaggaataacctcgacgacggattcacagccaagattggcgtgaagat

SEQ ID NO: 12573 - DNA, 868 bp, Arabidopsis thaliana
tacattggaaaaattaacatctcgagagcgagccccttttgcaagagtgtcagctcaaatatttaacttcctaggtatatgtgatatcgcaaaacatcaaaatctattatgaaaaagattaaaagaatctatgtctgttgcaaatactggccatagatcttcttcttcgacaatttttaaaagttcggtgcaatctgtcgcaaaataactggaatcaaagccattatgaatcgcataatccattgcacataatagggactccaattctgcatgaacaggagataacactctggacttacctcttgatcctagtaatcggctatttgattaagaataaagccaaccccgtaagtgttactgtatgctacccacaaggcatcgaattggcacaagaattgtccctcccttattggggggtgggggtggtgggggggggggggggaacttgagtctccaaggccaacacttcatcattttccactatttgttcaaggatttgcaccatcttccaattaatagttccgcggttgcaagctgcaaggtatatggaggaaggatatctttgttattaaagactttatcatttttggctttccaaatatagtagaaaatcaatggaaatgtttccgaagtgtccgtagtcactcctgtctattttgctgtccaaagaaggaaatcaaagttggcgaacagagatctactcgggaaaaaacccggattaattggttggcatatttgagagtgcctagacctgcattgcaggtgggcattcaaatagaaggtgatttaacgattcttcctcttcaccacatgtcatgcaagttcgatatgaaccacattggcggtctacaagtctactagaagactc

SEQ ID NO: 12574 - DNA, 468 bp, Arabidopsis thaliana columbia
cctcggaataacatcctaaaataccctccatcttctcggttttttacgaaagaggacctcttttgcgttttctccgacgtaaacgattcgtctaaactttttaaagagcttcctttcgcggtggaaaccgacgactatggccgtcagatcgtacggtgttccgccgtgcctcgtggcaatactgtatccctcgccgtttcgagatggagggttgatgattataatctccaagtagggctcacacaccgatgggattggctggtgtacgacgccgtgatcgacgacgacaattccacggtggtttttgtcaaggggcttaatctacggccaggaaaggttgctgacgcgtcgagatatgagtgtgtatacggttgggatttcacaaagcccaaacttttgcttagagcacaagctatctctgcggcccaagagatcgtacgttgtaaaacagccactgacagtattaga

SEQ ID NO: 12575 - DNA, 419 bp, Arabidopsis thaliana columbia
catctagcaactaaatgtgagaaaagattgactcttcttcttctcctccaaaacactacaaaagttgaaacaaaaaatgctcttcgatatctctcgatgtttcattcgttcttatctccaaccaaaaatctattgctgcttctcgggttgttcctcttcttcttggtctgggttttcttcttcctcttctttcttctcttcctcttcttcatcctcttccggaggatcataaggcatcggtggtggcaatggtgtcttcatagggctaaacttggggaaaatgtcaggcctcctcccaggtttaggtctttaccactcctaacaagtagatcacaacataattaacatcgcgagactcgtaaagaacataacacgggaaagcattatgattctcagtagattctcgggtattcatattc

SEQ ID NO: 12576 - DNA, 504 bp, Arabidopsis thaliana columbia
tcgtaatctctttaaatgaagcaaaagaaaaaaccatattatttctaagaaaccaagtgagtactctaattatgcattctcattttacctgaacgtcaaaaggcaatggatcaaacccgaggcgattcccgtatccgaaaagatgaaccattccatacttctttaacaaaggaagaacatgttcgatgtaatcgactggtgttgcctcttttacaagctccgtatcagtaacctatgtagaaaaacaaacattatgaattttgcatctccaataaattagaccggacaaggaaaaaagggagttcaaaaacacaccaagctgagattcttgttatcagtagattttagatgttgaggaagattcttcactatattcacctcatctttcagatactcgataaaatgatcctcttggtatatatcacgaattggctgccatttacgcactttcgcaaaatcaacaaacaaattttttttataatagattttgacagtcttgaggag

SEQ ID NO: 12577 - DNA, 1144 bp, Arabidopsis thaliana
ggtgatggatcgggacagtgatgtgaatggagaaggaggattcgccagaaggcgattaaatatcgaaacggatcttctcgccattgctagatttagcttcttttagggtttcagagcaacgaaggtcgatttcgttttcggcgatttacatgcagcgtttatgcctttgtcagttttattttatttctttggccaatcagctttattccaaaaaaaattattttgttcaatcatttttttgtaatttctaaaataatattttgtaaaaaaatgaaaattgttttatgataatataaagaaatgttttattgtagcctaaagttcacgtccacttcgtgtgtggtacgtttaaagtaatatagataaaggatacttccaaatagttttggattctcttgcaatggtggtggtattaagaacttggactgaatcacggtcacacgcattacaaacaagagcagagagagagagccacatctgatttcgcatgaaacattccaaaacagtgaggacagaaacacaagacttcagttttacttttttttttcttttatctttttgactgtcgctacttcgattccaacacaatcaatcactgtgtttaaaagggtttctcagtttccttatcattaaccttttttttatcatcttctctacactcttcaccaatagcttcactctttttggtcatggcttgtataaacggcgagaatcgtgatttttcttcctcgtcatctttgtcttctcttccaatgattgtctcccggaacttttctgccagagacgatggagagaccggtgacgagtttcctttcgagaggattttcccggtttacgctagaggaacccttaatcccgtggccgacccggttttgctggattttaccaattctagttatgacccaatttgggattctataagagaagaagctaagcttgaggttttctccttatgctccataatcatattcttattattgatttatacgtttttcatatatgtgacttcaattcaacaaagacagaaactttgatattgttaatcaacttcgattttctacattgaaaggttatgataatgacattcttgtgtaccttttatatcaatccgacaaaaccagtggggtcgaattctcactaaatg

SEQ ID NO: 12578 - DNA, 583 bp, Arabidopsis thaliana columbia
cggtgaacacgtgaagccaatgccggaatgtaatgtccagcgtaggattcaccggtaatgtaaaaatcattcttcacaaattgtggatgctctttgaaaaacgcctgcaaagaaaatgtgtcacgtcaagaacatgtttttaatgtgatgaaacagaggaaagaattgaaaccgaacctgtaagaagtcataaaggtcattactgacaccatcctcgtcatgacgaagatcgctttggtccgatgtgtaactgaaaccagttcctaccggttggtccacgtagattagatttgatgcctataatattaaaattgaaataaagtggttgagaataatttggtttcttgttgagatatgagaaaacgtgttttggttgaccatttttttttctaaccaaccttgtcccaaccaaattcgttccaagaaagagatgagttgttagagacggtgaacggtccgttctcgtagaacagagccagttcactactgcaacctggtccaccggttagccaaatcacactggatcggctttgttcgtcttgactcgaagaaaaagtagaacatcatgagaaagaaattgagc

SEQ ID NO: 12579 - DNA, 510 bp, Arabidopsis thaliana columbia
ccttgatatgacgtttctcatttcttgtgtttaacatgcagtcccttacaaatctcaagaatatagatttgagcttttcgcgtaagttgaaagaaattcctaatctttcaaatgctactaatcttgagacattgacacttattaagtgctcaagtttggtggagcttccctcttccatttcgaatctacaaaaactgaaagcgttgatgatgtttgggtgtaaaatgttaaaagttgttccaaccaacatcaacttagtatctcttgagaaagtcagcatgactctgtgctcacagttgagcagttttccagatatttcgaggaacatcaaatctcttgatgtaggaaaaacaaagatagaagaagttcctccatcagttgttaaatattggtctcgtcttgatcaacttagcttagaatgccgaagcctcaagagattaacatatgtcccgccaagcataactatgctaagcctaagctttagtgatatagagacgattccagattgcg

SEQ ID NO: 12580 - DNA, 153 bp, Arabidopsis thaliana columbia
aggttcagttggccgctggactcgatgaaaataaaaatttaactgaagctgcgcaacagcgtggtttggcttgtctagctcgattcgttgggcgtttaagttctgttcaacctaatcgtttaagaattgtggcaaccaatgcgttacgacaag

SEQ ID NO: 12581 - DNA, 589 bp, Arabidopsis thaliana columbia
cacgtccagatgtcgaactcagttcggaagattcaggtccagagaagcctgacgcagatgtttctccagagataaaatctgaggaaccagaggccagcaaagaagacaggcaaaacactgcttctgttgatgcttctacgactttgtcaacggagaagatccaggccattggttctgaagctgaagtgaatccctcaaagagaagaactactgcagttcctagttcgccgaaaaggaaaaaggtgttgaagtcacggattgatgatcgtgggagagaaggtatgctaagcatccatatcgttctaaatagtaacaaaaataaacaaacgtatgtcaatgtctcttacttaaacaattctcttttggctggatatagtaactgaggtagtgtgggaggagacagaaacgaacgcaaagaagaaagaggacagtaatacaagtaagaagttagatgatggcaaaaccgcaaatgctgttaacaggtatgttttttggagatcattctgtaagcatgtttgttgtgaaacccgaatacaatattatagcatctacgtgagtttcttatttcagggcggttgacagaagaaga

SEQ ID NO: 12582 - DNA, 704 bp, Arabidopsis thaliana
gtcaacttagtcacccaaatcttgtattactagttgggtattgcgcggaaggcgaaaaccggcttcttgtatatgaattcatgccaaaaggaagcttggagaatcatctttttagacgtatgttttcagcaactcaacaatcttgaattcaagaagaatcttacatgtttctttgtttttcagttttcttataatcatccggtcaatgttacttgcaggtggggcgcacacttacatgggcaataaggatgaaagtggcggtaggtgcagctaaagggctaacttttcttcatgaagcaaagtcacaagtgatatacagagactttaaagctgctaacattctactcgacgctgtaataaacccgagcatatactctctataaccactttcgggatttgcttctgattcctaactgtttgaaactgtgtctaaatgcaggacttcaatgctaagctttcagatttcggattggcaaaagcaggtcctactggtgataatacacatgtgtcaacaaaggtcattggtactcatggatatgcagctcctgaatatgttgccacaggtttgttctaaacttacatacgcggtaataaactagacaataccacgagcccatctatggtctcaataaggttttatcagtttctgtgtaagacaacttcacaagctttttccaagaatgtttcaaaacctttgacttatt

SEQ ID NO: 12583 - DNA, 527 bp, Arabidopsis thaliana columbia
taaataatttagtcgcttgtagtaaattactttggccttatttttgccaaatatgttcaatcaaatcttttttcaattgtcgatgtgtttgttcatgatgtatttgagctcgattggccatcaaattgttcacatttgtagttgtgtctgtagaaaaagagttgtctaattgaagaagtcccgcttccttcgccttctacgaaatcagataaatcaaactgagtatattcgtctcgtttatcttctataatcatattgtgcaatatgatacatgctctcattattttgcccattccctctttatcccaaaacagacctaggtttcaaataatagcaaactgagcctgcaagactccaaaagcacgttcgacatcttttctcactgcttcttgacaactagcaaataatgatgctttcggtcctggtggacgggtaattgattggatgaatgtccccacttcggatatatatcatatgtgaggtaatacccattttgttttgatgtcattgatttcgtcttgagtcgt

SEQ ID NO: 12584 - DNA, 561 bp, Arabidopsis thaliana columbia
catgttgaattcgaaaaaatctgtttatttctgttaatttgttgacatttgcagtaaccctattgtttctagcaatagcatctctgattggttgaaactatagaattgatcagtgatcagtgagcactaacatgataagggtgtgagagtgtctttgtttcttttactcaatttagaaaagctttctggttattcatggtttcctactttccttaacgtttttgtattggtatttataatgcagttacttgttaattttggatcgtaccaattggaaaaccaagatgcttacatcactcctaataccatacatcttccttagccttcctagtgtcattttcaactttctcaggtaacaatcttttcttgtcaaaagacacaactattcttaaaactgtagtctatatactggactggtgtaagtggcatttttagatttttgttatcagtggagatgttgggaaatggattgctttcgttgcggttgtctcagacttttctccctaagcattcccaggtgatgacacttcatatcattcttgatttgtactctgtattgtt

SEQ ID NO: 12585 - DNA, 527 bp, Arabidopsis thaliana columbia
ctgttttcggttacggatcagcgttgatcaagtcattactcttcaaaacctcttatggaagaacctctccaatccttggtcacacgacattactagggaatccagctgggaaagaattcatgctcgagtccaaatatggaggaaagcttcttggtttccatggacgttctggtgaagctcttgatgccattggacctcacttctttgctgtgaactcttctcttaagcactttaaaccgcaaggctgggaatggagggagtgcttgggacgatggtgcttttgatggtgttagaaaagtgcttgttgggcgaaatggtaagtttgtgagttatgtcaggtttgagtatgcgaaaggagaaagaatggtaccacatgctcatgggaagagacaagaagctccacaagaggtatcttcatagaaatatttgtgttgtttcttgtttactaagattttattggtctcttttgactggataaatttttgaatttggttgtagtttgtagtggattatcctaatgaacatat

SEQ ID NO: 12586 - DNA, 336 bp, Arabidopsis thaliana columbia
tatcttccgccgtctcaccgttaaacggcggttctccagctagcatcgtgtatatcactacaccagcgctccatatatcaaccttctcgtcgtacttcctccccatcactacctccggcgccacgtaatacggtgttcccacaactccctccgccgttttctccgcctaaccacaccgctgatccgaaatcacagagcttaacaccgccgcttacgagatcgactaagacgttgtcaggtttcacatcccgatgaacgacgtcgcaccggtgacaatgagcaagcgcactgaggatctgtttcgcgtatgaggcggattctgattctgataacctc

SEQ ID NO: 12587 - DNA, 422 bp, Arabidopsis thaliana columbia
gaggatcggatcaaagggcagggacgtaaaaagccattacaaatagatgaaatttattgacattaaaaattcaacagagaaacagatctgatggttttagaatcttacttaatgcttgttcggctgagaatcttctagaagcatctttgcatatcaatttccttaggaaatctttagccatagatgaaaccccccggaatatcttcgtcggaaaacggagatttcctctgagtaccgcttcgaatatctcttcagctgtctcgccgtaaaacggtggagttccagcgagcatcgtgtacaaaacgacgccggcgctccatagatcgaccttctctccgtaagaatatcccattaaaacctccggcgccacgtaatacggcgttccgacgactccttcggtggtctctccctcacctaaccaa

SEQ ID NO: 12588 - DNA, 568 bp, Arabidopsis thaliana columbia
cttatctcctttagctaagtttagacaggacaagacaagtaaacaggtaacgaatccaatacccaagaaaaccatgattatatgctagtggggaaagacaagatccgctaagcaaaggtgcagcagaatcagatccagctgtacgaacaacacgaccaagtttcagggatctgcatgcataaacgaaaccctgattatataattcaagttcaaatatagaaagcaaaaaaaagctaagagatatatgcagattgttcttcaatctcattgaactcagtaggttttataccagcaattagaaatataaaatcacattggttggttgtttgaagacacaaaaattcacctgagttctttaccagcccgattgatcatagtagacacaactcctttatcagcatatctagcagacgttgtcaggtcgatgtgggagtaacataaacggtccattgcacatttattgaacatggtgcagcacacagctgcttgcatcatagactttgtatcaagcatcgaaaagacctgaataatcaaattcaacagagtaacatgagaaaccactaaagat

SEQ ID NO: 12589 - DNA, 542 bp, Arabidopsis thaliana columbia
cattgttaacggaacgtttgaaagagtaacccatagcggaatggatttcaaagccggttgaacatcctctgagtatggagtccattttgatattatcattggaagacccatgatattccacatacgcctattcagaattctatgtctcattgcttcattccgaacacgaaacttaacagttgattcattaacctccaacacgtctattaaagtggacttgtcacccagcctccaaattttattcacgatcatgtggattttgccaacatgcggtgcttttgaatttagaatattcccaaccaaaaaatcttcccaaagtggttttgcacccaaaaacacctcctttggtacaaccactttttcctgtccatcgacttctacaacttcgaacttctgttttgtgaaagaccgcttttgcgccgcttgcaaccaagatttctttgttacatgcgacgttcctcgactagcctctgaagtagcttcctgagactcccaacacctaaaatcgacttcctaaaacaaactgtcactattagatccaa

SEQ ID NO: 12590 - DNA, 784 bp, Arabidopsis thaliana columbia
tgatacgagtttcaaaagagaatcagctgcttgaacctgccaccattggtgaggaagtaagttaacaacactccagagactcataagaaaatctttcaacaacacttgagtggcctatgtaacttccctaatccatatgcctaaaagaaatcattcaacaaacacaatgaggacataagctaacaaaacaacccagttttgaaacaacagtaaaaattagattttggagaatcatgagtgaatgtttggtagactcaaaaacattccaaatatgtgtactttggcagagattcaaaacgtttcacatctgatttaaaccctgatttgcatgaacctattaaagaaatcattcgaattcaatggagtgaagtaattatttaccattctagaagctcgcatctccatcatgtatgtctcctgcgagttcttcaccggcggatcactcacctaccgaaaccaaacatgtttcgcctcaataaacactaatcttaaagccaatctaagagattgaaatttctgataaatcctaacttttaaaaccggaaagaaaccacacttacccttgaaacattgacgatctgcgtgaagttatcgacgacagatgtgatgtcagtctccactctctgtaacaacgccttttgcttctgtaaacgcgcggcggcggcggcggccgttggaccgcttcctccaccggatccgccaccggatccaccgcctttgttcataattatcgctggtcttttgcaaagaaacgaagaaagtaaaagaagctgatggctatggg

SEQ ID NO: 12591 - DNA, 742 bp, Arabidopsis thaliana columbia
gtaacgaccgccagtgtgctctcatacaaagcttgcttaattgactccaatcctccaatagaaccaaattcaacatctatgtgtaatgggtttattacatcacacgcaatcacatcctgttttcacaataaacaattgaaaagattggattttgaatacgaattcaatcaattagagaactgtatagaatcaaaattacctcgtattgattggtttgaataagaggacgacccaaacgtttggcgatttctcttttgtgctcgagagactttttagcggcgtcacggttcgggtcaagttgacggagaccaacgtagagaaccaagctactcaatgcagcactagcgacgtaaagtatcaattgttctatgaaatttgaatcctttctccctgaagatctcttcatatctttggatttgggaatcagagaagattcaaaacgaaaccctaattcttgaagagcgttcgtttggggttgaggatagggaaaggaagaagaaagctctaaactggaaattacaggaaaagaacagttggtggcattatcgtaatatcgttgagaattgtgtgcatattggtaattgttttggaactggcttaataggccttgtgtggtgtttcgccaatggatctgaaatttaaagcccttcgaaagcccaatttctaatattataagattttgtgaattctgtttttgttacaaaagtagcatttggaaaaagtcgactcctgaaaaatagtc

SEQ ID NO: 12592 - DNA, 580 bp, Arabidopsis thaliana columbia
cacgcgccgtcggaaacggtggcgatttcaccttcatgacgacggagtaagtctcgtagcctttacccgacgcaacgatagccgattccggagagagcttaacgtccacgtttcgatccgttaacaatttcgccgttaaaggtgacggagtattaacggaaaatcctgtaaactcctcgcagtcttcgttctcatctgattcaagtattgtgtgaaatccggcgggagatatcggagatgaaatcaaagcttcgtcatcgttgtaaactctcaacgacttgtttttaatttccggtttgatttgagattccggtttagcgtaatttcgaatctcaggcaaaagcgaggatccgcaaaccggacaagaagcaagacggttatgattcgcggcggcgcgtgaggttacgcaaggaaaatgaaacgtgtgagaacactccgccgtgaaaatcgccgtaccttgacctgatttcacactctgtaaacagattccacatttgttactgctactctgcttgaatcggagtttggatttgaggagagtgaactcgccggagaaatagaagaagagaaggtgttaaag

SEQ ID NO: 12593 - DNA, 550 bp, Arabidopsis thaliana columbia
ccatattgaccaacaatgaagaagcacaaagcaagaaaaaacatatataacacaaagtgtattgtagtacgtatatattcactctttggaacgttttggttttcgtttaagccaatgacgaagaggtcgccattaattctcctccttgcttcacacttgttcgtatcaggtaccattttttaccagattggtcgacgattctttgatttgctgatcatttatttttctttcttatctttattttattcctaggagtgttttccaatagtatcataaccatagaaaacaaatgcaacaacacaatttggccagtcatcttctcatggcggtcacaagtttccaccaccggcttcactctcaagaccggagaggaacgtgccataaacgcaccatcttcatggtacggtcttatctcagctaggactctttgctccaatgactcaacaggaaacttctcatgcgccacgggagactgtgaatccggcgagatcgagtgtccggcacctacaaatggtctctgtaacttacgtcatatttagaatcgatgacg

SEQ ID NO: 12594 - DNA, 530 bp, Arabidopsis thaliana columbia
gagaatgtagaatacacttatgcggataaaagatgttggtggatggaaacaacgtcgtcagaagagtcgtcagaagagtggagattggtcaacggtttgactggacttgatgcgtacgttataaatgatactgaattttgtacttatggtggaaagcttctactcttttgggacagtcctgccttgtctcctcttgatcaaaccaagaaaatttggtgtgctgtgattttgcttgacaagagtctcaatgatgaagtttcgggtcagattgagtgggctgatgttgttcttacagtccctgtgtcctatacactctgggattgtgtgaaattctcgacatactcaacaatatgctttccagttttgtttttcaatacacaaacacacacctagtctggtgttttttaatccaaaagttatgatactacattgtattagtttacgattttatttttaaaaagttcacagtttttagtgttggagctctgttttctcaaagtggtgccaggcactgtttgactaaaatttcg

SEQ ID NO: 12595 - DNA, 696 bp, Arabidopsis thaliana
attctgaatccgctatatcttgcagtgttgtgttacaggatttgcagccatgtgtgagctacttgaccagcggaagtggaaaccctccggagacttgttgcgacggagttaagagtttagcggcggcaaccaccacatctgccgataagaaggcagcttgtcaatgcatcaaagtcagtggctaatagtgttaccgtgaagcctgaattggctcaagcccttgctagcaattgtggtgcgagcttgcccgttgatgcttctcctactgtcgactgcactacgtacgttttgaatgatatgatcgtgtctgattgttttagttgtctagtgtcttgtgttttagttcaactttatatagaaactaacaagcattaaagtttgagatactatctttatagtgaagaacttaaggtgaacataatgttaacgaatataattatatttgaaacttttatctgttgttatgactaatttcctgatttatctatttaaaaaaaaatactaactctaggtagtataagaatagattatacaaatgatagtttactttgtttatcataactttgtttagaacaatatgcttttacttaattttgatattatttgtatctcttatgtatttataatatttaacatttttgaattttgtctgtttaatttaaattctaaactttataaaatctgttataaataata

SEQ ID NO: 12596 - DNA, 541 bp, Arabidopsis thaliana columbia
ggaaatgattgaccaatctcttgagctatttctaaagcagtttcttcagatacataaaggaagggaatacctctcatctgaacccagagatcaatggttgtcacaaagttcaaagcaggagcaggctgccaacgttgagatgcgacaaaccaattgttgaaaagccagggttccctcctttgaactgatagcaggtccatttccgactgaaagaggaattgcacatatgtatcatctataatcctgccatgaacatgagctgttaagccccaggctctaggtagagcagtaataatagcctgaaggttttggacccttggattcagaggtcgagcaatgatgctaagtctgttccggcctgcaaccatgatgtatgcttcatttgggatgaacaaagaaggaccctcctgtctcaactccaaattctgtatttcgtcccaaagctcatccgccatgtttagacaaaatgaaagagagagaagagattgggataaaagagaaagcacaaaactaaaaagtatatattgaagactagaagact

SEQ ID NO: 12597 - DNA, 598 bp, Arabidopsis thaliana
tggagatgtttttttagacttttttttttttttttttttttggacaaagctttttttagattcttacttgtaaaagataggatcatttgcaagaataacacttttttactaaaaaattaagaatatagcatactatatgtatgaattaagaaactaacattgaagggtataaaaaatgaccaatggtggtggtggtatgagttcaggcgaaggtttccggcgaaggagctccggcgagggttttccggcaagggagtttcggtggtgggtttccggcgatagagttttcccgcgaggatttttcggcgaaggagttcaggtggtgatttttcgacgacgtagttccaacgagagttttccggcgagggagtgccgacggtgatttttccggtgagggagttccgacggtggtttccggcgagggagttccggcgaaggttcccggcggtgatttttccggtaagaaagttccggcggtagtttttcggcgagtgagttccacgacggtggtggcagaggttccggtggtggtggtggtggtggttctggctggggtggtgatgtgaatagttatggtggtgaggatattattgtatta

SEQ ID NO: 12598 - DNA, 588 bp, Arabidopsis thaliana columbia
ggaccatttttttcaaaaaagctttgccatatgttatgccccggttctaatatatccaaaaatgtcgtttttactttcaattttacgtttttacttgttgaaagaaaaggcaaatactgaatgatcccgttaagagatcgattgcaaaatgttagacagggacagaagttaaagagattacccgcatcgaggtacatcacactcggattccttgcaggcccgagcgtggagttgcaacagataccacattttcttgcatagaacacaacctcctgaagcacgtactttgcagcggagaccatgtcggaatagccccttcactttgcggcagttgggatatagacaaactggagaacggcattgcgacgcatgcaccagaagatcgagcattttcctgagctgcatattttagataaatgaaaactttagcacttcagatacattgtgggagctatatgacctaacaaagcccaattgttttctcaaatcagaagaagcctaaagcaagagaagaagaggcagttttttcaagaggatctaccatgcacaacaacaacaacaaaaaactgaatattacagtacctgcaa

SEQ ID NO: 12599 - DNA, 1064 bp, Arabidopsis thaliana
gtgaatctgaaaaaaggaggaaataaaaataaaaataacaagagtaatttgttttgttccaaaaagaaagaagttgcttgaacgataaccagagtaaaatagtagatgattagattattttcaactcttaatttgctaaatattagctgaaatcaaaataattgtctctaactgaatgacatttagcttttaaatgtttcctatcacactaatcacaatttaaactttccacttttatttttgtagaggaaaaactttagtttcatttttactatattcctattccttcctacatatttccttatattttttagggaaatttgcatttataactatcagaaaattataaattgaaaaactaacctatgcaaaaaaatacaatgatattaagtgtataaagtgtaataatacaataatatcctcaccaccataactattcacaccaccatcccagcccagaaccaccaccaccaccaccaccggaacctttgccaccaccgctggaactcactcgccggaaaattaccgccggaaaccaccgccggaactccctcgccggaaaccaccgccggaactccctcgccggaaaccaccgccagaactccctcaccggaaaaatcaccgctggaactccctcgccggaaaccaccgccggaactccctcgccggaaaccaccgccggaactccctcaccggaaaaatcaccgtcggaactccctcgccgggaaaccctcgccggaactacgttgtcggaaaatcaccacctgaacttcttcaccggaaaactctcgccggaaatttttgccggaattccatcgccgaaacccaccaccggaactcccttgccggaaaaccctcgccggagctccgtcgccggaaaccttcgccggaactcataccaccaccaccagttggtcattttttatacccttcatgttagtttcttaattgatacatgtagtatgctatactcttaattttttagtagaaaagtgttattcttgcaaatgaccttataatagaatggacactcttgtgaaaaaacaatgaaaaattgagatatg

SEQ ID NO: 12600 - DNA, 592 bp, Arabidopsis thaliana
taaagtttgaggatgttgttctccgttaccgccctcagttaccgcctgtgcttcatggggtttctttcttcattcatccaacagataaggtggggattgttggaaggactggtgctggaaagtcaagcctgttgaatgcattgtttagaattgtggaggtggaaaaaggaaggatcttaatcgatgattgtgacgttggaaagtttggactgatggacctacgtaaagtgctcggaatcattccacagtcaccggttcttttctcaggaactgtgaggttcaatcttgatccatttggtgaacacaatgatgctgatctttgggaatctctagagagggcacacttgaaggataccatccgcagaaatcctcttggtcttgatgctgaggtattcagttgctgcctatattgatatgaagtctcatttttaagtggtaataactgattttcaatctttgttcaggtctctgaggcaggagagaatttcagcgtgggacagaggcaattgttgagtctttcacgtgcgctgttacggagatctaagatactcgtccttgatgaacaactgctgctgtagatgttagaccgatg

SEQ ID NO: 12601 - DNA, 592 bp, Arabidopsis thaliana columbia
caattttgcatactatattcataactataataaaacaaaagcgaaaactaaacataaacctaaagctttatctggatgtgatgcacaaaaacaatttaatggtaaaagaaaattatgaatcaaggagaaaaccttgaggccatcgacagagaggaggccactaaggatacactccttaagaccagtcccaaggacaatcacatcatactcttcatccattattgtaatcgatctctatctccgttattgatcgtctttaatccttcatcgatctctaatagactttttctttggagagatcacaagtgtgagggaggaaaaagaaatagaggatgatgtgtggctgttaacacagtcttaccaccacctccgatcttaccgtttaaccccatgacaatttttcacgttaaatattaaaaccgtattgttaggggagagttattcgaatatatatggttcctatgtataaaaatggttacaaaaacttactataattagacgaacaggtggtaaaaatgtcctaattacaatgacaatcgtgttgacgtgaaccaaaaaaaaaaagttaaataggattgtatccatgtaagta

SEQ ID NO: 12602 - DNA, 653 bp, Arabidopsis thaliana
ctctagaggatcccctttcttgtgctggagctgatagacttcagactggtatgagaggtgcttttggcaaagctattggtacttgtgctagagttgctattggacaggttcttttgtctgtgaggtgcaaagatgctcatggtcatcatgctcaggaggctcttcgtcgtgctaagtttaagttccctggtcgtcaaaagatcattgttagcaggaaatggtatgatttgtgtttgcttttttatgttactttctttttgttttgcaaaaggcttcttgttgatgtttgaagttggaatattatagggggttcaccaagtttaaccgtgctgattacacaaagctaaggcaagagaagaggattgtccctgatggtgtaaatgccaagttcctatcttgccatggtccgttggctaaccgtcagcccggaagtgcgttcttgtcagctggtgcacagtgatgcagatgacttgtcgatgtggagttgatatcctagttttggcagatactcagtttttatttttttgttggtagtgacagttacaaacaattctcttgcggttctgttgttcatggataagttttatgaaagacttgttttgttatctttcatttatgcaaatttggaaatgagcttaatcattgttgtcatt

SEQ ID NO: 12603 - DNA, 481 bp, Arabidopsis thaliana columbia
cagctctattttatatatatatctgtgtgctcagaacaaaaattaaaaggaagaaccaaaaacttagcacatcagaaatcgcagagcccttctctagcactcaacacgaagaaaaagcaaaagatggattctttgcaagaacttcttgacaagaagcaatacgacgaagaagcaaaacgtccatgtcaagaagcgatgaagaagcaaaacgacgttgctcttttccttgcgggggaagtaatctctgccgcagacaaaaactctaacgtcgtcttctctcctgcatctatcaactccgttctcaccatggccgctgctacctccgacagtgaagcactaaaatcttgcatcctctccttccttaggtcttcttccaccgacgagctcaacgacatcttccgcgaaatagcttccgtcgtcctcgtcgacggaagcaaaacaaggtggcccaaaatcacggtggttaatggagtgtggagag

SEQ ID NO: 12604 - DNA, 820 bp, Arabidopsis thaliana
atcccttttctttatagggttgctattcatgaggcaatggagcagcagacaatctccattgcaaaagctgggataacaactgtccttaattctagaacctcggtgcttgctgctgctaacccgccatctggtcgatatgatgaccttaaggtttgaaatctggtactctcctttggcaatatcatggttttcccgattcttgtttgcaatattcttaagagatgggtgtgtttttttttctttggatttgcagactgctcaggacaatatcgatctgcagacaacaattctttctagatttgatcttatcttcattgtcaaggacatcaggaagtattcccaagacaaggtaagcaaggaaaggaacaattctttcagaaattttatgtagttaaaagggaaaacagagattaatgatggaggtcactgttattggaaagtttgcttcgttgcttgcttattatgtagacatgattaatgtttataatcttttcacaggaaatagccagccatattataagggttcatgcatctgcaaacaaattttcggatgaaaacacagattctaaagaagataattggctcaaaaggtgtgttttcattcgtcgagaaaacaatgtgttctcgcagttttctgtacaaaatcatgactctaaaatataatgctctttttatgttaggtatatacaatactgtcgagcaaggtgtcaccccgtctctcaaaagacgctgctgagacctgcagcggaaatatgcacaatcagaatggtaattgtcatttacattagatttgcaataagatggttaacaacaagttggt

SEQ ID NO: 12605 - DNA, 571 bp, Arabidopsis thaliana columbia
attcaatgaatacgttgcgattattctttctgtcacattcgttcttgctttcggtgaggtatgtgttttatggacttggaggaggtgtctctagttttgctagtctatctctatggttatatatcaaagattgaactgtgtttaacatttgttttcgtcttttaaggttattcctcaagcgatatgcactaggtatggactcgcggttggagcgaattttgtctggcttgtccgcattttaatgactctctgctatccgattgcctttcccattggcaaggtaaatatagtgtgtttggtcaagaatgttttggaatgtagtctggtatgtgttgtttatgcctgacggttgatcaagtggaaattaccatttttgtatgcttttggttagattttagatttggtgctgggacacaatgatgctttatttaggcgggctcagttgaaagctcttgtatccattcacagccaagaggtattcttagagactttgaaattgttactactttgtttactcctcacaagtcacaccttttggaaatttagattactaatttggttaccttgttgc

SEQ ID NO: 12606 - DNA, 527 bp, Arabidopsis thaliana columbia
  unsure (1)..(527): unsure at all n locations
tgtttaagctcaaagttgtgtcgttatactgagaatcaagtttgtgatttgttgggaatggtttcaggagattagaaagaatcatgggttctaagcataacccaccagggaataacagatcgagaagtacactatctctactcgttgtggttggtttatgttgtttcttctatcttcttggagcatggcaaaagagtgggtttggtaaaggagatagcatagctatggagattacaaagcaagcgcagtgtactgacattgtcactgatcttgattttgaacctcatcacaacacagtgaagatcccacataaagctgatcccaaacctgtttctttcaaaccgtgtgatgtgaagctcaaggattacacgccttgtcaagagcaagaccgagctatgaagttcccgagagagaacatgatttacagagagagacattgtcctcctgataatgagaagctgcgttgtcttgtccagctcctaaagggtatatgactcctttcncttggcctaaaagcagagattatg

SEQ ID NO: 12607 - DNA, 430 bp, Arabidopsis thaliana columbia
tgataattatgagcgggatagtccacagcggaaaggaggtgcctgcattcctccacctcccaatctacaggtggaccccgagacaggaacatatgcggatggaagcaccgataaaaagagtggatctgggagattgggacttggggcaacagctgatcccaacgaaccaactcagtacgatgatgtttatacatcttacaggaaacacagaagtacgaattatcacacatccatgagtgcaagagctacaaccagatgagattctccagttctcatcttttaatggctagttcagtctgtttagggtcgagccttctagtgtctagttgttaatgtgacaaatgtgatcttctctcagctttgaaatagaattatcatcacatcgattccattaaattttggaactaaaccataagtttttccaaacata

SEQ ID NO: 12608 - DNA, 465 bp, Arabidopsis thaliana columbia
accataacggtaccacaaaactcaatcataagaggtgtctcactaaaaaactatcctaaacaaactcgagaagctgtctctaaacttctaaacagagcttaagttgtataagacccctgaatctctgagctaaccaccaagaagcagagttagctcaccttgtcatccacatccgtgaaatttcgaacgtaagacacttcatatcctagatgcttaaggtacctgcctaattcccaatcaaattcaaaagaacaaaatcataaaaaaatcataactttccataaacccaagaagttttaaagcttatttctccaagtcgatacctcaagagtacatcgaaagtgacgtagactcgtgcgtgtccaatgtgactgagatcgtaagcagtgacaccgcaaacgtacattccaactttaccttcgaccttaggcttaaacagctccttcttccggctcatcgtgttgt

SEQ ID NO: 12609 - DNA, 488 bp, Arabidopsis thaliana columbia
aggatacgatccccctgtttagaagaatgaaaataacacgcataaggatacatccatttaaaatggactgggccacctaatcttgcttctcttccaagatggacacacaagtgcaccatgatatcaaaaaagctaggcggaaagaatctctcaaacatacacagagtttcaacaatttcagtttccaaaactgtaatctgctccatatcaataaccctttgacataatttattgaagaaagcgcttaaacgtataatggcaatccttggacccttaggcagtagacctctaaccgctacttgaagtagttgttgcatgagcacatgataatcatgtgatttgagacccatcactttacactctgccaatgaaatgcaagttgatatgttagagcagtagccatccggcccgtttaaagtcataaagccgcttgcagaagactttcttctcttgctttgacaaagaccaaggagccggcggaaggtata

SEQ ID NO: 12610 - DNA, 635 bp, Arabidopsis thaliana
taactggctatttggtcttaccaacctcagaaagctattcctcagatgggattttctccagggttcgattcctacggggttcaagaacttgaagcttctagagacacttgatctgtcgaataatctggcactacaaggcgagattccatcggttcttggagaccttcctcaactgaagtttcttgacctttctgcaaacgaactcaacggtcaaatccatgggtttctagacgccttctccagaaacaaaggaaacagcttggtctttctcgatctcagttccaacaagttagctgggacattgcccgagtcacttggatcgttgaggaatctgcagactctggatctttcatcgaattccttcacgggttcggtcccttcctcgataggaaacatggcgtcactgaagaaacttgatctttctaacaatgccatgaacgggacaattgcggaaagcttggggcagcttgcagagcttgtggatctgaacttgatggcgaatacatggggaggcgttctgcaaaagtcacatttcgtgaatctcagaagcttgaaaagcatccgtctaacaactgaaccatacagatctcttgtcttcaagttaccatctacttggattcctcctttcagactgg

SEQ ID NO: 12611 - DNA, 557 bp, Arabidopsis thaliana columbia
ggatcccgagacttcaaatgtcaacactgtttcgatcaaaaaggaatcaggaagctaacctgggttttggaagacgaaccaagtaaagcgttggtgagagctccgagaggattagaagaagaagacgaaccaggaacggcacaagcggctccgccgttaacaaggtctctcatcgccatgtttccaacgggtttctactcctccgccgcaatcaccgtcgttgaatctatcagtatggtttcctccgttgtccggaattgatcatcaacctcccaaatcctaatctttagtttggctcgtctcgtggcggtgttttttttgtttgttgtgtttggtcacagcttcgtaagaaattattaaattttttgatagtattttggtaattaatatttatatattatccacaccacacacatttttaggctcaccaacacatttttgtgtagttatttatttttgtgaaaaaaccgttttttacagtatccgtaattaaaaatgaattgttgtgaatatagtttatttttatctttctttatcaagatatgttttatcttttt

SEQ ID NO: 12612 - DNA, 520 bp, Arabidopsis thaliana columbia
  unsure (1)..(520): unsure at all n locations
cttgccgaccggtgaagccgtctcatcttactcgtcgctcgaacaaatcctaaggagcctcgggtgggaaagatacttcagtggagactccgatctcatccagtaccacaaacgctcctccatcgacctcatctccttaccaagagacttctccaagttcaactccgtttacatgtacgacatcgttgtcaagaaccctaattccttccacgtccgcgatttcaattgaaatccacacggaattaattaccctcgaccaagaggtctagtttgtgtttcttttgttcaaccgggaaattatattccagacataaaacctataatttcaaaattggagcagtgtgaatatgaatcacgtaaaggtagaagagaagatgtgtgcagctgtttgaattcgagaaaggaagcgatgactattggattatcatcacttagttagattgtgtttatttgttgatatgtgtgttttaaatttttaactgtttgtttggttttactggttnccaagtttgtagcatgt

SEQ ID NO: 12613 - DNA, 533 bp, Arabidopsis thaliana columbia
tgacataggatatcactgaaaagaacagcttcctggggtatgcattccatgcgatgcagctgctcttcgaagaaaaactgcatttcgtttgaagtgattaccccatttccatccaagtctacgcatttgaacctgcacggaaaatttcaatcagtgtcaagtaaaatacacggacttgcaaaaatattgagttttgacatccataatagatagatgagcatactaggctataaactagtatcagattgttagattgttagtgcccgagtataaacaaggatcctatgttcatgaaaaaatggtaccatacaatgattactaaatatatctgaggaagaggacttgttacaagtaacaagtgctcaagtcactggttttgactccgttgtagtatatatatcaagatcttgtgatctaaaccaaggggcaacattcattaaggaaaaccaatatcaacacggagggggagatgtgtccaatactcaagactaggctcggaagacttgtctcctcagcgagaatgaagtcacaaa

SEQ ID NO: 12614 - DNA, 690 bp, Arabidopsis thaliana
caggttgtcattggaatggatgttgccgcttcagagttctactcagaagacaagacctacgacttgaacttcaaagaagaggtgaaatttctttttccttagtaacagcttgtcaggatagagtgtgagaaacctgttcttaacttgtagctgttgcgctctttgtttctctgcagaacaacaatggctctcagaagatttctggtgatgctctaaaggacctgtacaagtcctttgtcgctgagtacccaatcgtgtccattgaggacccatttgaccaagatgactgggagcactatgctaagatgaccactgagtgtggaaccgaggttcagattgtcggtgatgatttgttggtcactaaccccaaggtttgtttttatttgccagtgttcttaccagtttttttttgttgtctgccctctcttaaaatgctcacatctctcttatactcttttcttattccagagagttgctaaggcaatcgcagagaagtcttgcaatgctcttcttttgaaggttaaccaaatcggatctgtaaccgagagtatcgaggcagttaagatgtcgaagaaagcaggttggggagtgatgaccagccacagaagtggtgaaccgaggacacattcattgctgacttagccgttggcttgccactgtaagttgaaccattgcaagcatttaactagc

SEQ ID NO: 12615 - DNA, 613 bp, Arabidopsis thaliana columbia
agctgatgaactgtcatattgtggtagctttgtagaatgtaacacatagggaaatatctttgtgccgtcaaattgaagagttttgataactaaatcttatttttttagattggtcctctgagatgttggcctggtggtctgtgtctctcaagatccattggagatctggatgttggcgaatacattgttccagttccttatgtaaagcaagtcaaggttcaaaactcataactaaatctaatctaaattgatctttatgcgcttatagcacaagctgacattctaattattgagttttatactgaaaactgtatctatttattttggttatgtagttgtcttcagatggtggtcgactgatcatctcaagtgatggtgtgtgggatgcaatatctgcagaagaggctcttgattgttgccgggggttgccactgaatcttctgcggacgatatcgttaaagtatagtatctgaattactttattttagatatattctctacatattctttcttgcctttatagtacattgatattttattagccatacaggaagctgtgggtaaaaaggtatcgtgatgatctaccatgtatgttgtgataattgcactagaa

SEQ ID NO: 12616 - DNA, 529 bp, Arabidopsis thaliana columbia
ccagtgtgctctaaaggatctcggcgctaaaccgcaagtgcgcgtgttgctgcttgatgtcgtgattggcttcggtgcgaccgccgatcctgccgcctcgctggtgagcgcctggcaaaaagcctgtgccgcgcgtttagataatcaaccactgtatgccattgccacggtgacaggcactgaacgtgacccgcaatgccgctcgcagcaaatcgccacgctggaagatgcggggattgcggtcgtgagttcgctaccggaagccaccttgctggcggcacggttaattcatccgctctcgcctgccgcacagcaacacacaccgtcattactggaaaacgtcgccgtgattaacatcggattacgcagctttgcgctggagctacaaagcgccacgataaccggttgtgcattaccaatggtcgccagtcgccggtggcaataaaaaactggctcgtttattagaacgtttgcaataaggggttccatgtttaatcagtggcgaacgaatgctgcggttacgaacaaa

SEQ ID NO: 12617 - DNA, 584 bp, Arabidopsis thaliana
tgactgatgaagagtttcgccagtactttgaagtttatggccctgtgactgatgttgcaatcatgtatgaccaggctaccaaccgtcctcgtgggtttggatttgtttccttcgactctgaagatgcggtagacagtgttttgcacaagactttccatgatttgagcggtaaacaagttgaagtaaagcgtgctcttcctaaagatgccaatcctggaggtggtggacgatcaatgggtggtggtggctctggtggttaccagggttatggtggcaatgaaagcagttatgatggacgtatggattccaataggtttttgcagcatcaaagtgttggaaatggtttaccatcttatggttcttctggttatggcgctggctatggaaatggtagtaatggtgccgggtatggtgcctatggaggttacactggttctgctggaggttatggcgctggtgctactgctggatatggagcaacgaacattccaggtgctggctatggaagtagtactggagttgctcgagaaactcatgggacactccagcttctagtggttatgggaaccaggctatgggagtgg

SEQ ID NO: 12618 - DNA, 1201 bp, Arabidopsis thaliana
  unsure (1)..(1201): unsure at all n locations
ggttccaaaagaacaagatatatttggaatcccattgtgtttcgggaaagttagcacaattaacttactctttggttcaaacatacggaaggatttagatttaaagaatgaaaaacaagattatggtaagagttttccaacatctcttattttattgttattccatctcaggaaaccaaatatgttcatacaatacaaaaagaatttttgcctcttttgtctgaatataaatctcaattggattatgcaagctgtttggcttcgatatccttgagtctgagagtaacggctctcttgtgtgcatctaaaccttcgatttcagccatagttgctacataagggccgaggtttctcagaccttcctctgtcaaagattgtacagtcatgaactttaggaaagagtcgagagagacgccactgtacattcttgcatatccatatgttggaagaacgtggtttgtcccgctcgcataatccccaacactctctggagccatggtcctatgaaaaccgagcctgcgttctcaatcagtccctcccatttctcagcgtctttgacattgatgatcaaatgttcgggtgcatatagatttgagaaagatattgcctggagaattaaagaacaaacagtgatgatgttacagatgttgttttgagatagtaacagtaaaggtgaaccgtaaagagatgggtacctcaatcatatctcgagcaaacactgtgaaactgtgacttagtgcttttgaagcaaactctcctctaggaaggcttttgcactgcttggcaatttcttcttcgatggcgttgagatctacactatcgcccacaactacaagaacaacttgactatctggaccatgctccgcctgcagagaaaccaaaaaaagaaatgtacaagttagccgctctctgtaggtctgaattaaacaaataaggcagacacaaactcatcccgatatgttatgttgaaaattgcaactttttcatggaaatacctgagaaagtaagtctgctgcaatgtaaactggactagcatgttcgtcagcaataactaggacttctgaaggaccagcaggcatatcgattgagaccattgcctcgctgttctgcagtaagggaaaaagcaggttaaagagtagtctagagactccaaacanagttaggacaaaagtaattgatgaacgatatctatacttgaaga

SEQ ID NO: 12619 - DNA, 553 bp, Arabidopsis thaliana columbia
gttgatcttgtgtttctatagttgaatcttaatcttctttgttgttgttacaggaaatcgaagaaagatttcagtactgctattctcgagaggaagaagtctccgaaccgtctcgtcgtcgatgaggctatcaacgatgataactccgtcgtctctcttcaccctgcaaccatggagaagcttcagctcttccgtggtgataccattctcatcaaggtttgggtttgcttttgtttgtttggattctcttttgattgagatattgaatggttggtttctgtctctatgaagagacataatttagggttttttctccttgcttgattaatggattcttatgtggttctacataaactagggtttgtggtcttttgaaacaagtgatttatgatcttaggtattatacaaaataaaaagacttgcttttgtactgatcctgtcttggtgaatgattcgtattagtagtcttaatgagttcttatttggtttggattttggctttcagggtaagaagaggaaggacactgtctgcattgctcttgctgatgagaca

SEQ ID NO: 12620 - DNA, 527 bp, Arabidopsis thaliana columbia
gtgcagaaggttgtaagaacaacatagaccatccaagatcaaagcctctcaaagactttagaacgcttcaaacgcattacaagcggaacacgagagcaaaaccttttcgttgccggaagaaatgtgaaaaaacgtttgcggtgagaggcgattggagaacgcatgagataaattgtgggaagttgtggttttgcgtgtgcgggtcagattttaagcataagaggtcacttaaggatcacgttagggctttcggtgatggtcatgcggctcacactgtaagtgatcgggttgtaggcattggggacgcagatgaagatgatgaggaggaggaagaataggaagaagatgatgtagaagaagaagatgctcatgaagaaaatgttcgtggagagaagaacttatgggattagatatgatcactttcgtcgttatggtcagattgctgatgacaattactacataaatgggacatttttatgatcgatgggtactattagggttatctaagtgaggtatgtttgatatgt

SEQ ID NO: 12621 - DNA, 506 bp, Arabidopsis thaliana columbia
gctcaaagctcattagacgcgatggaagcgggctactcggtcggtacgcgtaccattgttgatgtgttggatgcgaccaccacgttgtacaacgccaagcaagagctggcgaatgcgcgttataactacctgattaatcagctgaatattaagtcagctctgggtacgttgaacgagcaggatctgctggcactgaacaatgcgctgagcaaaccggtttccactaatccggaaaacgttgcaccgcaaacgccggaacagaatgctattgctgatggttatgcgcctgatagcccggcaccagtcgttcagcaaacatccgcacgcactaccaccagtaacggtcataaccctttccgtaactgatgacgacgacggggcttcggcccgcgtcgaacgtaaggcaacgtaaagatacgggttatctgccgcattctcccccttctcgcttcaatttcgaccagccatcctctattctgatgggtatatacactggtccggaagac

SEQ ID NO: 12622 - DNA, 592 bp, Arabidopsis thaliana columbia
atcttggactttagatgttcaaactgatgtgagaacaaatgtttagcaaaatatcagctatttgatcatccgtgggaacatgaagcagtttaagctcaccatcatccaacttgtcacgcacggtatggcagtcaatctcaatatatttcgtgctctcatggaagatataattgattgcaatatagataacatctgtactgtctgaaaacaagataagaatcgaagtagtatccgtttaagatacgagcaatgtatgcaaccaaaccaactcacaagtagcaagagctaatgctcagtatctagaaataacatgttgcttcttagatcgacatgagatgatttatgaagaaatttgagctttgatggctctaataccatattacgatcgagagataagaaagtttgttacagatgaagaagaagatattttctgattaaatttccgtaaatgtattttgtacaagtatatatacaatgactattcaaccgattaacatcaccgtaatacaaaatcatctagaccgataaaactaacctaacacattctgataataacaaatatgaatttattgattttcttttaattaagaat

SEQ ID NO: 12623 - DNA, 600 bp, Arabidopsis thaliana columbia
gggtacgagctagaatttgtaatacatcaagttgtgaagctgctcctattgattgttcatacacctagaagaaaacaaaacataacaattatactatgtaagagaaaacagaacataaaacagaataaaaacagagtaaaaacagagcaacacagagtaaaaccaaagtgaaaacagagtaaaaacagagtgtttatagtttacctctcgttcgttgcacattgggatctgaataaggaccattgggaaactggaggggtcttctaaatcgatagattcttcggtgagcttaggttcgatctttttaaatttgatccaaaagcaaccgagacagaggactaaccgatcaagagactgaatcaaaaagagtacagtgcagaatctggagagactgatgacaagaggagcgatgtaatcggatcgaaacgagagccaagccatgtacgaccattcgacaagcccgtaaacctcccaagacggtcggttaatgagatcaagattccatttcttgaaatgtgcaacgatttctatggacaaggcaataatggagactgcaagacaagctttgatgaatctgtacatttgtttcctctgctttta

SEQ ID NO: 12624 - DNA, 554 bp, Arabidopsis thaliana columbia
cgtaccgatatcctcgtttcctccaaaatcgaggagatgatagattttggaggctatcaagaaacaagcgtggcctatcgattttggaggaaacgaggctatcaagcggaatttttgtttcttgttcccctgcatgtttctggtgcgaaaaagatggagtacttctatcggttggttttaattttccttcacttctaagtagttcgtctcttcctcttttaagaagtcgaagatcacttctttcctgccagttattaatatttagttttctaatatcctagagtatatgttacaaaaccaaattcatttgtattattgagaatgactaactgtttcattcgctccctcttgttcattcactcccatcgtttcattcgctccctcctcttcattcgcttccttgtgattttcatccaaggactccagctgttaaatcaagtaaagtgagaccaaattcatttgtattagaaaaaaaaaaaaaagacgattcacatttgcatcagccgatttactggttttctcggcaaagtctcgacactcagtgacatgtgaat

SEQ ID NO: 12625 - DNA, 593 bp, Arabidopsis thaliana columbia
  unsure (1)..(593): unsure at all n locations
gagacatgactgttggacatttcatccatatgctaagcaaaaggatgcagttagatccatccaaagctctctttgttttcgtacacaacactcttcctcaaaccggtaagataagaagtatcatcatccatgtagagtgagactttacctgcagttttccaaagctttccattaacacttgtcttgaattatgcagctagtcgcatggactctctctacaatactttcaaggaagaagacgggttcttgtacatgtgctacagcaccgagaaaactttcggctaacaaaagatttgtcgcttcatatcgaaatcgaagcgcactctgaataatccatttgtttgattcctatgtttgtgaataacgtcagctcttgttgttactgttattgttgttgttagctgacattgtacagaaaagctaaaaaaaagaaagacatttgactttgtaaattatgtataatccactatggcaataataataagaccaagtgatgatgatcacacgaaactctttttgcgttttgttctccctataaaaaaagaanagaatatagatacttctgtggaagcacgtaagtttggggagatgtg

SEQ ID NO: 12626 - DNA, 1006 bp, Arabidopsis thaliana
cctcactcactgctctactcagacagagagtgagagatccaatgcgaatcatctttttggtactaaaactatcactgatttaatttgattcagctgtttattgtaagaaatttacaacccatggacaaactacagatataaaatagggaaaatccttcccactgatttctgtatattatttttttgtataaagagtatatcattattattagttacggcatatgaaatagaattacgcacactacgtactactatccatttggcagtagatttggaaaattacattccggtaatcgaaagtctatgatttaaatgtacgttgggggcatttatgtaaattcagataataaacagtaacgcttttggttagaaaatgggattggatgagattataaatgtagataacagtgtgacttaaccacataacaaactctttaatgtcaccacagagaatgaagctatcatcaccaccagttaccaacaacgaaccaaccgccaccgcttctgccgttaaatcttgcggcggaggaggtaaagaaaaccagctcatcgaccacgaggcatccagtgtaccacggagttcgcaaacgccgatggggaaaatgggtttctgagatcagagagccccggaaaaagtctcggatttggctcggatcttttccggtgccggagatggctgctaaggcctacgacgtggcagcgttttgtctaaaaggtagaaaagctcagctgaatttccctgaagaaatcgaggatctacctcgaccgtccacgtgtactcccagagatatccaagtcgcagcggccaaagcagccaacgccgtgaagatcatcaaaatgggagatgatgacgtggcaggaatagacgacggagatgatttctgggaaggcattgagctgcctgagcttatgatgagtggaggtgggtggtcgccggagccttttgttgccggagatgatgccacgtggcttgtcgacggagacttgtatcagtatcagttcatgg

SEQ ID NO: 12627 - DNA, 1229 bp, Arabidopsis thaliana
ctccaacaagtaactcaagatctctcttgtaccctcgcaaacaaacctcctttgattctaagtgtcatcgacaatagaatctcaggacgctccttccctggaacctcaaccacaaaccgctctaaaaccgcagcgactatcgatttcatttgaatataagccatatccttccctacacgacatccttggtccagcatgaaacgcaggaaacttagaaggatcctcacctctaaaacaaccatttgtttcatcaatccacctctcaggatcaaaacgatcacaatctttcccccaaatactctccatccttcccattgcaaatatgttataggttattgcccaacctttacctacaaatgtcccatcaggcaatacattgtcctcagcacaactctttatgtccactggcacaggtggatacaatcttaaagattcagttatagcagcgtgaagataattcatcatcttaagatgttcaaacccgtaaacttccccgattcgcttcccagttcgtgcgcgaatcgagtttagctcttgcagaatcttatcttccacctctggatgcatagagagtaaccaaaagaaccagctcaaagcagaggaagtcgtgtctcgtcccgcgaggatgaaacttatgacaatgtcacggagtatctccggcgaattcatctcctccttgctgataaaccgagaaagcaaatcttccttgtggtcacttgatcttccttgatcaatcctgttacgcacgatctcgtctgcgaatttatggacggtcgcgattgattctctcagaactctctctgatccaatgttaagtttctttttaatcctccatgcacacgaagccaccgaccgaaaccgctgcgatataatcgtcgcagcggtttcgaaggcccgcatgaagtttacaccgaccgctccgtcgtggccgagacaagcgcaatcaacattgaaagctaatttacagatgttatcgaacgcgaatcgctccaatatgtcttggagatctatcaactttccggtggttgcagcttctactaacaccggaacaagcctggtgttgatttcgacggtgacgttgctcataacaaagtcacggagagatttagtactaaattcgtagctcgccgtcttcctctgtttccaccacatatcaccatcggaattaaaaatcccgtggccgagaaaatcctcaagaaccgaagtaaactgttggcctttagggaagc

SEQ ID NO: 12628 - DNA, 1428 bp, Arabidopsis thaliana
tatttacttaataagtgaccatcatgctcaaaacaaagaaaaatgggtgatctcatattccataaaagaaccactaggactgttcctctagttgtaggataatggatatgtctccaaagccaatctatggaaatggaaggacatcacatcaaattctgcaatgttatccattactattgaaaatcttgaaagaattatcaattttcttacctcagtgtgactatggtttcataatcattgtaccactaacatatggaaattagtacatacagtacctaacactcataagaggtactgtccgtggtagtgtggtaccaatatattcatcacaatgggtttcgcacttaggaagaaaatgaagtttgctttcttcttaaagtttttgttttttttggggacaattagtggtatcatgtcatgtactataaagtttgcttccatcatcttttatccacacgccaattttgatgtccccactaaagattctctaagaattttgaacatgcactcactaaacctaaagaatctttcatatccgttgaggttacctcttttaccatcttcttcttgctctgtttttaacctttttacaacaggtacataacaggacttgacaaaggaaaagcaatgtacctaaatttcgtaaaggctgaaacatcaactccttgtggtttaccaatcagagctgtcctcactagttactacaaaagcaagcatttccagtgcagaccttatgatccattcaacgacttaaccagtcctatccaaaccatcctttgtgaagacagcaaccaaagcatgtactgtcagttactagccggtctgattcaccgtcacaaggtgatgcgtttaggagcagtctttgcttcagcgtttctccgtgcaatctcttatctcgagaagaaatggagtcagctctgtgaagacatccgcaccggtagtctcaaccccatgatcaccgatccaggttgcaaatggcaatgtcttgtcttttaatgtcgccgaatccagagttagctagcgagatcgaagagatctgtgggcggtcgtcgtggaaagggattctgtgtcagctctggcctaaggcaaagttcatcgaagcagtagtgacgggctcaatggctcaatacatacctgcacttgagttttttagccaggggaagattccattggtttgtccaatgtatgcttcctctgagacttactttggagtcaacgtggaaccactctccaaaccatctgacgtcgttttcactctcttgcctaacatgtgctacttcgagtttatccctctcggcaaaaacgggacactctcttttgatctagacgacgatgaacaagtcccctgtgataaagtcgttgacttggtcaatgtcaaactcggccgctactatgaactggtcgtcacaactttcgcaggtatttaaa

SEQ ID NO: 12629 - DNA, 974 bp, Arabidopsis thaliana
taacaagacactggattcaactcttctagagaacagcaggaaccaagtgagattcagacagtttgatatggttaatgactgctcggaccatcatttcctttcttcggataaagggttggctcagtcccaggtatgactcttgggaccaatacttaacattctttttgataaaccgatacttaagccaagtaatccttttgcatttttatctcttataggtcacaaagagttgggtgaagaaagtccagcaagaatggagcaatttggaggcaaatcttccgagttagttctgactctttctgcatatatattctctgttgatttcctagccatgccgcgtttttttttttcgctttggccaaatgatagttttcaattattgtatgttctgatgttgtgtttggttataaaatcactgattttgaatttttgtgatgaacagacacgatatatgtgcgtgtgtgtgaagaaaggatggaccttctgcgtgcagccctggttggtgcccctggaacgccatatcacgatgggcttttctttttcgacataatgcttccacctcaatatcctcatgagccaccagtgagtttcacttctttaacttctctatcactcactctcgcttttaaatatgtgtttcttggggactagtcagtcggacttctgtttcttgtaaattcttagcaatatcatggggtctaaaaatgtaactgttgttgtttaaaagtgttttgtggactaaaacaagtgacattgataattttttctccttctatggatacagatggtacattatcattcaggtgggatgcgactgaatccgaacctgtatgagtcaggaagagtttgcttgagtctgctgaatacatggagtggctctggcactgaagtatggaacgcagggagctcctccatccttcaacttcttctttcgtttcaggctctggttctgaatgagaagccttacttcaatg

SEQ ID NO: 12630 - DNA, 1105 bp, Arabidopsis thaliana
gactctacccttcataaaatttagaatcataaaaatcatttagtgagctgaaaactgttcttctgaaaggacaacaaaatagattagttctttgattctttccgtcttccaaccatttgaacgtttttttatttatttcaatgttgtgttaattaccaaaaaatggcacttgttaaatatttttgtagtacttaatttctctttgagtttacacgaatgagattttagagatgagttcaaaatagctgtgttaagcaagttgattctccaagtggtatggctctctgtttaggttaggcaaattttcatagctcagctattgattaccaagagtcttgactccgttatgctctaggaggatagagcccaagtgagactaatttatgtttttgaagatcccagaccaagatttgttcgagctttagtcaagaagaaagctcacacttctcacgaatgcacacacaaatgaaactaaacttgaaatgcgatgtgaccctgcgtgcacgacttcagttcaaccattgttggtcacaccaagaatgtattttgataatccacgaaaacgtgtttgtttacagtaagatatggtcattgtcgctagaagatatgagaagagcaaacaaaggttgcttctacaacaagtaactcaagatctttcttgtactctcacattcaaacctcctctgattctaagtgtcaccgacattagaatctcaggacgctccttcttccctggaacctcaaccacaaacctctctaaaaccgcagcgactatcgatttcatctgaatataagccatctccttccctaaacacatccttggtcccgcatgaaacgcaggaaacttaaaaggattctcacctctaaacaaccatttgtttcatcaatccacctctcaggatcaaacctttcgcaatctttcccccaaatactctccatcctccccatcgcatacgcattatagcttatcctccaagatttccctataaatgtcccatcaagcaacacattgtcctcaacacaactcattgtatcaactggcacatgtggatacaatcttaaagattcagttatcgctgcatgaagataattcatcagtttaaga

SEQ ID NO: 12631 - DNA, 455 bp, Arabidopsis thaliana columbia
cactttctcttgcttgtccttaaccaaagctgcagcccatttacctaaaaacacaaagcccaacttttccttacaaaggctcaaactccaacaagaagatccaatagctagtgcctagtggcccacttgaaggttaaaattagcccagttttggagctaggtgtcgtattgctaggttttctctacgtcgtttgttcattggtttttctagggcttactactttttaacagatcgttccttcttcgtgaattcatctttcaggacagcttatctcatccaggagacgatgttgagattatcttcaaagtcagtggcacaggttcgctggcgtcccgtacaatgggcatcaatgtttgctagtccagacctgaggaagttgttccagaccaggtcctccgctaagccgagtctcttattcgccatcgcagactacgggattgaagaagattacagt

SEQ ID NO: 12632 - DNA, 558 bp, Arabidopsis thaliana columbia
taatttcgatccaagaaacctggtttacctcataaatatcagaaccgacaatgatcgaatcctctacaatcacttcatcagcgattcttgttctcattccaaccaccgatcctctgatgacacatttctgcacatacaagaagatgacgaaattcttcaagcttttgattaacaacggctgctagggtttcaaggatttgaaagagagttttgcaaattacatctagaatgcacccgtctccgataatactgttggttattacagctacactcatggagcttggaggcaaacaccgaggcattgtgtacagaggacattgtctgtcgtagaatctgtaactacaagaaaagaaacgttaacttgaatcacaagttattttatttcgaaccatttatctctcacaagagtttacattacttgagatccaatctacacctcttaatactctccatgttagctctatagtaagctccaatgctcctcacatcttcccaatatccatcaaacatatgagctttccctgaaaaacagagtttcagacaaatctatagcctatg

SEQ ID NO: 12633 - DNA, 1254 bp, Arabidopsis thaliana
cccatcattatcaacagcaacgtgactcaccagcggtttagcagcgtctcggcctcgaccatgagcagcggtccggccagcggagaaggttctccttgcgtaatgtcgccttgggcccgcgtgtcgcctccttggggtgcagatttcaacgaagacaatgtcctcgagaccaacggtctcattggatctattgttagaaaagaagggcatatatactcgctagccgcttctggtgaccttctctacacgggctcggattcgaagaacattagggtttggaagaatttgaaggaacacgctgggtttaaatccagtagtgggctaatcaaggccattgtgatattcggagaccgaatctttaccggccatcaagacgggaagatccggatttggaaggtttcgaagagaaaaccaggaaaacataagcgggttggaacattgccaacatttaaatcaatggtcaagagctccgtcaaccctaagcatttcatggaggtacgccgcaacagaaactctgtgaagacgaagcataacgacgcagtgtctagtcttagcttggacgtggagcttggattgttgtactcgagttcttgggacacgacaatcaaagtgtggagaatcgcggattcaaaatgtttggaatcgatacatgcacacgatgacgcgataaactctgtaatgtccggttttgatgacttggtgttcacgggatccgcagatggtactgttaaagtgtggaaacgtgagttgcaaggcaaaggaacaaaacatacgttagctcaagttttgctcaagcaagaaaatgcggtcacggcgttggccgtaaaatcacaatcttccatcgtatattgcggttcttcggacgggctagtgaactattgggagcgttcaaagcggtcattcacaggcggaatactcaaaggccacaaatccgcagtgctttgtctaggtatagcggggaacttgctgttgagtggttccgccgacaagaacatatgcgtatggaggcgggacccgtctgacaagtcccatcagtgtctctctgttttgacgggacacatggggccggtcaagtgcctagccgtggaggaggaacgggcttgtcatcagggagcaaaagcctcagtggccgagggagaccggaagtggattatatacagcggaagtttggacaagtcggtgaaagtgtggcgcgtgtcggagagaatggccacgtggaaggagatggacgagccagcagcatcttcagagcgg

SEQ ID NO: 12634 - DNA, 498 bp, Arabidopsis thaliana columbia
  unsure (1)..(498): unsure at all n locations
gatcccgatcccccgttcttatcgatcagttttgctagcttagatgatgggattggcgatgccncatgtcgccttccattcctttctctccataaggtgtgaatagacagctgaaaaacatacctcaagacaaacatatggacttttggtcttggtggatccgtgagtagggcagtcattgattcccagcttgttgtaaagagttgaccaagcaaatcttttgtaagggctgaccacactgctgatgaatatggacaagagaagaaaatgtgctctctagtttccatagcctcatcgcagaaagaacaacccccattagcatcattattccactttactaatttttctcccgtagctaggcgattacgaaatgctatccatgttatgaatgagtacttgggagtggagttggggaacatactcccttgtacaattcacagataggattaggaactcgtattgcatgtaaaatatcttttgaactgaaagagtgtttaa

SEQ ID NO: 12635 - DNA, 550 bp, Arabidopsis thaliana
gatcagcaaatgccttgcatatcacagaaagaaacacccacaggaagctaacaacatcaaaattgggacgctcgatatgaaaggataaatctactacaatatgtcaaatatcatcatcagtacctgagcctctatcttgtttggaatggtctcaaatgctattaaatcagcaccagattccgccagaacttggagtcgtctgcggtgaaaatccttcagcttttccagcgtgatcgaatcaccatagattccactgatataataaccaccaacagttaaaagataattttaaggagatagtgcaaaaatacacgaaatccacaaaaatcaaaatctgaatagggcaagtggtaagagctttagaaacttgttccaacccaaactcatatcatctacatagataagagaaaaatgaagcaataacctgtattcagacccatcagccaagtatgcaccgtagctaccaactgatgctgcaactaatatagggcgctttttgagaatcttatcatccatggaagagcgtagtccgcatttgtcataatacgag

SEQ ID NO: 12636 - DNA, 500 bp, Arabidopsis thaliana columbia
ggttcacaaggatgccgcaagacgaaatgttcaatcgccaaagcgttgaggactatgccacctacgttgagtgaagcctgccagtacattacaaagggcatcattaggtttaaaatgtttctacaattaacatttagagttctttcttgggattttgatcaaacaagttaccttgttcatcaaggtaagtagtctattgtgtgacgatggtaacccatactcaagaaatgcctatcattggaacataaaatttgattttaagttcaagttttgtgtgttatgttataagaaaatttcagtaacttcttttgtaaatgtggccgtacatgcatgatacatgcgttgtagatattgatccagaaggctagtttttgcttgtaggtcaaaaaactcaaatcctgactcgataaattctccatcataacgtctggcacacacataatacgtcaataaaacaatttcatcaggaattatactatttgatgagatcattttgtatg

SEQ ID NO: 12637 - DNA, 559 bp, Arabidopsis thaliana columbia
tgtgtggttaattgaattgtatagggacatggatgaccgggagtgcacacataataacggccgtgatagggtcgggagtgttgtctttggcgtgggcaatcgcacaacttggatgggtggcaggacccgccgtactaatggctttttctttcataacatattttacatcaaccatgcttgccgattgttaccgttcccctgaccctgttaccggcaaacgcaactacacctacatggaagttgtccgatcctatctaggtcagattcgctatctatcttcttcttcttttttgttggtcaatcactctgaagaacctttatgacaagtagtattaagtttcatgaacttctagtttaaactcgctctaaaaatactaaaagattacatttcaatatatattcctgtgttatatatacacatgctgttttgtagtaaatattatgtgaagttggtcttaaaattgacatgatgtaaatatcacgtcagtttttatagctgattcaaattaaacatcagttataacaagcgatgcaaatattatgtgaagttgcatcagtt

SEQ ID NO: 12638 - DNA, 350 bp, Arabidopsis thaliana
tgggtgtatctttctgtgatatgcaaggcatttgctgatctattagaagagggagatgtgaagattcctgggtggttttcattcaactcaaaggatggcgtaaacgtggttagcggggattccatcaaggagtgtatctccatagctgaaaattgtgagaaaagtagtggcggttggaatcaactgtacacctccaagattcatagaggggctagttttggagatagaaaaggtgcggcttggatccacactcattaggtatttgtaatttgtagagaccctaaaaggtatatgaataacttgtaggtgacaagcaagcccatactagtgtacccaaacagcggagaaag

SEQ ID NO: 12639 - DNA, 441 bp, Arabidopsis thaliana columbia
ttgttgcatcagaaattcacaacatctatcagcgtgacttaaactacttgagcacacacatcaatgaatcaaactgcttgtgaccatggcggcttcgcttatacaacgtttattctacaattcaacagatcagccacttaacttcagtaaattcacctaagatgacataatctttcccaatcttcctatgtacttcacaaaactcaatgagcatggcgattctagacttaactcagctaagtagtactcaaattctatcgggaaggtcacatagagattaatatcaaagaaattcaaacatacctcctcctccttggccgcatacttgtgtggcacattatcggtttcctttgattccgtcactctcccgggacgatctccaccgtctgatcgagctccttcaaaacctctgtcgttgttctcatctcctttaacccggtt

SEQ ID NO: 12640 - DNA, 527 bp, Arabidopsis thaliana columbia
tgcttgaattcatggcggtttgtaagcgagccattagggttcactttagattaatcggagaagaagatcaggaattccatactcagcttgtcaatggatttcagtctctcaccgcagaactctcccattacatccctgctatcttatccgaactttagtgtatctttgtcagtttttgttacgagttttgtgcttttttcttccaccatttggcttggctatatgtttatcatttctgtaattcttagtttaatgacaacaagtgagaaaaaaattataaatgacaattggttgacttctaattcagaagcttatgttatattcgatcgaggacatgagctctctcagcttcaaacacaagccgctcaactatttaggatgcctgcgacatctcagaaggcaatcaagtaatcaacagtcacagtagaagcacaagctgaagaagatgaagaggaggttggtgagaccggtgctgatgctcgtgacattgaattggtcatgactcacgctgtagtttcgggtagcag

SEQ ID NO: 12641 - DNA, 392 bp, Arabidopsis thaliana columbia
taatcattaatagtagtttgattagtgtcagtaatgctctgttctccaaggtttatgcaagtatgaattcattcaaatcagtagctgctcccaattttccatgagagaatcataagcataacctgctcacaaagttccatgagagaatcataagatgctgtatagtttgtggaatcctagaccatttaattaatgacgtaatgtgttcttgttagggatggagttggtctgagagacaagaattcacttgttgtcactgcaagatttgtgtttggtgccttaggatgtgtgatgctaggagctttggtttacacttgcttcacttatggttctcgtttccacatggagcttctatacccgtgagtctaaatttcttctgcatttttggtgtt

SEQ ID NO: 12642 - DNA, 1007 bp, Arabidopsis thaliana
gatctcactaaaggagggtccatgtgggacacagcttgcgtttcctgtgccaattacaacaccaattgagaaaactggtcactctagactagatggaagtaatttatggcacacacgtaattcttctccgctaagtcgcttacacaatgacttgaatggtggagcagactcgccattcgaaagcaaaagtcgtaatgtgatggctcatcttgagacgccaggaaaatatcaggtggttccacgattttggcccaaggtttcatataaaaaccaagttctgcagaatcaatcaaaagagtatccttcttctcttatagatactacattggaatataactttgtatgtttacagaagcatatgaatcatgctttttttcatacctctgtgtccttttactcctgcttttagtttgtcgttctagcttttgatatgaataagtctatactaggttgtagaatagggtggatgtaaggctatcagataaatggttttagggataggttttactttggatacttctaagttaccagaaccttaacgatgtgtaagatctgaatccgttgtcactcctctctttgagaagatcctgagtgcaactgatactggaaagcggctggtcctgccaaagaaatatgcagaggtaaataactgtttgcttatgcaagtacatattctcgttttcttatttaaatggttaatcatgtgaatagaatttgggatgtggctctctgttgcttatagcaaatacttcactgcttttgtatgttgaatctagtagtcataatatctgaaaactttacagcgtctcaaattatatataagatgccaaatgaacaaggcatctgctatgtaacaggctttcttgccccaactttcccacaccaaaggtgtgcctctcacagtacaggacccaatgggtaaagagtggagatttcagtttcgcttttggcccagcagcaaaggcagaatatatgttctagagggagtaactccattcaggggatcc

SEQ ID NO: 12643 - DNA, 594 bp, Arabidopsis thaliana
ctgttagccaaagtactattgggaaaatactgcaaaaccaaaccttttttctcttgctctgccacaaatacagcttctcacgggtggcgaagtatgtgtgctggtttagaactgttaaaacctagcctaggcaaactgattggaaccgggaaaaacacctctgtttggcattctccttggctgtcactaaaaaaacgctatgtcccatgggacctgcaactgaagccaaccatacactcaaagtctcagacttaatcctcccaaattcctccgaatggaatattcccttaatgagagacattctaccacagtatgaagatgaaatcaagaagctaagacctagcagacacggtgtagctgatacttgggcttggttgcctaatacttctgacatttactctgcaaaatcagggtatcatgtagctatctgaccaatctgaggacccggagcaattttcctcaagagtttcatttgatttcaattggagagagagcatttggtctcttaagagctcacctaagacaaaaatgctcctgtggaaacttgcctagaatgcacttccagtgggagatacctcatccatagggaagtgt

SEQ ID NO: 12644 - DNA, 2454 bp, Arabidopsis thaliana
ttgtctatcttaggaaaacactttgtttgtaactctattgtactctttgaattatgaaatctatgtaaacccttcttattgtgggggacaaaggctaattttaatggtctgtccacttctgcttgactttgatacataaattaggggtggctcatgtcatatctatgagaattaggtacaaaagagttttcaaatgagcaagttgtatttttattcgattagccgtcgtattatgtcaaatataagttaaaaatatgtaaaagtacaaaatgtagattatgatattagggatgaattgagataaaattacctataatttattactacgcataataaataatttgttacgttaattctcatagatacgttatagccaataccgaacccctatttaagtcaaaagtacttctaagtattttttagcgtaaatcaatttttatgaaaagcaacaattaagattaatgtagtaatctagtaatcgttaaaaaagccactttgttagtattgcttaatactctctctctctctctgttcccaaggagatgaaaagcttcaatctcaaaacatagcagctctctcaataaaccaaacccaaatgcaagctgtgtagagagaaacggagtgaggaaggaaggagatgggaggggtgacgtcatcggtggcggcgaagtttgccttcttcccgccgagtccaccgtcttacaaggtggtgaccgacgagctcaccggactgttgcttctcagccctttcccccaccgcgaaaacgtagaaatcgtaaagcttcggaccaggagaggcacagagatcgtgggcatgtacgtgaggcatccgatggctacctccacgctcctctactcccatggcaacgccgccgatctgggacagatgtatgagctcttcattgagcttagcatccatctcaaggttaatcttatggggtctgtttttctttctctccctttgtaattcgattgattttattattatgatgctgatttaaaaatgttatctttgtatgcttcttttgattgatttggtataggatttgccctgttttgattctcacgtttctagctctgtttctagtatttgctctgtttatgtttggagtgtttattcaccaccccaataaaaaaggaaacttgggctaggatctgcttggaatcaatcagtctttgatattattggttgtgatgttgcagatacgattactccgggtatggacaatctactggaaaggtttgtcctttaccccatcaatctgattggtctgatgatccattatgagttttaggaccaactctcaaaaatctttctttctcttaaatgattgattgtagccgagtgagcataacacgtatgctgatatcgaagctgtttataagtgtcttgaagaaacctttggctctaagcaggaaggtgtcatcctctacggccaatctgtaggcagcggacctacgttagatcttgcttcccggttgcctcaacttagagccgtcgtccttcacagccccattctctccggtttaagagttatgtattccgtcaagaaaacctactggttcgacatctacaaggtagaccacgtaccaattctttctattaatcctacacattctccaaattgtaatgtaagaagcttgttgtgtgtgagtgtgtgtttttccgcagaatatcgacaaaatcccatatgtcgattgcccggttctcatcattcatgtaagtcaggtttcagatagatacattttcgtttgaatttttgataagctttttggatccaaacagtttcaaatatgtgcagggaacttcggatgaggtagtggattgttctcatgggaaacaactatgggaactctgcaaagacaagtacgagccgctctgggtgaaaggagggaaccactgtgatcttgaacactaccctgaatacattagacacctcaagaagttcatagcaacagtagagagattaccatgtccgaggatgagcagcgaccaatcagagagagtgagagatgcgcccccgaggagaagtatggacaggagagtgaagccgaggcagagcacagagcgtagagagaaagagaagccaccaaagagtcagtcgaagatgagtagcagcagcagcaagctcaagatctcgtttgatcaacttgatcgctcgcggaggagcgttgactgccatgaaaagactcggaagagcgttgaccagattgagagggggaggaagagtgtggataggttggatagagttcgctccgagtaaaaaccacacactcacactcacacacgtataatacgtatgtagatgaaaagagtacataactgtttctatttaccgaacaaaataacatgtggatgtcgctcctcatattattgatttgtaatcttttatgcaatttgggatgctctcgccatctcgttttgaatcacaaccttttgtggtggcttgaata

SEQ ID NO: 12645 - DNA, 492 bp, Arabidopsis thaliana columbia
gatttgtggattgaccctctgaagttgttattgccaaggagtaagtctgatagtgatgaagatatattcccaaactcaatatttccattgagttggttatcactcaagtcaaaacaactcaaagaaggaatgttgaggagagatgaagggatagttccagtgaaagcgttggcgtctgcgtaaaataacaccaagttggagagcgagctcatattaggaggaagcgtgcctgtgaactggttgcgggagagtgataaatctgacaaatttgttagatttagtagtataaggagaaagtttccagtaaactcgttttcttcaacagctaagctaactaactggttaaaactaccaaaaaaagatgggatttcaccaaccaggttgttttgtgagagatcgagaattggtgagatgtgaaagattttcaaatgaggatgggatttcaccagcaaggtcgttttcacagagggtaagatcggtgagatgagaaag

SEQ ID NO: 12646 - DNA, 513 bp, Arabidopsis thaliana
aagttcagatattttctcctttgattcattcaccagcatctccaccacttcagacattgttggtctcttgtctggatctgtctgagcacacataagccccaccaagactactttcttcagtttctctgccacatgctcctcgctcagcctcttatcaacgatttcatcaaaatttctttcataaacaagtggtaaaacccactctgttatacaccgcgttgttgttggatttagcctctcgagtggtctcttgccactaaccagtaccatcaaaaggataccaaaactgtacacatcgctagtttctgattcttttcctgatgcatcacattctggtgagatatatccattattacttttggctttggtagctccatctccagtatcatcatctggcatcagcttaccataaccaaaatctgtaacgcgagcttcaaattcagagtctaacaacacattgctaactctcacatctccatggactatatgtggggttgcgtggtcgtgtaggta

SEQ ID NO: 12647 - DNA, 838 bp, Arabidopsis thaliana
  unsure (1)..(838): unsure at all n locations
ctatataatagaaaaacttttagctaacaattttcccttttcggtaagacaacttcggtaagacaaaattacccttttccgttacaacggtcatatatttttttacagcgtaacaattttcctatggcctatgtgcgtcatgagtcaaatagcttgaacaaaagcggacgagtttagctagactaaccgttagtgggataacatacgcattttttattcgtatattttagtgtttaccgtgaatattttaattanaacataaaaatattttttcccctaattctttaattttggttttcattttcaagtccgccaaaaaaagcgaagagagggttttaatacgattccactcttctcaacaaatttgacgtttttgttcttcgaaattcaaattcacccagaaaaaatctcaatccgcgatggttgaagaatcagcttctgcgtcggaagcttcggtgatacaaaccctaaccgagccggcgacggagattgcgcaaaccctagaacctaacctagcctcaatcgaagccaccgtcgaatcggttgttcagggaggcactgaatcgacttgtaacaacgacgctaataacaacaacgccgctgacagtgctgctactgaggtttgtgatgaggagcgtgagaagacgcttgagttcgctgaggaattgacggagaaaggctctgtgtttttgaaagagaacgatttcgctgaagccgtcgattgcttcagccgtgctctcgaaatcaggtatctttttgggagattcatttgagaatttgtagtcgagaacctctcaatcaagggtttagggtttcagatgtttctgaatctagttta

SEQ ID NO: 12648 - DNA, 624 bp, Arabidopsis thaliana
cagacatgggagatgtgtatagtttcggtgttcttttgctggagcttgtaactggtaagagacctacagagagggtaaacttaacaacaaagaggggtattaccgaatgggttttacctcttgtttacgaaagaaagtttggtgaaattgtggatcaaaggctgaatgggaagtatgttgaaagaagagctgaaaaggatagttttggttggtctcatgtgtgctcagagggagtcagagaagagaccaacaatgtctgaagttgtggagatgctaatgattgaatcaaaggagaaaatggctcagcttgaagctaatccactcttcaatggaaacaatgatggtgaagttatagatgaaagctcagagatcatttctgaagtgagagatcatcaataacaagaacaagaatgttattcaaattcacgcattcttgttttcttttgctagaatctggtttttggttgtgcttgtttttagaagagtgtttgtgcttgtttttagaatagcgaagttgggttttaaaagtttattgtgtattttttttcagcttaagattggattttgatcattgatatttgagcttgtaagagagtgtagtggtacatatttggtatttatgag

SEQ ID NO: 12649 - DNA, 1278 bp, Arabidopsis thaliana
gaaatgtcaggtgtggagttctggattgtcaacactgatatccaggctatgagaatgtctcctgttttgcctgataataggttacaaattggtaaggagttgactaggggtttaggtgctggaggaaatccagaaatcggtatgaatgctgctagagagagcaaagaagttattgaagaagctcttttatggctcagatatggtccttgtcacagtatgtcctcaaatctttattattactattgcatttgttcttcttagttataaactttgattgtagaaaaagaggtatgtgtcatttgtcaatcacttatcagctagttctggtctccatctgtccaaaagagtgaggtttatatgtctcttcatcattttataggctggaatgggcggtggaactggcactggtgcagcccctgtaattgcaggaattgccaaggcgatgggtatattgacagttggtattgccactacgcctttctcgtttgagggtcgaagaagaactgttcaggctcaagaagggcttgcatctctcagagacaatgttgacactctcatcgtcattccaaatgacaagttgcttacagctgtctctcagtctactccggtaacagaagcatttaatctagctgatgatatactccgtcagggggttcgtgggatatctgatatcattacggtatagcttttcttatgggcatcctgtgatcatttttttgtgtatggcaaatgatttaccagctacgtttgtccttgatttgtagattcctggtttggtgaatgtggattttgctgatgtgagagctataatggcaaatgcggggtcttcattgatgggaataggaactgcgacaggtaagtttggaatgatggataagctcatttagctgcatagtttcataagcagaaccattagtcactagatatgtgtcgaaatagtctaattgaactaatgagctagtagattggtgtggcaaagaaaccagtctagtgactgggatactgaaaatgaccatattatattcactgttactcaactattgtgcatctatgtcatgatgtaataatcaaagtcatgaaccttgaacttcttttgcgcaaggttttgttttgtttgcaacgtgctgattctttcatgctacttgtaatcattcaggaaagagtcgggcaagagatgctgcgctaaatgcaatccaatctcctttgttagatattgggattgagagagccctggaattgtttggaacatactggcggaagtgacttgacattgtttga

SEQ ID NO: 12650 - DNA, 516 bp, Arabidopsis thaliana
ttctttagttgtatcttgagatattttcttagtttttcaaactcctcggcagcatagagattacatgaaaatctttaatcaataactataactaattcagtaaatgtttcaaggcttagttggagggtgtatgattgtattctcatgtctgtatggtatatttctatccccataaaactctgcttgttctgagtgtggccgttgtgttcctttacttttccagctggccctccagcatatgcatctacagatggtgttacagctcctccaactgtgacttctatgtctgcccctaccacctcaaacagtgttgagatggacttgcttggttcccttgcagacgtattttcatcaaacgcattggccattgtaccagctgattctatctatgttgaaaccaatggacaagcaaacgctggtccagctccatcgttttctacatctcagccatcaactcaggtatatacactgagcttggagtatgaagattatgatggtttcctatgattattgatg

SEQ ID NO: 12651 - DNA, 476 bp, Arabidopsis thaliana columbia
tggagctgccttgtaactatatcagtgcaattgggatcgatctttctgaaaagtgcaggagaaagaaaagaaggcagcttgcagacttgtttcgtaatggatttgaattctgcaagaggaacgagaatggtaaaatgaactgccttatatattccttagaaggacaaaaatagaacaaaaacatcaccatctacatgtagtccatcaatatagttactaaaaacttgatcaaccatggatagacattgctcctttagttcttttgctggtggacgcccgtgttggtagtagaactgcagaaattataaacatatgaacagttgtgagcgaaacttattatcatgtcacagtgaaggaccatttttcgttcaaatcaagtttacctacaaattagtagcctcggtttaaattgtacctgcatctactaacgaaagctatctgtttcacgaccaatccagtgaacatagatactagac

SEQ ID NO: 12652 - DNA, 1035 bp, Arabidopsis thaliana
ttgtcgagcagtggaatcaaaaggatcaccaacggtccaatctttagccttctctactaacttctccacaaccttatcgtatataccttcttgaacaaacacacgagagctcgccacgcaaatttcaccctgttgatacatcaaattaagatgttttatatatcagtatcaccacattgttatacattgacagaaattggaatgaacattatggataccttgttgtaaaagcaaccgagaagcgcaagatcggcggctttgtcaatatcagcgtcgttgaatatgagaagtggcgatttcccgcctaattcaagggaaacttttttgagattacttgcggctgcggcttgcattatcatccttccaacatctgttgacccagtgaaactaacctgatcacaacacacacagaagattcaagtttcacatacaatcaacaacattagtcggcgcgactcataagaagatagatccttactttgtctacgtccatatgggaggcaatggcagctccagcagttgatccaaaaccagttacaatgttgagcacaccatcaggaattcccgcctgttttctcgcaataatgtttagattgttaggtttctatcgtttgattacgtatacgttttgctttattacatgttaaactagtgtgttgtccttttagacacaacctaaccttttagtgttttaagtaaagcaaaattcttaccgttttaattttgcggttaacaagtatagttatgaaaaagtttttaatctatatcaacttacttcttttgagagatgggcatagaacaaagcagagagtgaagtctgttcagctggcttgaccaccatggtgcaaccagcagccatagccggagccacctttgtggcaaacataatgcttgggaaattccaagggatgatattaccaaccactccaattggttctttgagggtgtaccgaacaaagattgacgcgtcattttaagagtctcgccgtggattttatctgctgcacccgcattgtatcgaaaatgaccggctgt

SEQ ID NO: 12653 - DNA, 1189 bp, Arabidopsis thaliana
tctccaagaaagacagcacggaatgggtttaagctacataacttacacagcattgcggttctcgggattattttcagaccctctttgatctaggtggagtccctggagcgaaaagggatccttggactggctgagccagaggatcaaacttttgggaggcgaggtaagaaagtgcagtgacgacgtcagcaatgagaggtctaagatttggctgctcttgtacgcacatcgctgctacagcgagtgcttggtataaccctcgcggagggtattgaccttgaagcattggatcagccatctgagagaatttcctcctgtctttaaacaaaggccttgcctgacatagagagcatttcaaagaatacaattagaaggaagaatccgcagagaaaacaaagtttgttcccaatttgtgtttttttcttacccatgcgactagattctgttctccagtagatcttgaactgtctattgctttccgaccagttataatctccaacagaacaacaccgaagctgtaaacgtctgatttgagtgttagctggcctgtcattgcatactcgggagcacagtatccgtatgttcccataacccgagtggacacatgagacttgtccccaactgggccaagtttagccaacccgaagtcggatagctttggaaagtaatcatcatcgagcaaaatatttgagcatttcaaatctcgatagatcactggaggcatggttttgtcatgcagatactccaaaccttttgcagcaccggcagctattttcattctggtgttccagtcaagtggctgcttaccaggtgaaatgtctgaaataaaaaaagcatcacccgattgaaatttaaagacttctcataggcatgtgtgatcttagaagcgcataccgtgcaaatgatcttcaagtgaacctaggggcatgtactcgtagactagaagcctttgatctccatcagcacaatatcctattaagttaacaagattcgggtgatgaagaagactcaacatgagaacctcgacgaggaactccctgtttccttgtaaaccattatgatcaagttgcttgatagccgctgtctacaaatgaagatataatgacagtgagctttcactaccaagaagattcaaaaggttaaaaccaagcaaaaaaaagggaaggaacatggctagtgctggccaagt

SEQ ID NO: 12654 - DNA, 991 bp, Arabidopsis thaliana
ttttagtcacctgaagaaaaaatatatggagaacggagaatctaaccaagaaaatctcaaatctctcaaccacgacgaatcgcttaagaagccatctgcttcctccgtcgttgtagataggttaaaacgtgatgaatggagcgaaggagctgtttcgactttactcgaagcttatgagtcaaaatgggttctcagaaacagagccaagcttaagggacaagactgggaagacgtggctaaacacgtgtcctcacgcgccactcacaccaagtcaccaaagactcagactcagtgcaagaacaagatcgagtccatgaagaaacggtaccgttctgagtccgctactgctgatggctcctcttggcctctttatcctcgtcttgatcatctcctacgtggaactcagcctcagcctcagcctcaagctgttctgcctctgaattgctctgttcctctgctcttacttgagccgccgttgcctgcggtggctcatccgccgcagatttcttacggatccaacggcgtcggcaagattcctaaggtctgatcacctaaactaaccaaatttgggagattttctaatgaagttatttgtgtgtaggaagacggattcaagccggagaacaaaccggaaaaagatgcggagatggatacagacagtagtacgcctgtggttaaaacgaaggtgagagggaagaaagtgaagagaagatataaagaagagaaggaagagatcgccggaagtatacggtggttagcggaggtggtgatgagatcagagagagcaagaatggagacgatgaaagagatagagagaatgagagctgaagctgaagctaagagaggagaattggatttgatacggacggagataatggcgaatactcagctagagattgctagaatctttgctgctgcagcttcttctggacagacaaaggtgttgattcttcattaaggatcggaagaaattgagttctgctttttatat

SEQ ID NO: 12655 - DNA, 476 bp, Arabidopsis thaliana columbia
caaatttatctaattgatggcaccagtagagccaattcatagcttacctccaaaagcctatttgtgtgaagtagcattcgagtgaagaaactttggatgaacacgagcatgctcaaccatacctgtcaaatttcatctcatcaaaataccacaaaatcataatcgttacgcttgtgtgtgtgtgtgtgtgtgtgtaagagaaggagaaggaaatgacctggagcagctggattagtaacaccggtagggatcacgaagttttctccggccttccaaaagctccggcactctaggttttctcgaggagcaaccgtcgcgtcagagatcgtacttggaacttgatgtttgtccattagggacgccatgcttcgaaaagctcctcttcctcctactccgtcgtcattgtcactgtcactgtcactgtcgagattaacgacaacagagactcccgcatttttcgactccggagccattac

SEQ ID NO: 12656 - DNA, 541 bp, Arabidopsis thaliana columbia
gatcccccaaactaaagtgaaaatttcaaagtgtacttgatgtatccgtgagcagaatgaatatgatgttgatgatggtgtctggctgaatgtgtttactaactttctgggctctcactttaaaacagaggcatggggatggaagtttgctgcaccttaggcatgattgagaaacaacaagcactagagctaaagaaggctggcctcactgcttataaccacaatcttgatacttcaagagagtactacccaaacgtcatcactactagaagttatgacgatcgccttgaaactcttagccatgttcgtgatgctggaaatcaacgtttgttcaggtaactttgatatgaaaatagtattcttgtatgcctcaattctatagaactaaaggattgaaacctgtcttcagcttggtcattagactcacagttttgtaatattcgttgatttggataaatccatagatacgacatgttctcaagtgttttcttttaccgataaacaggaggcatcatagggcttggtgaggcagaggaagcag

SEQ ID NO: 12657 - DNA, 388 bp, Arabidopsis thaliana columbia
gtgcggcgccttctcctgccaagccgccgaaatctcagatcagagaactacctactcatcaacagatccgacgacgattcagtgaacccaaaaacttagatttctcgacttggttctctgagaatctctctagaattgctgtcttctctctcttaatcgtcaccatagtagctttcttcttcctctacaacaccaccgacactgcttctctcctttgtttccagtctcagtcaactcaatttcttcaatctctctctcgccctcaaatcaaatggaattcgatcccagtcgtccctgataaaacctccccgtacgctaatttccagacagagaaatggattgttgtgtcggttaccaattacccaactgcaggagctcaaagagcttg

SEQ ID NO: 12658 - DNA, 443 bp, Arabidopsis thaliana columbia
caaataaagaaaatgaaaatcttgatcttgattctatcctttgtgacactctttgagatttgcgttgtggacgcatgtcgatcatactgtggaaacataaccgttgattatccgtttgggatccgaaacggatgtgggcatccagggtatagagatctattgttttgtatgaacgatgtgttgatgtttcacataagttcaggttcttatagagttttggacatcgattacgcatatcagtccataacactgcatgatcctcacatgtcgaactgcgaaaccatcgtgctcggtggcaaaggcaatggctttgaagctgaggattggagaactccatatttcaatcctacctcagagaatgtctttatgttgatcggatgttctccgaaatctcctatatttcaaggttagtaagttactacaacaatatttcagaaaaaaat

SEQ ID NO: 12659 - DNA, 438 bp, Arabidopsis thaliana columbia
tgttttgcggtgacgtctctcgtacacagatatacttgtcagactccatagtaacatttgtaaacgtgatgaattgctgattgatcccgatgctcggaagctggaaaaatcaagatgaagcgttacgtcaaatagttcatttatttagttatgagatccgagtacataagcacattgctacagacaacaacttgaaattcggcattgatatattaacgaaacacagatctgagcatagttagagaaatctgatcagaaacatgcattcccaaacaagcgatccggaaaaactagagagtaacacaacgatcgagcagaattcagatcagtaggatactggaatcaatcaatcaagagactgaacagagcttaatcgtagaaaatcacggtcgattccaggagatacaatctaaatagtcaaagataagagtgaagagt

SEQ ID NO: 12660 - DNA, 754 bp, Arabidopsis thaliana
ctttattattttgtattgttttggacaatttatttcagcatttttacacagaagattagacattactagagaaattctagcaaaagcttggttgtattttagtgtatttttctattttacgtggatatatatagcgatatctttaatttcattcgaactctttcttttgcaacttatctttatgcttaattcataatttcttataattccatcaaactctagaattattctttattttcctcaaattactttcttacaaaatgaactcttggtctctttaaaaattcaccagaaagttttagctaaccttgaaaaacacaaaacgtggaagagataattaagagagatattggtactaacaattcatcttaactagatacagtagtcgagaggccaacaacaagtcttgggactcgatttgagtcaagaaagaagcatgtatctatcttaaaggcactttaacgtttctacttccacttgattttcttgtttataaacatcgccacttccacttcctctaacaccccaaagtcacagcaacttggtgcaaaaataaaatggcgaaccccaacgagcaagaaaaggcaatgagaacgaaggttaaatggaaaagattcactgagatggaagtagatatgattatgccagatccatctccaaacggtaacatctatcactccgcctttgagatgaatgccgcaagaaatggtttaactgcccaccaaaagcaagagctatcttcggttacttagtg

SEQ ID NO: 12661 - DNA, 636 bp, Arabidopsis thaliana columbia
tcaaaaatgctattgtttgctgccaactggacaatagaacaggcaaccgaagaggtattcaactctatcttgcgtggtttagttggtttggttctagactgcaacaacactgtccgtttctgctttgttttctcaatacgttgaaggttgagtttgagcatccaatttggaatcatatatctagatgtcggaaaaatctgaaattcctctgcagattggatccagatgctgttccaattcctatgctgtcctccaaattgattgatgtagccgcatcaaatgaccagtccaaaccttacagtaaatccctctttgagtctctcaactctgttggcgttcttcgtcgttcgtatcagcagtggcttgtagagagcaacgacaaccacacagatgtatccacttttactcggtttttggattcgcttcgcgtattggagaagaaaattctttgcgaaattgttggagcaccatctttcagtgtgttgattcagttgtacaccgaagttattgacaaccattcattcttttggtctggtttggtctcttcttcagatgagtatctattgttttcgttttggtcactgataaaatctatcaaaaagatgcacagttttttccctggagaagttcaggtgg

SEQ ID NO: 12662 - DNA, 485 bp, Arabidopsis thaliana columbia
tttcaaaacgaaaatccctattttccttgtcaaaaaaatgaagatggctaatggcaatttggcatgatctattatttgccgtcgaaaagagatttcaatattgcattagtgcagaaaaagaaagaaacataaggataagaatagtgttttttttaatatataaaggtccacatatgagctgtgtgtttttgaatagggtcccaaaaataatagtccaattgcttaagttttgccaatgagaaagcttctcttcattgcaacttgcaaaagattatactataaacatagccaccaacataaccattaatgttgtatcctaccattcctataatctttaataaaactgttccctgcttctatttttttctctaaaacaatatgcttttatttgtgatgttagccaaatgagtggacttcaagatcaaaaacttcaacaataactcaaggaggtaaaagctgctacggacaaacgacaccgtttagtg

SEQ ID NO: 12663 - DNA, 470 bp, Arabidopsis thaliana columbia
accatcttttgatgttcgccggaaaacttttccgggcttgtcggaatctcatttgcagaacattattttctcttatggaatggcttatggtggaggaggttttgcgattagttatccattggctgtggctttgagtaagatgcaagatcagtgtattcagaggtatccggctttgtatggttctgatgatcggatgcaagcttgtatgactgagcttggtgttccattgactaaagagatcggttttcaccaagtaagtaaagttttgtttggatttggttatttttgtgaaatgggattttgcttagattggtttgattataaatgattttgggttagaatgatttaaaaaggtagtgaaataggcaaattgatgattagtttagtgtgtacgtaattgatattcatggtttactgatttcagtcgaactgatattttagttcagagtcagagattagggccaatggat

SEQ ID NO: 12664 - DNA, 1210 bp, Arabidopsis thaliana
catcacatcactatatctggtttcaagatgtctgatttgatctctttgttatgcaacacaacccctccattacaatatatctcatcgcacacgtaaacatttttcccaagtatggacatgttctcgacccgagcccattgtccgaccgtcgagtgccacccaatgatactactcgagatacacgcatatctcttcacgtgtaccccacgcattaccgtgcagtgcgatagtctaaccccggactcaacaacacagctagggcctatagcaacgttagggccaatcaaacatccttcaccaatctctgcggtttcatccacaagaacatttcccaaaatgtgtggaccagtggctaactttgaaggagatttcttcctcagagagtctaagtaaagtcttagaccagtaatgtagtctcgtggttgaccaatgtccatccagaatccgggaagtagcattgcatagagcttttccgcttctgcgatttgagggaagatctctttctctattgatgttggtcttagctcaatccgatcaagaactgaaggatttagaagataaatcccagcattgatcttgttaccaacaaatagtttcggtttttcgacgaatctttccactctccctgtggcttcttccataacaacaactccatatttcgaaggctcatctaccttttaaaccaattatatcataatgagtaaaaaaaacatgaacacaaatgcttaaaggtttcatcaaaaataatttacctttgtcaccattatagaggcctctcctccatgagcattgtgaaaagcaatcatctcttcaagcgggtagtcgctaataacatcgctgttaaggacaaagaatggttggccagagccatcaaccagtttgtccctggctaaagccaaaggaccagctgtacctaaaggctcagtctcttgtgagcaggtgatcttgatcccgagagttgcctcaacgtcgtttgagaatttggacatcactagcagttgctgaatgattattcaacattgaacaatattttaagatcttctattaaaaaaatcaaatatagctttccaaaggaaagttttaaagacttgaagtctttttacctctggctcgtagttaatggccaagacgacttcatccactccaattgcctttagtgcctctatctgcaacaacatttcccatcacttaaaagagcatatagctcata

SEQ ID NO: 12665 - DNA, 566 bp, Arabidopsis thaliana columbia
cgaccaaaatgtaaaagtatcttgttaggaattcgtaaagtaatggtagatttatgctattttggctagatgtatgtgagaatgatttagaaaatcaatgatttacaagaaaatcagaaggaaaaagatgcaagttgcactacaattttacccttctttttaagttttgaaaagggacaattgattaattactagaagattcgaactctggttctagctaggtaaaataaatgaatccgaatcactaagccacttaaccattcaacaattattacatgcatctatgtaagacatgacaaagagtaaaagggtagaggtgctaacgaggagaacggagtcccgagcagtgatggctagaatgtctgcgcatgagacgatgcccgggcacattttctcaaccttaaacttgattttgtcgatcacttcgaaccccctcacagagttattgctgggtcctgaggttttctccccaaaaaagacggtgtgtcatcaacagtaaggatccgtcaaccctatcaaatcatatgcttagcatttactaagttttaggagtaattcatgggaca

SEQ ID NO: 12666 - DNA, 536 bp, Arabidopsis thaliana columbia
ctgagcacagctgcgctgagattgggttttgaaaaccctactaatggaaatccgatggataattcttcgcatcacattggttatgtaaatgggtttaacggtggagaacaatcgcttggtgggtttcagcagaattcatatgagcagagcttaaaccctgtttctgggcagaatccgacgaataggttttatcaaaacggatacaatcggaatcagagttatggggaacatagtgaaattattaatcagagaaatcaaaattggcaaagtagtgatggttgttcctcgtatggaactactggaaatggagttccacaagagaataatactggtgggaatcattttcagcaagatcatagtggtcatagctcgttggacgaattggattcgatttgcagagaagggaaggttaaaaaagctgttgaaattattaaatcatggagaaatgagggttatgttgtggattacctagactgttttggatagccaggtttgtggagatgccaagctttacaagaaccaaagttgtcatgagt

SEQ ID NO: 12667 - DNA, 499 bp, Arabidopsis thaliana
atagtcgattccctttctctttcttttcctatgccttccatcaatcccagctgcttttagttctcttcttttttgcagagaagcaagccttctagcttcctcaagttgtttttctctagcttttcttttagccttctttcccctcgtgttagccaatctagctcttgcttcagaaagcatttctttctcatcttcgtccatgtctaccggatcaggacgagcaggctttgcttctgggttcggatcaatctcaccaggacgtaattttcgtggatcatccgctgcatcataattttcatccttagtgcatgctgcatcaaggagcttctcatacctctcaagacattgagatggtgtacgacccacaataggagcaatagttctccattgagtaggcagaagtttagcaagatgtagaagcttctcatcttcttctctggtccattcagtctacattaacatcacaaaattaaactcagttgtaattcaaaaacataag

SEQ ID NO: 12668 - DNA, 483 bp, Arabidopsis thaliana columbia
gtgactagaaggcaaagaaataccactctctgcatcccaaccattagccaacacatcaatctgcatttccgcagcattcaaccagaaaaatcctgaagttttaccagacttcccatgcgaaaccatgaacggaatcgacccgtaaagcccaaacggtgattcatgatcgtattcaaacacatctagattaaaaagcctgtagggttcagattcctcaactccaggacccttggtaggcttcaacgcgaacgtagtggcgtgttcaggaattccataaacgaaactggaatcataaaacgaaacatcgaaactaatagattgaggaccagatggtctagaatctgtatgagtcctaaatttctcttcccagttatctccttcagttttcctccccaactgctcaaaatcaaataatccatgagaattcaatgacacaacgcgacggcgatcacctgatttctcacgcacatacacctcaaacgg

SEQ ID NO: 12669 - DNA, 458 bp, Arabidopsis thaliana columbia
tatcatttgtcccgagaccgcttcatattgttttaaaatacccaaaattactccgcattgttctttattagctttacaaaagaataaactatcattcgcaaacaacaaatgagagactgatgggcttgctgttgccactttgatacccgtaatcaatttttcttgctctgcctttcgaatatttgcaatgagcacctctgtacataggataaatagataaggagagagtggatctccttgtcttaaacccctctttgggactattagtcctctaggttgtccattaagtaggaccctatactggactgttgtgatacaccacattatccacgatatccacttttcacagaaacccattttctttaataattcctcgataaaattccattcaactctatcatacgccttactcatatcagttttgatcgccatgaattttcctttacatgacggattag

SEQ ID NO: 12670 - DNA, 788 bp, Arabidopsis thaliana
gcagtaatctgaattaagtaatcatatccaaatattcaaatctgtatgatgctatgagagtaaaaaccttgaaaggccaaagcaaaggagactcacagtggttgagtccacaacacgcagattaatttcacttttggaagctgcatcagcaattgcatgtgcatccgaacacttaattttaacagtgtcaaagaaaggaagttcttgaacttctgcaaccccaagcttgttcaaccctaaggaaaatataccagcgagaccatggacacgctgggcaatagattttagacctgcaggtccatggtaaacagcatacatggcagccatgttggcaagcaacgcctgcaggaaaatgaaaagatgaagtactcatcaacatgaatcaacatatcatctagttatctgaacgaactaatagtgaaaagtgaaaaatgagtaatcagatactaagaagtaattacttgagcagtacagatgttgctagtggctttgtccctcctaatatgctgttctctagtctgcatagccatacgcagagcttgctttcctgaagaatcaacactaataccaataatcctcccaggcatcattctcttatactcttgtgaagtagccaagaacgcagcatgaggaccaccataacccatcggaacaccaaacctttgagcagagcaacaacaatatccccccaaattctccaggaggtttcaacacagtcaaagccagcaaatccgtagccatcacaaccttaacaccattagcatgagcattcttaacaaactcagcat

SEQ ID NO: 12671 - DNA, 678 bp, Arabidopsis thaliana
tatcgctgctattttggaagtagtgaagaagaattttagtgatcatcttattcttggtgaagaaggaggtatcatcggcgattcgtcttctgattacctctggtgcattgatcctctaggtttagctctctttacaaatctcattgctttcttttcatgtgtttgtgtggaatctctgagatttttagtattagtctcttaattcctttatgcatagatggaactacaaattttgctcatggatatcccagttttgctgtttccgtcggtgttctgtatcgtggaaatcccgccgctgcttctgtggtaaatccaatatatacttgcacaaaccagctaatgcttgttagttcctatttgctgattctttggtcagtaggattaacaacaaaatctcatcatgcaggtagagtttgtcggtggtccgatgtgctggaacactcgaaccttttctgcaactgcaggtactatgtgacaagcttatgtttggctatatatctaaattttgtctaactagttcacttcttaggtggtggagcattgtgtaacgggcaaaaaattcatgtcagtaagaccgatgctgtaagtaacttatcaagaatccaattttaagtttcgacatggtgtgttcaatggttttggtttattagatattatcgggtttaataaggtggagag

SEQ ID NO: 12672 - DNA, 965 bp, Arabidopsis thaliana
tgttccatactcggcaaatccttatatttgtggctggttctttttatttacgacttctacgaagtttcctatatacaaatttcaatgtggtttactttttgtgatcttatataagcttcaagataaattaaccattgacgttaacgttaggagtaactgtcacatcacatgactaagcgcactttgacttaagtgggtagggtatcaagaagatgatctggtaggaaagaaattatgtgacccaacatctgcattatggggtccaaaacctgtccgtaaaatagttgacgaaatctaccaaggatctcaatttttttttttcttattttttttaggatctcctttattgtgccttatataagcgcacaaacccatcttgcctgcttagagcatgaccagcggtagttttttaaatttggttctcaacagttaagatatgctttaaatccctttgttggacttgctcttatgatataaacttgtagacgagcgggcgaagagcgaccatagagaaagctctctacttcatattttgatatctttccctctcttagttttgatctgaacctttttgtagctgttgaaaaatggcgaatccggtgggttttagattccgtccgactgacggggagatcgtcgacatttaccttccgaccgaaaaatctcgaaagtaacacgagccatgtcgatgaagtcattagcacagttgatatttgtagcttcgacccttgggacttaccttgtaagtctttctaacgcgagtgtttgtttttctttggttcccaactgttgtatcatcccggtaatttctgatcatgttctgtcttcccagcccattctaggatgaaaacaagagatcaggtttggtatttcttcggccgtaaggagaacaaatatggtaaaggtgatcgacagataagaaaaaccaagtctggtttttggagaaaactggcgtaccatggata

SEQ ID NO: 12673 - DNA, 897 bp, Arabidopsis thaliana
gtttatcatcatcattcaaccatgtttcccattcctctcttggtatagcatcctctcgatttgagcatcttgacgcacatcaagaaacccactaaaccaacttggtatagcattctcgactatgctaatgacttacatcgacatggctcgtgtcaccatcgaaatttgttggccggaggtaatggtcgacgatctcctctttggtcggacggaatctgaaacccaccggattcaccatttttcgagagtgaataaagtttcagttttaaaaaaaatggagagaaaaagagggatcagaagtatttcgccattgttgctattatgcaagttcttttggtaggagggagaagacggatatatacacaattttcctattattcatgaaatattgaaaaacagattcccaaatccacaattgacttgctaatataagagttatatacaaatttttaggctctacttaagtctgttcacacaattgattcgccctaaacatatttctaattgcgtaacaaaatagtgtgaatcacttgaattctatgttttttaaaacaaaaccgaacaaacacaagaaccagtgaatcaaatcacaagtttacgatagactaaaacactgaggtgacaaactggcacgagaaacgaaggttcttataagaactagaatcagctttaaggcataacaaaagtctaagacaaaaacaaaaaacaatcccaaatagagataatgctaaacgttcaacacaaaacatagagatctcaagcttgcttaaacgatggcgttcgcagcacttgcgattcttggccacagatcagcacactcctttccgattggtccagtgatagcagatcctaattacatcacacaacagactcatcagctacaagtaaatatgatac

SEQ ID NO: 12674 - DNA, 522 bp, Arabidopsis thaliana
ttctaaatcatctgtggggattggaaaaatcatggtggggtcattaggataagttccatgcgagtccagatatatccgttgccgagagtcgttttagacttcagttcgcagcacagcatccgctcactctcattatccggtcatacttaatctcacctactcccgtcacagcccttttatctaaaattataaacacacacttcgtcttcctcctaaaaacaacaaaactcacacataacttgcagagcatcgttaatggcgaaacctctctgctacatattttgactttttctcaccaattttgtcttttatctgaaactttagtcgctctcggacaatgatgaatcaggtgggtttcagattccgtccaaacgacgaggagatcgtcgaccattacctccggccaaaaaatctcgatagtgacactagccatgtcgatgaagtcattagcacagtcgatatctgtagcttcgagccttgggatttaccttgtaagtcgagttattttttccaaactgttgt

SEQ ID NO: 12675 - DNA, 767 bp, Arabidopsis thaliana
tatatgaccacaactttccgcatgaactgcgacctataaggctagtcactactcccactggggctagaaaactgaactgcatggatacatgctccaagcgctaggaacaagaacttgaacttacatttctctttgcctgcttttgttgtaagaacattacacaccgtcccaagatttgtttccttcaacttctctatgtatgccatcaacagcttgtagcttccttcagcgcttcctcttgttgccgcaacagatttctccttggcatggcatgctttcatatatgttatagacacccggagatcatctaacacaatactggtaatatgtcaacagcccttggacctagcttttcattagtaaatcttgaatggagaactgaagcaataaccttacatgaagttttttcccatactctgccctggttgaaacatcacatgtgtgtgtgttaatttgtctgtcttcacttccatggaatctgatgtcccaccgactatgtgatcatatacacgccacccaaagtgcggacccacacatctaacaattaggcgttgtttaccagaccttgtttgtttgaagttaaagaacctcttaattgcatagattgcaagtgcagtttgcatttctgccttgtttctgaatatcctcccaatgaaaattgcatcgttggctgagtcaaacacgccatcttgcatatcatgcgtttgtaagaactcgtccccaaaacatggtgcacagtcgtgtgctgggactatctaagcttgaat

SEQ ID NO: 12676 - DNA, 478 bp, Arabidopsis thaliana columbia
ggggaaggaacggagctaggcgtaagaacccctacaatacttggacttagagagcatattttcacgggaaggtaaaatagtacaatcttgtactgccatttagacagtcaatttgatcttggtgcacaaaatgatatcctactcgtctcgtttcttgtggcagtgtttcttctcttgcatggtttatgtcgaatcaggaaaacagctttgttactattgggcagagggtgctagctagccccttgaagtaagttttttttacatctcgtggtggaattctatgaagggagacctggatttgtaactttcattttgactcctccagggtacgattccattacggtcatccagatgtttttgatcgactgtttcaccttaccagaggtggtgtctgcaaagcttctaaagttatcaatctaagtgaagacatatttgctggtacttgcttcatcgccttttctccggtgacacatattat

SEQ ID NO: 12677 - DNA, 566 bp, Arabidopsis thaliana columbia
tttgtgattaatgtaactatgatgaattagaatgaaaggatccatccaaattcttacaagacaaagtcataaattcataatataaagactctggtaattaacatgattgcgatacattaactttgtttaaactgctcaagtaaggagattagaacaatggctaaaatgtttgcagaccgaccaaattttcaatgggcctaagaagtacgaaccctacatttctaattaatctcccactattcatctactttctctctaatgaaaacacacaaaatttccaaacacaattgtaaagaaaaaaataaaaatttaataagcaaaagaaaataaaaacctagacattggatgtagaaggctgaacaatcttgttttgtctccctgcaagccaatgcatggtcctcctagcaaaagatggcgttttcgtctccaaagattccgaattttcgctcttaagactctcttcgggaggaatccgatggtttggaaaccggagtgaagaggaagacacgaaagaacaatccgaatctctagcactagtccccttttgcttctcctttttaccctta

SEQ ID NO: 12678 - DNA, 399 bp, Arabidopsis thaliana columbia
caaaacattcctttaaatccactctgactaatcttctttttctatttttttctgtgtataaaaaagccaatgaaaaaattttaaccagaaaataaaaacagtaaactaaaccccacggctagttatctctttgtactgtctgagagactccattctctgcaacttcatctcctcattaaacttctttataaacgcctcaactcgccgattcaactcttcctgactcagcgacggctctttcctcaccttcgccgtctccgccaactgataataattagtcctgtccctaaacgtatccgacttcttataaaccggtttcacctcaccgtcaactcccccggaatctccacgtccaaacgtgtcagatctccggtataactgtctagtcaacggcgttga

SEQ ID NO: 12679 - DNA, 592 bp, Arabidopsis thaliana columbia
tttggtttgtagttcttattctgaactcaacaatcatcaaagtatcaagaaaaatccgatttgcgagcaattgtgaaatcttagattgataaattctctagaaagaactatacatgttatttgtagctatagaagaaactatggaatcttatactctaattaagcccaaatggcaagagaagacatgagtccagctcctaggaacaacattacataagatacaatttgaagcctaaagttacacctcatttttgtactcaagaaatcagcagctatgagatccactaaagccatgtacacaagaattccggctgagagcgagtccaagataccttcagtgaccaatgctccgacactgtgagaattgaaagacgacgccactgcggttccaatcccgatccctatcggggttgtgagggcgaaaaaacaagccattatggtcgctgatttgttcctgaattgcgcttgggagatgcatccacgagcgcaaatccttcaaagaattgatggaaggatagtgctgcgattagaggccggattgtgcaaggagactgagatcatccaagggatagaccgatgattatggaatgtg

SEQ ID NO: 12680 - DNA, 777 bp, Arabidopsis thaliana
caaagaggttagacagtgcagatgcttatggttgagaagctttacctaacaatggtacaaggcggttttgttgggatcacatgtgaagttaggcacatggattcgttcttggagttggtacaaggacttctaaaagacaacaatgaggtataataaggacaagttgactatgtctctctcttttatcttaacattctaaattaggatttggtaaactgagagcagttagcttcttgaatctctaaagtataaaaaccctcaccgttttactactatctcatcttaaaactcccaagtaacaaaaatggctatctcaaagcttattcctactcttgtgctctttgttttgttctcttttgatgttagtgttgctcatccaggtctaggatttggatggggaagtaatagtcccattggaggatctttttactcaaatctttacccacaattttaccagttctcttgtccacaagctgatgagattgttatgacggtgctcgaaaaagccatagctaaagaaccaagaatggcagcatctttactcagacttcacttccacgactgcttcgttcaggtaaaagtatctttacctatttttgttttccctttatgtgtctcttaagcttaacacttatacactacactctgtgtgtaaacagggctgtgatgcatcaatcttgttggatgatagtgcaccataagaagtgaaaagaatgctggaccaaacaagaactccgttagagggttcaagtaatcgcgagataaagcaaacttgag

SEQ ID NO: 12681 - DNA, 1685 bp, Arabidopsis thaliana
tggcttattttggacgagttaggcagtatcttaatagtagtaacaaagctttagtttttgtagttcataagtcaaaagctttgaacaaaacagtgttatcttctataccagacacaaaaactgtgttgtttatatagttaaatcatcctgaagcaatgtgactaaattttttgtaaccaagctatatttgcattgctatggtcttgttttgtgaccaacagacttggatgcaaagtaggtataacttgctaaatgtctgattttggaaataacttatgaagagaaaatcttcatttggtaagagttgttttctcaatgtaacagtttactcatcattttcaaactccaactctcacagaacacaatcaagttacaaagtgcagatgcttatggttgggaagctttacctaacaatggtacaaggcggttttgtcaggaacatagattcgttcttggagttggtacaagaacttctaaaagacaaagatgaggtataataaggacaagttgacgaataaaaaaataaatattataacgtagagaatctttcaaccccaaaaaaacaaaccagaaagaatcaaatcctaaatccgaaaaacaaaagaaagcattatgcatagcattacgatacaaaaaaccgacaaatctaagtaactagtagctctagttcttcgaagcatcaacgaagtaagacgtaaggtcagtcaaacgcacactcttatccaacatagcctcaagctctttagcttgcatcaactgaaacttctcttcaacaatcttcttagtctcaagagtaaacgaactccatttctgcctcacataatactcatcaatacccgaaccagcaatcatcctagcaagagacgacttctcaaaccaatcatctccattagttgaagaaacaccaacaaacgccaagtcttgctttacagaatcaagcttctccttcgtcttactcgcactctttttcgacacaccgttggacttagcattagaatcaagagctattcctttaggtccccaaataaactttgacaattcaaaagctttcttatcatgagctttcacaaacctaggttcgtcctttccttctttagcacggtacttcttccttaaactcctaaccttatccgagaattgactcttactaacctcaaagctgatagatttcttctggaactcgtaaaacgcattagtatctgcggaaggagacttccctgtatcagcatgataatctatcattccttgtaacatagagatttcgtcatcgtcactccatagtctttgaaaaagtgctggcttctttacactctcttcatctttcttgactcgtttcgttgaagtcgtcgcagcttcactcgctgccctctttgctccagatttcaccgccggtaaagctaaagtagcagtcgacgacgacggatcatctttcttctttgaagcgattgttttaccggatccagatttcggaggatccgtcgattcagaatccgaatctgtttcactctccgaaccagaatcggaatcagcagcggcggagatcggcggtggatttagaaggagcagcggcggagacggaggtggatttagctggagtagcggcggagaggcggtggatttagcaggagcagcggcggttgtggcgggaagggatttgattggttcgtcttcttcagatgaagagg

SEQ ID NO: 12682 - DNA, 917 bp, Arabidopsis thaliana
gagcctcactcaactatcgtgtcttctgagttcgtcaaagatgaaaagtcggagactttagaaaaaatggatgatttggagattacccacgaaacgaagaagggaaagagtttttgggctgccgttagtttgatcatcggaacagccgttggtccaggaatgctcggcctcccagctgcaactatcagatctggttctatcccatcgaccattgctttactttgttcttgggtttacgtcatttcctctattcttctcgtggctgagctcagctttgcagcaatggaagaagacaatgcagcagaggttagtttcacaggacttgcaactaaatcctttgggaacaaatttggagttttcgtggcttttgtgtatgcttcactaagtttctctttgatggttgcttgtgtctcgggtattggctccattgtgtctcaatggtttccttcaatgaatccatttttggccaatgctatattccctctagtttccggaatcttgatcgggtttttccctttcaatgccattgatttcaccaacaggggtctctgcttcctcatgctcttctctataacttcacttgtggccattggtttatctgtggctaggtccaatgtgttagcctcatttggtcaatcatgttggaaagtctccatggttttacccgcggttcctgttatggtactgacactagggtttcatgtgatcacgcctttcatatgcaatctcgctggggattcggtttcagatgctcggagagccattcttgtaggcggtgttgtgccattggctatggtgttgtcttggaatctaattgttttggggcttgcaagaatcactgtgcctgctgcaccttcttcaaccattgacccaatctctcttcttctatctgtgaatccttctgcctcatctaaaca

SEQ ID NO: 12683 - DNA, 812 bp, Arabidopsis thaliana
tcacagatcagcggcaatagaagactgcatacaattcataaactcctcttcctccttcacaagatcaaattctacctgtggcagtaaatcttaagtattagttatgaccttaagtatcgaaaactctttcttggtcacttgtatgcaacgcaatagcatattagagaattgcgtgtaatatctttatgatacaaatatatatagaactgaagaaaaattttgagtaatcttgagaaagtgtgagctttgtttatttacaaaaaatcatctgtatatctttcatctacaaagtattattcatatgcgtttggcctaaatcaacgagcagaaagatcctgaagaattttctggcaaaaaaggaatattccggctagctctcagactgcaatgatacttgtataatcagagactggcgtgaggtgaagttgcacctgatgagaggtcttggagccgaactatttactattctcggaatggatcaatcgattatcttctctccggttgaaaataggttccaaatgacggtcccaacgaggtaaagaccgaccgaaatcgtgaaaacgtcatcccaagaacctgaggcatttcatgtcattgttaattccattgagaaaacacaaaaaaaatgaaacttagaagagattttataaagattaagcaaagcattgtcagaattacgaagtgttttgagagtactgaccgtgttgtagtatgtgaccagtcgcagctgtgccaagaactccggcaagtactccagcagtattagacaaaccaagtacactccctgagaagaccacaacatcaatgtgcta

SEQ ID NO: 12684 - DNA, 2009 bp, Arabidopsis thaliana
catataagtacataacttataaaggtaacacaatacattagtcttggacagatcctaggatctttatgacacgacatctaagccagagaactagtcacctccatcttcttgcatactccctctagaatttttaaaaagtctctcacgattacgaatactttcaatagctgagcttcttcctttgcaggatcaacatggaaatactctgttatctttttcactgcaaagagcgtggaaccttcttctctttcaatctttttaatctcctcagcagcagtttccaagaatctggtcaccgactccctgaatttccaccattggtgttcctcactgtgtccagtctcctcacacagtcgcagaacctcactaattttctgaacttcttcataaagctttgacacattcattcttacaacaccgtagtccaactctgcagatttcttggcatcgttaagaactgaactgagatttctgacaacttgtagccctttgattccttctgattcagtgatcttctgtacaacagaatccaagatactggttcttccatctgacgatttgatatcgacaaggccgaggagcgcctcaagtttgaagtcatgagcattcccgctcttcattccagcctccaaggtagctccaacaagtctcaataacattctgctatttcgcagtgcctcacaagcagcctgcaaaagaatcatatagctttatgagacgtaagcttacaacaacatacacattcataaatgtctcttgttatcttcatctttgttttatacctgtataacgctgaatgatcttttcaagtgtttgactttggagtcaaaactagcaacagagagcaatgcatcaacccgtttgaacacgaaaggaacattaagcaattccttgagaaacctctctgatggagcaagcttgatcactgaatcatcactatagctaatcaacttcttctcttcttcttcgctcggtgccactcttgctaaactctcaagaagctcaactccaagtgcatcatagtgacctgatgaaataaaagacaagtcagattcaactcgatacaatccgaataatgagaagaaattagctttgtcattgatgatttaccatctcgaagggcctgacaaacatcatttgtggtgagcttaagtgttgtaagcagaacagcaacattttgactcttccttggatccaaaactttgctctcttgatttagcatcggaagatcacagctaagacttctctgtttagagttagcatttgaagagttgtatggaagacggtcccaagtatttgtccgacgagaacttggtcggactttgtcccaaggcaaaggtttcagctttggcttaggtcgatctgttgttccttccccacaactctgtggtaactccgagaaagatagcttttttccagatttctgaaccataaaagactgtgacggtggcacaagaggaggtggctcaggcattgccggtggtggtcgttgtggaggaggaagagtaacagcagcagcggccgattctctctgttgagttgtatcaagctctggtttttcccaagaagatttcaaacttctagaagattcagagatgttgatacaaaaatctctagcaggtgatgcagaagttgaagaaagaaacaaagacttgacatttcgactgaaatcgttccatctcggcggcgaactatcaagaaccttgcggaaaaaccgatccggcgtggtggaaactgaagagtacatagaagaacgagcatatgcgtctggagttctaatcatacctctctctggtgaagtagaagcagaggaaattcttggaaaccctagattttgattccagaggctaaacattctcagcgactgcccaccatatctcttattgttccttactgttctctccggcgacgacggagagtgagtgttttggttagttgaccaatgtggagccgtcgagttcatcggtggagacatcgcagctgacggtgacattgccggagaatccgag

SEQ ID NO: 12685 - DNA, 633 bp, Arabidopsis thaliana
cgataagctccaccttctccgcataaagtattgtagaagctaggttgctccgaaagaccggaggttgcagcatgcttcaccactttctccatcgctgctatcgtcgggctatcagaacgtgcaaagtagaatcctgagttcaagcgccttggtcggtttatcggtgctgcaaaaccaaacaaaagccaaattcattagtattttataacaaagttggtctggttgatcagttcatcatcattacctgttgtattgtattcatcagattgtgctgcaagaacagaaggaccgaaagactgaagcagaggcaacgggtttctgaaccaatatacatctacatcactcaagagaacgttatagcccagcttcagtatcttcaaaactgttcttgacttgactttggtcactctctggaaacactttgatccaaagtggcagtcattgaagcttatgttctttggagcgtatggatcaaagaaaactggcagaccctgcataagaccaactgattataactctctaatgacctatgatcgttcacgtagcaagaaagagaagcaaagacattttttttactgcaaaatagaaactgataagttcatcacaagggacaaactagaaatttggactttg

SEQ ID NO: 12686 - DNA, 890 bp, Arabidopsis thaliana
tagaatgtaatccacttacagagagtttctcttttgccttagcagattgctcatttgatttaggctctgcttctcccaacaatactgctggaacaaatgccctagagaaacaatgcatctgacataagcaattgaaaactaaaagaaaaaagttgacgcaatacagaactagatagtcaagactcttcctaggaaaattaaatgctttctgaatgccacttgcaaactacacattttcccatatctttgtttgttatgaacataaatagaagctgacctcagatcaggcaagcactcgtaaaatgtcttggtgtcttcgtcgtcccaaataggttccgggacagatgtatcttttacagtaccagagggtgaagcttcgtcccctgctgtgagcctagttgtaccatcctctggcataacaggaggttgcatatcaagtgcttcggccaaactgcaacaggacacaaaaattgcataattaatgaattagatgagaatattgttactgtagatattcctgtgccagatatccattccagccaaagatgtgggaagaaaggagaaacgccatatatctaaaatcacttccaaacttcagttcataaatattatagggttccagtgaatcggtaaacacatgtcacaatcatcataaaactattgcaaatgaactgatgcatgaccaagatctaagcaatgaaactatatgtataaactacaatgacagcaacttcaggaacatattaagaaagaattgagagctcaataatagtatgtgttataggtactttagttaatggccagtgagaagaaagctacgacgctaccaatatcctcattgatgaaacgtttcctttgtgcaattaactccacaacagctagacccaaca

SEQ ID NO: 12687 - DNA, 488 bp, Arabidopsis thaliana
tgaagtttcgggcgttcctctggtaaatactgaaacatatttcactttgatgcagtaaaaatgcatcgacttgttgtttctcagcttcttccaatggttttttttttgccagagatacacactcatgtttcccaacaaaggaggagcaacacgcatcaagcactaagcgggaaaggcaaaatatcaacttattgtggttatgatatttcttggcttcggttggcctgtatggtttgtgtggtttatgatgcaagcaacaaggagagagatgcatatgcgtgcaaccgtgataaaccaaatggaagcgacacaacaagctgagagaaagagcatgtacaagagtcaagcatttgcaaatgctagccacgatattagaggtgccttgcagcgatgaaaggtctgattgatatatgtcgtgatggagttaaacctggctccgacgtagacatcactctcaaccaagtgaatgtttgcgcaaagatttggtt

SEQ ID NO: 12688 - DNA, 1188 bp, Arabidopsis thaliana columbia
ctcactgtggatttcactagcgacttgggagctcgattagcggttcatccaactacgcttaaaatgtctagtccacctaaaccgtttgtatgggcagcgaatggtattgcttcgagtctcgattatgtttttctcaacaggtttgaatcacagcgagccgagtactggcagactctttactctactatagtaagagccttgttttcatattatgaaatggtagaaagagtctcgactttgatttcgtatctcattgcattcatttatgtttttgaatgcagatcatgagagtaccttatctcattctatgctctgaaaacgatgaccttgctccttatcaaactatacacaatttcgctacacgtctccaagaactaggaggaaatgtaaaacttgtaaaatggaatgattccctcattgtggttagtatatactaacagttagtggtgttttctctccaaaataagttctttgtgatcttaacattaattcatacacaatgttttcaggtcattatcgttataaccaggtcgactataaagctgctgtatctgagttcttgtcaaaagcagcgtcggtttattcgcagaagacgagaagtcttgacagagaagctatgaaaggaacatgtcatgatgagataacagagccaattcagagcttggggcaatcaacctctggtcttaaccgaagcttcaacggaactccacttgtcacaaccgatcatttcttcgtacctagcaccgtaggttactacgtgggcagagacggcggatatgtgcaagatgaacacaaacaagatttgatttgtttgtccaatactcaaaccaatgaatcggttaagcccaatggagttctaggccaaatcttatttgatgtttatattccgaagaatgttgaggattgggatataaagctatcagaaaccgggcggtctaggcggagaccggggaagagatttatacgtagatcgagattgtaacatctgagttatatattatatataccatgagtacccatttgtattcctcagatactgttgcagaggtatccatttggtttccctcgcaaagattaataaattaataaaataagatcttttttgcagacaagacaatgtgttttcttggctgctgtataaatcaagttcttgttaatacccgcgacttggactgcatttacattgag

SEQ ID NO: 12689 - DNA, 553 bp, Arabidopsis thaliana
tgtctcgtatgttgatgactcttctttattcttgcagaacatactctttacaaacttggacacacctttaggatatgatgcaaggaccacagagctattggaacctggcctctgagcccaagctcttaccgcaatgtgcccgtcgacggtgaacttgacagcattgctaacaagattgttcagaatctgcttcagtctgccactatcccctcgtacattcgagaatttgaaaaccgagccatcgtgcggatccaaaactacatcaacccctttcttcatcgcaacgggatggtaaaaatcgatgacgtcttcaagaagtttcgacaagttgaaatcttcttccactaactgcatcttcccgctttcgattttgctcatgtccaaaacagagttgagcagagctgtaattttaacaacatgaggaagaattttctgttagagagaaagtgaagaaaacgcataagagaaagctaaagaaacagagtcttaccaagcaaatccttggcgcaaacattcacttggttgagagtggtgctacgtcggagccaggttt

SEQ ID NO: 12690 - DNA, 498 bp, Arabidopsis thaliana columbia
atgtattgttcttactaagttgagatacttgcaaacaaaaactctgacaattaatgatgatacggtacaagtattattcttagtcattgtcttcaaagtgtgatgcagactgcagagtatggattgtacatacctagaaaatcatacaattgctgtcgtgcaattgtatgtgcgcgaagaaacgcagcagaaatgtagcaagcagattctagtctttcgacagcaaagtatgtgaccaacttgcgtgggacaactttagaatgaagaaagttgtagtaatttgggaaattgacatgtggttttagacctctccaatcacataaagttgtagaaacctgatcaagcgcctcatccgctgactgcatcaaaatattagcagtaacttcagatattctgccctcatcaagcatctcccagtaagttgcttgcacacctgacacaaccaattttcaaagtgtcaataatctaccaggtaaaatagtatattggagggtacat

SEQ ID NO: 12691 - DNA, 496 bp, Arabidopsis thaliana
cgaccttccctcgcctgcttctctgattctcctcgcttccccatctccctcctctccagaaatctctctcgcactctccgtaatcatcctcctcctttcacatatatcgttgactacacaatatagatacaatcattctccaattgattagtgaattctagaactagggttgttttaaagttcccaaatttctggtttatgattcttgttcaatttgtgttgttgcagatgttcctcaatcacagctttttggtttaacttctcataagcttttgagaagaagtgtaaactgtttaggagttgctgaatctggtaaagcagctcaagctactacacaagatgatcttctcacctgggttaagaatgataagagaagaatgcttcatgttgtttatagtgttggcgatatggaccggacgataaagtacttcactttggctttcctgtgatatggctttgatgttgagtctcttaaagtcacattaagtttaaaaga

SEQ ID NO: 12692 - DNA, 455 bp, Arabidopsis thaliana
tgtggctccccttattgcatcagctccggttatactaatggcggcttcgttctcaaatgcggttttcgagagactaccgattgaggaggaggaagaagaaggtggtggtggcggaggaggaggaggaggagggccaccgcagatgcaacaagctccatcagcatctccgccgtctggagtgaccggtcagggacagttaggaggtaatgtgggtggttatgggttttctggtgatcctcatttgcttggatggggagctggaacaccttcaagaccacctttttaattgaattttaatgtccggaaatttatgtgtctatatcatctagtggagtcgtctttcctttgggatatttggtgtttaatgtgtagtcgatatgcatatgttggtttctcgtggttatttcttttcatctcatatcttcggtagatgttacatcgtagagaaatgcatg

SEQ ID NO: 12693 - DNA, 626 bp, Arabidopsis thaliana
cctagaaggagttcaatatctaatgtacaatacttatgatgttcatttctactcctcttttgcattgctcatgctttttccaaaaattgagctaagtatccagagagatttcgcggctgcggttctgatgcatgattctagcaagaaacaggtcatgagctctggcgaatttgttaccagaaaagttctaggagctgttcctcatgatattggtttgaacgatccttggtttgaacttaatgcttataacttgttcaacacggataggtggaaagacttgaactccaagtttgttcttcaagtttacagagatgtggttgcaactggtgacttaaactttgcgaaagcggtttggccgtcggtttacactgcaatcgcctacttggaccagtttgataaagacggagacgggatgattgaaaacgaagggtttccagatcagacttatgacgcgtggtcttgctcaggagttagtgcttattgcgggggtctttgggtcgcggctcttcaggccggatctgcgttggcccgtgaaattggggacaatggggctgcagtttacttcaacgctaagtatgagaaagctagaagcgtttacgagaagctttggaacggttcttatttca

SEQ ID NO: 12694 - DNA, 1302 bp, Arabidopsis thaliana
cgattttatttgggcctaagccattcgatataaattccattcaaagtcaaatgaaattccaaattgaaacgattttttaaaaattggaatatagaccaccgccagattctatacctataaaactctattttaccaagacctacatatacatcatacaaatatacattacttatccgctacgcaagaagaaactgtaacatacggatttaagtaggatgtttaggtcatccaccgggtatctccccaactgtaattagatccaacaaacgctatcttgtcatcattcattgaaaagctaattaagtcattttctcaaaatcatgcataatgacaaacaaacaaaaaaaattaccaaagcaactatcaaatggtggtaatctagtgatttcggtctatttaatatcataaatggaattttgaagggatttgactgtactatgacacttttagtttctagaattgttaagttcttgtactggttaagaggctaattaaaaaaaaaacagaaaagcatagattaaccaacccaacacctaacattttaacaaattccaaatccaagtgccaattctccaagttacatttgaaaagatcgaatggaaaaaatgtttatataatgttgcatcccatttgggcttctcttcaaacatctctcaacaacaacaacaaaacaaaacttgcacaatggtgaactttgttgaggtacaaaaaccattgttgtacggtctgatgaaaatggctggcgtcgttccttacgcgttagagatcgaaccagggacgaagatcaacttttgggtccctaaggaaaccctaaagaagaattccggtaccggaaaaccaacgaaacccgataaacctaaaaagcctgtcgtcttgttaatccatggtttcgctggcgacaggaatcgtgacgtggcagttccaagtcggtgcattatccaagaaatactcggtctacataccggacctcctctttttcggtggatcctacaccgacaactcggaccggtctccggcgtttcaagccgactgtttggtcaaggggcttcgtatcctcggcgtggataagtttgttcccgtaggtattagctacgggggcatggtggctttcaagatcgctgaagcttacccggacatggttagagcaatcgttgtgtctggttcgattcccacaatgaccgataccattaatgaggcgagcttgaaccggttagggtttagttcttccacggatctcttgttaccgacttctgttacgggacttaaggctctcttcaccattgctgtgcataaacccttgtg

SEQ ID NO: 12695 - DNA, 1152 bp, Arabidopsis thaliana
atacatgtataatatacaagttctgggaaaaaaaataagaaaactatctcgtgtcgcattttttgtttagtagaacatataattttttttatcaagcaacaaatattagctgcccaaacaaaagaaaaaaatatgtcaaaaaaaaaggattattcacatcggctaattaaaaaataaaaattgacttgacgagatttagttatttgtgagataataatttgttaccaaaaattatagtatgccctttttcaatttgtgttaattatatttgtaattttcttcagagaaattacaccatttaaaagaagaagaaaaaacaaatactaatatcattgtaaaatatgtaaacgatgggaaataaatagaaaaagaaaacaaaacagtgcatcgtcgtcagtgggagtatataactaccaccacccactcaccattccggaattatctctgaatcactcataaaccctttcttcttccttgttcaaatccactcactcttggagagagacgactcaaacgcatagtctctcctctgtatttactcgttatcgtcactgtgagagagagagagagagcgcgcgcattcccccaattaaagcctctctgctccaaaccgtgatatactctttacgttgtttgtttttgcctttatccttccctagttgtgtataattttgttcttttcttatggagatggatctcagcaaggttactcttgacattttcacaaagcttgaacagaaatggctctctcactgcgactcctcccggaagactcgtatccttagcatcgacggtggcggtaccactggcattgtcgccgctgcttctattctccacctcgagcaccagatccgccttcaaaccggcgaccctcacgctcacatctctgatttcttcgacattgtcgccggaactggcatcggaggcattctcgccgccctccttgtcgccgacgacggctccggcaggccgatgttcactgccagagacgcggttaagtttgtcgcggagaagaactcggagctcttcgagatcaggtacaccggagttttcaggaggaacaagagatactcggggaagagcatggagagggttttggagacggcgtttaggagagaggacggtaaggtgttgacgatgaaggacacgtgt

SEQ ID NO: 12696 - DNA, 773 bp, Arabidopsis thaliana
tataaagtttaatttgtgtggagtatatcatttttgaacaaataaccataaatagaaaaacaagaaaatactcaattcttaagtcaaaaatagtattaccaaagtcaaaaatagatgtacgcatgtgttcttcgagtatctcaattctttcgaaggtattatatattttatatttatgctaaaattttacagcttctatgatagagagtgacttattatactatataaacgctagaccattgagtgatgcaaatcacaaagcttctttaataacacacatacagattctttcaacagctgccactacctttcgaaatgtaagcatctcctctaatctccatcatttttcagaatgtgttacaaatgaaatataataaaaatgtttaaaccccaacatatgtatgacagggaatttggtaccggcaacggctacagcaacgggaacggctacaccaatggaaacggccacaccaacggaaacggcaattacaacggcaatggccacgttaatggtaacggaaaagctaacggagccaaggtggtaaagatgaaaccaatggacagtgagttgctgagagagcaaggtcacataatggttgattttattgctgattattacaaaaaccttcaagactcgcctcaagatttccatgttctgtcccaagttcaggtttcttaacttctgaactttacactacaatttatgtaatgtaccagtcattatttgtgtgtgtatcatatttagagtgtgtttttatatatacacacatttg

SEQ ID NO: 12697 - DNA, 475 bp, Arabidopsis thaliana columbia
cagtatgcctcttattgaaataagaggctacactaatcttaggagctataatcggaatgtgagtagtatacatagagccaacaacatttggaatacccgaaaccgattcgaaacgttctctaatgtttctaagagattcatcatctggccattgaagatacttaggcattaaaacgtccttaatagctttacatacctcaagaacaagcttgtgacaagttgagattcctaaaccaaacttcttggagacaagacgaagtggctcaccggtggctaatctccatatacaaaccgcgactcgctgacgcactggaatcgcgtttcttaacgcggtgtcttctttagcaaccgctgaattaagctcatcgcagattaactcaaacgttgatttagacattcgaaacgcttttttgaaatcttcttctggataatccaatcggctacactcattccaccaagctctgctccgatcttt

SEQ ID NO: 12698 - DNA, 1246 bp, Arabidopsis thaliana
ttttagctcttgtaatccatacatgaacactatatgccaaagtagggatttcaaatatgagattcgatgactgatgccattgtaacagtgcaagacttgctttaccggcaccagaggagaggagcttaacaagtgcaactattccggtccctcccgagtcctatcctcctgtagccatcccgatgatagaactacctcttccgttggagaaatccctagcaagtggagcaccatcgaatagagaaaactgtgaaccaataattgaagagccggcctcgcccgggcaagagtgcactgaaataaccgagagtgatattgaagatgcttactacaatgaggaccctgacgagatcccaacaataaaactcaacattgaacagtttggaatgactctacgggaacacatggaaagaaacatggagctccaagaaggtgacatgtccaaggctttggttgctttgcatccaacaactacttctattccaactcccaaactaaagaacattagccgtctcaggacagagcaccaagtgtaagctaatatctcctcctatattttatcttccatataaattttggggaaaaaatcgctctccatctggttttagaacatgcgggtcagccagggttatggcatttttatatatttcaccgatcggcccgagctggctctggttgactcgtatgccaccctgcattgaacaaaccagtaggagacaagcaagcaaaacgttttaagataaggtctatggtaaaatgacaaggtaactgataaatgtgtcgtctatttgcaggtacgagctcccagattcacatcgtctccttgatggtgtaagtcaatttttaactctctctatactcgagttgtttcacttgagcaacactgtttaaaagtcctcatttgataaaataacagatggataaaagagaaccagatgatccaagtccttatctcttagctatatggacaccaggtgagaataaaactgcaatgtttcattcatgtgtctacagtatcaaagaaagtacagctagagctaaaaagcatttgaaatagagtcggttaaatatgaaagtttgaatctgtaaatgaaagccggaacgtagcattggtggatgttatatgtaaattagtttttgagattggtctaatgtagttgtttgactgccaggtgaaacagcgaattcggcacaaccgcctgaacagaagtgtggagggaaagcgtctggcaaaatgtgctttgac

SEQ ID NO: 12699 - DNA, 1296 bp, Arabidopsis thaliana
tacccaaatcatagacgaggcctcatcacctagagaatgtacctcaagaagccgggtgtcgagggttttcgggtcaagatctttaggtccctcttgtacagatggaacatcctgtgactttcagaggtacctaaatcgtacgtaaagacaaccaaaacttgacctgctcttgtaacagcaatgcctttgttagatgggatagacctcttttgcttcatacgttcacgttccttcattgtcatacttggcatccacattggaagcctatgtttctcggatacatccttgaaaccatcttcatcttgtccagacaaatctaagtgtcgaatgaactcacgggtggcatagacgtaaagattgtaacctttcagtaccatatcgtttaaacctcgtaactccctctgaacctcgagctctgttggaatctcgcggtaatgatcatcccctgtcctgcaaaaccctagaaatgggtacatttcaaactgccacacaacaacgtagtttccattcttgtcgtcaacccacaaacgacctctcagatcttcggcagcatgaggaaattcatcacaaaatggatcctcatcatccattaccatatgcttgacattctcctctccttcacgccaaatcttaaaatggctacccttaaatgattctagtggtggaagatcgatcctcttctcgctaaatacatctataatatagagtttcattcgagaatctaccaccagaaaccacttacctgagcttcccaggaatcgataccctgaaaagtcactcttcggctcgtaaaccctaccatcttctgggttgtaaatacgacaaccatactcttctgcaatcagcatcagcaatggagatccggcttttggctgcagaatcaaagtcgaacgcagagacttaacaggctcaaaatcaggaatactcgatgttcgtttgagcgtagatctagatccggcttttggcagcaaattcaaagtcgaacacccctgaacagcctcaatatctggaaaactcgatgttcgtttgagcgtagatctctccattatctcgtctgttttttttcttttaatgtcgtctttcgataagattgaggaggcgttaagttgcgcatattgaaatggaagacattatagttaggaaccaccaggcccagtaacagcaagaaattatattttaacgggtctatggcccaatatacgacgtccatcacggatcgtttcgttacaaaattttcatttctggttatcattttgattaatattttggttaaaattttgtttgattggactgggg

SEQ ID NO: 12700 - DNA, 1201 bp, Arabidopsis thaliana
ctagatagaaaatggaggaagccaataagggaggaaaggaactctatctggtccacctttgggggctttgaagtgacgggcggttcgggtggtgagatcataaacagcaaagcaacggcccatcaagtagatggagttgggtttgagaccagggcaagagcttgccacaacacagaaaggatcactctttgaaaggaagatacaaagatctccaatgtcctcggtgtaacacatatttcttgttccctcttctgtttcttcatcctctctaagcaccatcaatatcggatctttgtatcgttgagaagggatgtgagagtacctgcacacgcatataagacccaaattagcattgaccaagatttctgtctacatgttagactcgcacgttaccatttgactaagaaactttggccggaaggtgactccacccaatggtcctccttgaaacaagaattcaacagctcccactcggactgtggcaactcagggagattaagaaacaccaactcattgaacttaggatcgttatcgaagtggagatcccaagagcacaagtaattgcctccaggagcaggcaaataaaacctttgatctctcttcgagtacataagatttgagttttccgagcagatgaaagggatttgtttgttagtccaaccgtggtcacgaccgggcctgcacacactcagttggctacccaagaaattgatagccacgacacagtcttcttcttcattgtcttggtgaggagaagatgacgacattgccacgttccagacagcttctgtttggccatagatcatagtagtaagcagaggcagaggaattatctttgtgtttgatttggaagccatgggagtaaaaaggtcgctgatacatacagaattatgattgcatcggtcagagaaaaatgtccatccatgtgaagctccgaccactctcgagttaacgagcttttcgggaattgttttgtcccggactgtgactaactcttccttggccggatcgaacaagaggatatctccgatgtagctgccgtcttcttcaggcaagtcttcaacaacgctgccaagtgtcaaatacgggctggttgaaaacaagcgaacgctcttgtgtatctgccaattaattatataatgctcagacatcagaacagaaaagtaacgcatactcaaatccttatcttccagatgtcatt

SEQ ID NO: 12701 - DNA, 891 bp, Arabidopsis thaliana
atccgtggcacaacacagcaaccaattataatgatcaatagagcggatgcgcaagacccgatgataagaacaagtctctgtagttgatgccaatgcttatctggaaaattgctgttatgaggcttacgtatctccgaacgagaactgttttgccagagcgagcaaggcgtacatatccgatcacagttcgcgatgcacgaacttgacaagaagaatccgtgagcgcaatccgagccgcaaggtgaacagaccattaactctttccttacacacaaactcgttaggtcaggttcattgagtatacttgcgttgaaagcaaactctttttcattacaaggaccagctctacacatccctggactgcagagctctaacggaggatcgtaagctaatgtggacgaaccattaaccatccaacaatcaagaacaagatcctcttctctaataccacaaacaatgaaatcagacgaagctattgctttaaatccagaaccttttggaatcaaagagaaattagagtttccccaacactcaacctcatgattatcctcacggattccgcagaaatggcgaggacccgcggttagcgagacgaatcgagaatcattcatcggagaattgacaaaagattcatcttctccccaacatttaacctctcgagataaattaagaatagcacaaacggagtttttaccggcggctaagacttggaagttatcagaagttgtgttaaaccctaaattagaagaattgggaccaaaacagagcatcccaccatctctgattccaccacagctaaacccatcaccagaaacaatattgttgaagacgagattactaacaatctgatcatagaagttaggattctccttggcgattaagctgttgttg

SEQ ID NO: 12702 - DNA, 514 bp, Arabidopsis thaliana
caggtgggaggtcgagtcgagaggagtaggataaacaaatcaatagaaaaacttactcttcgaacaagatctaaacataggtgacgttgaatatcacggcgaagatcagtgggtaaactttgcaggagaacctcttcatcgactcctcttgttgcaagccacttatactgctcatatcgcctcacacggcttctcagctcttcaggaagttgacgatgtctcatccgctcctcagtgtctctcttcttcaatctccattcctcaagccgtacagtcagagattgcagatatgtctaacaaacaaaaggcaaaacccaagaaacataagaacaaaagcagatacttttagaacttatcctaacgcaggaatccatacctgcatattcccaatgagatgggcaaagaggacaagaccaaagattgcaatgagaacagcaaatgtggtttcgcccatgaacatggtcgtggacaaattctgtccataagaactagaatatgacaataacaggaaaat

SEQ ID NO: 12703 - DNA, 413 bp, Arabidopsis thaliana
cagccaaggaagttactcctgagatggtatattattatatggatggttacagttttcatatggatggttacagtttggtgttggttttacttaaaagcagtatttttcttgtttcttgtaatgaaattttgcagtttagcaaagaggctggacatcgagttgaggaaactaaactgagagttacttatgttgctccaccacgaccaccatcaccggttcacgaaggatctgaagagggttcttcacccagggcttctgtctcagataatggacatggttctgaattttcggttagtacatgttaacttaagttttagattcagtttctctggtagacataattatatgtagattttcatgtttaaattttagtttgagagatttatcgtggacaacaaggctggacatcagga

SEQ ID NO: 12704 - DNA, 897 bp, Arabidopsis thaliana
catggactcaaagactaataaaaataatgaaagccaaatgattacaaactatagaaacacaagagagtacaataggtagtaaagagaagccttcaaataatggtagcaataagttaacacagatattcagatctcagctttagaccaaatgcataactggtatcacaactctcccgttgtaaataaatcagtaaaagaatcatatggctttgttagtttctctagattgggattgttttttcacttccattgagaaaatggcgaaggtagattaactctagtttttgttgttgtatatgctctgtgtacttttccatctattgtaaactagactctcctacatatccatggagtaagatacaatcaaatctagttacaagctaagttcacatgctcctatcaccttgaattgatttcacattacaagtcaagtgatgaattagattaacttcaatgtgatgaagcaacacagtcctaagtatcactgactaaaacttgcgagattcgtcaccagtcaagaccacactaaagtcaacggaaacaaagagaagccagagataatacctgaaggcgcataagcagatcggcgctatgtttctgcacgaatcgattatccgaaaaagacttcctagcttcttcgacggcggcgagatcctcaggagtaccgagattcggatcgaactcccaaaactgtcttccgacgtgattattggtggttctaagccatggactacctccttccgcgatcttcagtttccacattatcgctctctcgagagggaaaaatatgccgtttgatcggaaaatgagtttgaatcaacgatggattctagagattcagtgaggagaaaatcggaaatttggctattgtatattgtggatgcggattagagtcga

SEQ ID NO: 12705 - DNA, 1696 bp, Arabidopsis thaliana
gttagctcaagtttgtataaagagctttgtttgttaacttgtgtaggagcttggtggaattaatactgccatggaccgacaaaaagctgttttgcatgagcttatgattgttgccaaagatatgctgcgtaatgcggagattgcagttcggtcttttatgatgctacagccaagatttcctcattggaaacaaggaggaggagttgttagtgttggttctcaaccatctcaggggcaaggaactaatccagctccagcttcttctggtcaacaacaagctgttactacaacagttcaagtttctgatttttaccgtgggattccgaagaaaccaacagcttttctactgcagacagttgtaaggtttgagaagtatcttaacgagtgtcgtcaatgggttgaagagctggagcaattgctcgccttggattctgacaagtatagtcgacatgcttctcttttagaatctcttccgaaagtcatgtctaatgttcatgacttctttgttcatgtggctgctaaggtataccgcataatgattctttctactagcattcaatgtggaaaccctttttgaactctgtgtaaccttatattggtttcaatttgttttgttcaggtagagagtattcaccaatatattgaatcaatgagaacatcgtatcttgctgaccagcgccgaagaggagaatgccatgatccgtttcttgaggctgatcgaagggagacagcaaagcaggaagcagctgctaaaagggtccacccaactctgcatcttcctgcttctactacaagtacacaaccctcaacacaggttgctgggttgattgccagctcagctactcctgggggttcaaatcctccacagacatctgttccaacatcaaacccttcttcaggagctggtttttcgtttctcaacacacctgcttctggaccttcgtcttctctctttgctacaccatcttctactgctcctacctcgtctttgtttggaccatccccgactcccacacagacgccactttttgggtcttccccggcttctacatttggttctactcaatctttgtttggccagacaactccatcacttacgtatgccttcacagtttggaggtacatattcattgtctgtttccctaattctcatttgatataggtagagttgatatcaggatttgttcttggcgcaatcttgagttctgctatttgttaatttgttcttgtcataattaagttctgttatatgtgaccccttaggtgctacaccaggatcaggagccagctttggttctatgacagtaagtacctttttcggtttaaaactctcattttcatcagatatattttggtagatcattacgccccaatctaacaattgcattcaatgcgtgcatccttcagttatgtccttggaatattgtctaaacctgaacttcttttttctctcccattgcagaaatcttcaaggccaaaatctcgaactacacgccgttagacatgggatatctcaagtttcatccctcagcctgtcaagtgtcatccctcagcctgcaacatcgcatcgtgtacatggcttgagttcatcgtcttcagttggtgaagtcgacttcggtgcaagttcgaagcagatccgtattctcttatgcaccagtttgtatttgtggcgttatcattgaattgatgattgaat

SEQ ID NO: 12706 - DNA, 448 bp, Arabidopsis thaliana
gaagagtaagtttttctattgatttgtttatcctacaaatggttcaacttttaggttaactactatcttgaatcatgcaggtcccatttttctctcaaatggatgatcagctgcttgatgcgatatgtgagcgcctggtttcttctctgtgtactgaagggacttaccttgtacgtgaaggtgacttgatctcagagatgctcttcatcatcagaggtagactcgagagttccacaaccaatggaggcagaaccggtttcttcaactcgattatacttagacctggagatttctgtggggaagagcttctttcttgggctttgcttccaaaatcaacctttgaatttaccatcttctacaagaacagttagggctttagttgaagtcgaagcattcgctcttcgagctgaagatttgaaatttgttgcaaaatcagtttaggcgggta

SEQ ID NO: 12707 - DNA, 1236 bp, Arabidopsis thaliana
ttctaatcacttcaaattatattttcatgatcacaactaataatacttactaaaataggggaatggtgggatagaaacccaatggatgttttgaagcaagcacaatttacgggagcagcagctaatgtctctgacgcttacacaatcaacggtcaaccaggcgatctttaccgctgctcgcgggctgggacaatccgttttccaattttccccggggagacggtgcaactccgtgtcatcaacgctggtatgaaccaagagctcttcttctcagtcgccaaccaccagttcacagttgtagaaactgattccgcctacacgaaaccattcaccacaaatgtcatcatgatcggtcctggccaaaccactaacgtcctcctcacggcaaaccagagaccaggccgctactacatggcagctcgagcctacaacagcgcaaacgccccgttcgacaacacaaccactactgctatcttacaatacgtcaacgctccaacaagacgtggccgtggtcgtggtcaaatcgctcctgttttcccagtcctccccgggttcaacgacaccgcaaccgcaactgctttcaccaaccgtctccgatactggaaacgagctccagtaccacaacaagtcgacgagaacctctttttcaccgtcggattagggctaatcaactgtgccaacccaaacagtccccgttgccaaggtcctaacgggacccgattcgcagcaagcatgaacaacatgtccttcgtgctaccacgaagtaactccgtcatgcaagcatattaccaaggcaccccaggaatcttcacaacggattttccgcccgttccaccggtgcaattcgattacacaggtaacgttagccgcgggttatggcagcccataaaaggaaccaatgcttacaagcttaagtacaaatctaatgttcagattgtgttacaagatcactagcattgtcacgccatagaatcatcccatgcatctacacgggtaccatttctacgtggtcgggtcaggtttcggtaatttcaacccgagaacagacccggctaggtttaacttatttgacccaccagagaggaacaccattggaacacctccaggtggttgggtggcaattcggttcgtcgctgataatccaggttagatgatcttattgactcgaaagcatttgatactttgtaaccataggttaaatgatcttattgactcaaaaatgaaaaacatattttg

SEQ ID NO: 12708 - DNA, 559 bp, Arabidopsis thaliana
atccacaaaaggatccaaatctttcccggtttttaagtttggcttcataaggcccaattagtggcaaatccatcacagtccactagggtttttgagagactggatataaaatttgattttgttcattgttgtcattcgccgtaatctgaagaagacgaagcaaatcctcccacaaagaatcatccatgggtcgtgttatcagagcacaacgtaagggagctggttccgtcttcaaatcccacactcaccaccgtaaaggtccggccaaattcaggagtctcgatttcgggagagaaatggttatctgaaaggtgttgtgacggagatcattcacgatccaggacgtggtgctccattggctcgtgtagctttccgtcatcctttccgattcaagaagcagaaggagcttttcgttgctgctgaaggtatgtataccggtcagtttctttactgtgggaagaaagctactctcgtcgtcggaaatgttcttcctctcagatctattcctgaaggagctgttatttgtaacgttgaacatcatgttggtgatcgtggtgtt

SEQ ID NO: 12709 - DNA, 409 bp, Arabidopsis thaliana
tcgagatgatgacgacttccattaaggagagggaagttgagcagcttgctacaacttgcatcaccgttcaaggttttctgtacgcattgcaacttgtggtattggtagcagcacctgttatacaggaagggcctcatattgacgagatcgttggttctgattctgatggagaccccaccgttgtcgtaggtcctcgtcagggtgaagcactcaagctcggtaatgccaaggatgtggatgccaaatgcgaggtaaccctaacttgcagtacaacgttaagagatgtgttaacaccattctactgctggtatcggcgataataaatctgtgaatatgttagtatatatgcgtagtgtttgatagcaagtttaattctcggtgacctcgtatctgcgataatgttttgcat

SEQ ID NO: 12710 - DNA, 618 bp, Arabidopsis thaliana
gttcttggtccgttctctaatcgttttcttggggaaactttttttcccccttcaactgccaaacttgttcttggactaggaatttgatgaatctttatttgttgtttgtctagtgaccatgcaagctcaaaaggaagttccttctgatatgcagagctttgaaaagtttatgattcaaagtgtactggctagtcctggagtcacagccaaagaagttactcgtgagatggtactgattcacattgttgatttgatgaataattcacactttggcttttggttccttaaagcatttgtttcgtttttttctgatgagcaactttgcagtttagcaaagaatcagggcatgtagttgaggagactaaactgagagttacttatgtttgctccaccacgaccaacatcactagttcaccaaggactagaagagggtttatatttgagtgtttttgttagacattttctctttacttcattgacgatattcatcaccagtaacactcttagcgatgtctcttgctatggcgtttggagctgcttgcacgagctcgtaatagcggctggtaaactcgattgattctgtacagtaatttgtttgtaaataattatgagaccagt

SEQ ID NO: 12711 - DNA, 843 bp, Arabidopsis thaliana
  unsure (1)..(843): unsure at all n locations
aattaacgaaatgattccattaacatcatcataaactacactaaataaccaatgatacataagcattttctaattaatctgattaagatcatcataatctacaacaaacaatcaacagatctgaaaatgtttataagcctcagaagatttttggataagagaaacaaacctagtagtgtcgctgtcagggttgtgagcgataacaatggcgtaatcaccagaagctctagcgaggacaccacgatcaccgacgtgatgctcgacgttgcagacaacagctccttcaggaatagatctaagagggagaacatttccaacgacgagagtagctttcttaccgcagtacaagaactgaccggtgtacataccttcggcggcgacgaagagctccttttgtttcttgaaacggaaaggatgacggaaagtgacacgagcaagaggagcaccacgaccaggatcgtggatgatctccgtcacgacgcccttgaggtaaccatttctctcgccgaaatcgaggctacggaacttagccggacctttgcggtggtgagtgtgggatttgaagacggaacccgcacccttacgttgagctctgatgacacgacccatggatgctctcgacggcgaagttcagatattagggttntgagatccaacttgagagtgaggaaaatgaaccctttttattctgcaacctcatgtttgttctaaccctaatgggcctaagtggatctttatttgatatgggtcagaagaatctaaatggtgtagtaattgttcaaacccatacaaaagaccgagttaagaatcacaaaggcaggcctaccaaactagactaatccg

SEQ ID NO: 12712 - DNA, 1266 bp, Arabidopsis thaliana
  unsure (1)..(1266): unsure at all n locations
ttataatctcacatcaatatagtcttgatcagtcagccaccataagcgctcgtttgtaacgtcgtaaactcgccgacacacaaacgagctgataccagatggcagttcaacacctcttggaaggaaggcaactttacacggatgcagtaaagatgcagcaggtatattatcctcgtgaaaggagtaaaagagttcgttcgctcagcctctagaaggatgcctttgccaagttttaattcagtgggtcgataaagccaattaacacccaacttcaacttatcttcttcctcagcaatgatcaagcgaattatcccaatgaacggtggacaatcctgtggtggcttaaacagagcacagtcaccaacactaattttgcgcccgtcctgctagtgacagcaaacaccaaacaaaactataagtcgaagagcaaacccaaaaaaaaaaaaaaaaactcattttctcgaatcaagcaatagaatcacaaaatccagacgaaatttcaaaactttgggcaaacccatccaccaaaacagaaggaaacacgaaagaaaaaaaaaacgcctgaggaaatcgaaacgaaatcgaatagaacttaccttagaaaacgaggtagatgaagataaggacaaacaagaagaaccaccaccttccacagtcgcaattacacgagaggaagatatcaacatgtgccgacgacgacttttgtgtctccgctcacaaaccctcccatgcatagccttctatcatcttctccttcgaacaacatcaatatcctcagcaaaatccaacaaatcctcaaaattcctttttccccctgacaatattcgataactttagatccaaaaacttatcggtgaaataaacaacctaatttcgcgacgaaatggatcaaatctctagggcttcgattcccgatccgaagataacaaaacacagatccaaaatcaacaacagcgacaggcngtaatcgaatcagccttgtttcgatccaggaatacgagattttttcttcgagaaatcgcgtaagaacctaaacaccaataaatcgaagaagagagagagagagagagacggggcgaaaaaggggaaaggtgacttggacgagttcgggcggatcgggtcgggttagagagaggagttgtggatggaaggggcaaagataacgtgacagtgcggtgacttaaatgaaaaaacaatatgggcgtgacgtcatctccaatctttttcaggtgacatagggactggagagattaagaggtgggtgag

SEQ ID NO: 12713 - DNA, 593 bp, Arabidopsis thaliana
  unsure (1)..(593): unsure at all n locations
gctacttcttcctcttcttgcaattgggtttacgacgtcttcccaagcttcagtggagaagatgtccgcaaaacatttctcagccatcttcagttggtacttgatcgcaaactaatcacgagtttcaaagataatgagatcgagagaagccaatcaatagctccagagcttgtccaagggattaaggattcaaggattgctatcgtgatcttctccaaaaactacgcctcttcaagctggtgtttgaacgagcttttggagattgtgtcttgcaaagaagacaagggtcaactagtgatacctgttttctacgctttggatcctactcatgtcaggaaacagaccggtgattttggaatggcttttgaaaggacttgtctgaacaaaacagaggatgagaaaaatctttggagggtagctttaacacatgtcgctaacattcttggatatcattctgcgcaatggtacgagtcacaacccttgtttttgtttgactagtcttacttgttttttgcattgatctttatctttctggttataggaataatgaagcanaaatgattgaaganatcanatgatgttttgtgtaactg

SEQ ID NO: 12714 - DNA, 695 bp, Arabidopsis thaliana
tgtgaaggtttgattgacacactgttatcatatgaacctcctaatgaaaataccattggcccgaatatggggagttcgcttattctaagaagataagtatgcatgattgtgcttattagcatgaagaggaatattattgcgaagaatgttacatcttcaatgcaacattacgaatatgcgaaatcctttagaacttctagcattgaggataacttttgatgtaacattataatattcaaattcagttattgtataattacgttgcattttggataattatgtaagattttggaagaatatatgattgattaccttgtataataataaagtataattacgctaccaatatatgtataattagtttgaacaatgtctcgatttcttagttgaatactttcggtcatgtaacgttatctctcaacgttatctcttatttttgtagattcttttttcttaaaagcaacaccttggcgttgtggcatagttgtggaagtctagtttgggcgttgcaagcttagtaattattattgtcagtcagtggtagaaagagagatcactttctatatggatactttaatgtagtataatgtataatgttacgaatatattattcagaagaagactgattactattttttctattatttaaaaaatatattatttcttaagatgtgttagtttttcattttatacat

SEQ ID NO: 12715 - DNA, 542 bp, Arabidopsis thaliana
aattgaagaaccaaaacaaaaaccaaatttaaaccgaaaagagaggataaaacttcggaacttaattttgaaaaataaaagatacagtatatttgattaagaaccaagccctaatcaaaaccataacaaattgttccataattaataaaagcaagaacctgttgtgacaagagcggatcggattgcagctggagaccagtgagggtgtgtttgtcttagtaatccaacgattcccgacacagcaggagtcgccattgatgttcccgacatgaacttatacacaccagatactgcagaaagaacattaacacccggtgctgctatgtctggctgtattattacacaacaaagtcccaaatttcattaacacttggatcaatgtgttaaaaaaaaaaaataaaaaaaaataggaaaataataataaatactaaacaaaccttaagaattgctggtgaaactgaattaggtcctctacaagagaaacgaggcactctagaagcaataggtcggccaatgagtgtcttggaagggcttagttttgc

SEQ ID NO: 12716 - DNA, 959 bp, Arabidopsis thaliana
acgcgattttgtattctccaagattttttatgcgattacaaagcaagtaatagcgattttgtattatgattattgtagtatttatagaatttgttttgttctgtttggttatatcaaataatttgttctgtcatgagagtgcgagatctttatatacagttttgatgaagttaatagcaatgataaagattcgaagcgcctctctttattttctttcttcagttaaattaaaagttgtagatttgttttactaaatttaaaggaatgtattttcttgaataacagggagaatccaaagtaagacacatatcattcacttggtacaataaatacttttgaagaaaattgatatgttttgataattaacatagcttgtccctttggttcatctttggatttgtttgtcgtttacttatctatcaatagtacattaatttcataacatataagtttcatgcattggctgccatgtagttgtagttacgaggaacatcttcagaatctcttagaacaattcaagtcttttgtcacatgaaaccaattggaaaaatcaaactaattaagtctcatcataaaacaaagaaaaaaaagaagaagataacctcgcatgcaacacaaacccttaaaacctccaaagccactatataagacccctaaacaacttctcttcaaccaaaaactcaaagatactctcactagattcaaactaaaatggtgatcggttctcgtgctttgattggtctaacaatgatccttgtgatctcaggaacactaccagttccagggcaaggaacgtgccaaggagacatcgaaggtctgatgaaagaatgcgccgtctacgtgcagcgtccaggcccaaaggtaaacccgtccgaagcgtgctgcagagtggttaagagatcagacatcccttgcgcatgtggccgtatcacagcttcggtgcaacaaatgatagacag

SEQ ID NO: 12717 - DNA, 1946 bp, Arabidopsis thaliana
taccgtgcaaggaagaactaccaccatcaaagaatatcataacatcgtcggcgaacatcaaatgagagatggagagatcagaagctttcgggtggtagcgaatgtaacctgagtcaaaccgagaattgagcaactttgagaagacttccattgcaagaacgaaaaggtagggagaaagagggtcaccctgtcgcagccctttagcactcttgaaaaaaccaccacaacaaccatttacagagacagtgaaagttggtgtggaaatgcattggtgaatccaattaatgaacttagtagggaccccaagagcaagcaaagctgcaatgataaattcccaacgcaccgaatcaaaagcttttcgaagatctacctttaacatacctctcagaaagatgttcctccaattgtatccgtgaaccatctcagtggcaagcaagacattctcagcgaggagccttccagggagaaaagctgattgagaaggagagataacacaagagagcagcttctgaagacgatctgtgagaagcctagcaatgactttgtacagggtattcatgcaagagataggtctaaaatctgaagtacaagaggcattaggaaacttgggaatgagaacaatggtagttgcattccattgcttaagcaagttacccgaaataaaaaattctctcacagcagcggtgacctaagcaccaatgcaactccaagctgccttaaagaactcaaccggaaagccatccgggccacaagctttgttactagggagaccaaagaaagcagccttgatatcttcatcagagaacatggcttccaaatcagccacctgagaaccgggacatctgtaagtaagcagcaaattcatgtcatcttgctccaacgaataagggtcgatatcatcactcaagagattttcaaaataaagagcacagtggtcagcgatgccttgttgcgagtcaatttgggtccctgaatcatccactaaagtagtgatagtgttaacagatttcctcgaatcagccattctgtgaaaataacgtgtgttgccatcaccctccgcaaaccaagtcactcaggaacgttgacgaaaaaagctctcttcagcagtggcaaggatctgccatttacgttgagcctctaattcatgagcagcattttccagggagggattatcaagagtaagattttgaaaactcaaaagagtctcatgagcctcctcagttcttttttcaaagtttgaataattcagcctgctaaagtctttgattggtttcttcagagccttaagcttctttgacacccggaacatagacgatcccaccacattagtcgagtaccaaacatcccacaccaaatttaaaaactccgggtttttcaacaaaaagttaaagaacttgaagggccgcttcgctttgatcgggtctaattccagcacaacaccacaagatgcatgatctgaaaaatctggcggaccaaacaaaccaaaagaggatgggaataagttggaccagctctcattgactaagatgcgatcaatcttctttgcaaccggtctagttttacttttattccaccaagtgaaagagctgcctttgtaaacaagatcagacagttcagcatccaacaaacattctctaaagtctcttatcctcctatccacattgagtgaaacatgcctagagtgctcatgaggatgaagaacctggttaaaatctcctagcaagatccaaggtctattaaaagtgaccggagaagctcccaaagcagtgatctctctccataactcttttctcttatcatcttcgttggccgcatataccacagagataacaatccaagtgcgagaattagggagaagaacctcgcaagtgatcatctgcaacgatttggcaacaataacaacctcaacagatgggtcccataacacccatatcttccttaaatct

SEQ ID NO: 12718 - DNA, 621 bp, Arabidopsis thaliana
tcaacacaacaaagactacatctacatactagtgtatgttgatgattttctcatcacaggaagtaattccaaccttatcaatcaatttattaaatgcctggctgatcgcttctctttgaaagatttgggtcagctgagttattttcttggaatagaggccacaagaacaaaagtaggcctacacctgatgcaacgaagatatgttctcgacctactcaccaaaaccaacatgctggacgccaaaccggtgtctactccgatgtccacaactcccaagctgactctaacatctggcactcccattgacaacccgggcgaatatcgacaaatacttggcagcctacagtatctcggattcacacgaccagacattgcctttgcggtcaaccgtctctcacaattcatgcacaaaccaacagatcttcattggcaggctatgaaacgcgttcttcgttatctagctgggacaccatccgctggtatttttcttcgtgccaaaacccctttaacacttcatggttactccgatgcagactgggccggtgacaatgaggattatgtttccacaaatgcatacatcatataccttggcggcaatcccatttcatggacatccaagaa

SEQ ID NO: 12719 - DNA, 826 bp, Arabidopsis thaliana
gagacagacttgttcgaaaagaaacaaaagagaatgcttggggagatagaagttgtccttgcacagtatctctcccaaacatttctccacaatcgatgcacgataactattgatacaatacaacacacgaaagagagacttaacacaacaatcatcataaagtttcgatttttaccatagagaaaatttgaaagtgagaccttgttggctctgcacatcttgaagtgagacgggacctttggcttcttcagactctctccacagtcttcgcattgaaaccaaaccatctttttcgttttccgattatcgaaattgagatctcggggaaaacaatttcaagcagaaatcaaaatcggagaggggtttaagattggtaccagctagggttttaaaagccttccagaagaactaattcaatgtagagtttgtttattcaagtatcagacaacgcgctgttttggaacgctaaaaacgacaaggtttcttagtttttagaaatgagacggcatgatgtttgtagagctggtattgcaattagcaatgcatccaggggaattcaaggcatttaattttggtataaaccgaaccaaatcgagtaaaccagaattcaaacagaaaactatagaattcaaaacgaatcagaccccaaaaagctggtttagtttggtatatattcacacaactcgaaaacccaaaaaagctggtttagtttggtacatagatgccaggtataatataggttgaagataccagattagtaattagcctaaccgagaattggaagcctgattaatatatcagagataacaaagccttaccaaatgat

SEQ ID NO: 12720 - DNA, 950 bp, Arabidopsis thaliana
tctctaatcaaaaacagtttatgtacatcccagttcagtacgtggagaacttataatccaattatctctttgatacttttactaccaatatacaccaaagttttaactctaaaaggaaggtattaaagactgaaaagcatacctctcctaagaagtaacccatgctatctgttgacgtgtcatgcatctgagatgcaaacactccattagcttcctcatatgatggaggtggcggcatactgtctgcgcttgagggagtagagggagcttctatacgttgcctctcagataccatctgtaggttcaagaatgttccattttgtccttagttgactcatataatgatgaactgattgttcgacaagaatactattatcacaggaaactgaaagctgtaaaactaatgcacaccaacctctccttcgagctgatcaagtatttggaggactctttgatggtaggcgcgttcagattcaacctgtgatcaggaatgaaaaatacagttgttacatatgggtaagtaaatcaaagttgacctagaaatggatcttgtaaccaatcgcactaccattgaaagaagtcgttcaagagtcaatttctgttgttgatcttcaacggaagctaaagcagaagcagcttctttccccaatattgtcatatttgattttaggtcgtgaagttttgcttcagcagattccagtttcatcaagatgtcaggattaccttgagactctctcgcctttgcttggcgtctggcaacttctgtagcctgtttggattaaagcaggcgcataagtaaagttctatcatgcgaataataaaatgactagttcttggaagaggaaaaaacccatattctactaacggtaattaaatagcttcatggtattatctttcaccgtacctgagcttcagcttcttggcgcattctgtcatagcgttgacaagat

SEQ ID NO: 12721 - DNA, 1569 bp, Arabidopsis thaliana
  unsure (1)..(1569): unsure at all n locations
tcttgaagccacatgtgaggagaaacccacgcaattcttgataccaggcgcgcggagctgtttgagaccatagagcgcctttttgaggtgacacacatggttgggtctgtctggatctatgaatcctggtggttgtgcaacgtaaacatcgtccgtgagcgaccttgcaagaaagcgttgttgatatcaagttgtcttatatcccatgaacggttaaccgcaatgtcaaggaccgtccgaaccgtcgtggatttgacaacgggactgaatgtctctgtgtaatcaacgccttgttgttgattgaagccctttgcaacgaaacgtgctttgtacctatcaatagagccatcaggattatatttaattgtaaaaatccagcgactaccaacaatattttggtgtggttctgacgggactagctcatatgtgccattacgaagaacagcattaaattcttcggacatagcatttctccagtttggatcacgaagagctttagccacagtggatgggatttttgatttggctttgagagaggcggctagggttagctttttgataggtttggttatgttatttttggctcgggttcgcatggagtgttgattttggagtggtgggggtggtgatggcgagggagagggagttggattcggaacagaggaagaagacgatggtgaggttggtggagtgttgttgggctgacttgagtgagatgggctagtggtggacgtaggtgggcttttggaggtggtagtaggtgaatttgggcatgttggaattgtaggtgaatttgggcctgttggaattgtaggtgaatttaggcttgttggacttgtaggtgaatttgcttcatgtgacgttgtgcaagattcacgattggtcgacgatgtcgtgattggtgatgtcggattcaatggcgttgagggcaacgacggtgggtgaggatcccggtcggggttgatgacgacggaagctgtatgagcggtggcgacgggagtggaatggctgcaggttgattattggtgatttgtgggactgtttcttcaaagattgtgatttgatctagtttgggattggcaaacggataggcattctcgacaaactggacgtgtcgggatgtgtagacacggccagtggttctattcaagcagagatacgcactctgtgttagcgaatagccgaggaacacacatggagcagaacgatcatccagcttgtgtgtggtatacggtcggagccacgggaagcagagacaaccaaacacacggagtttcagataattcggagtttttcaaagagccgcttatatggagatgtgccaccaatgacttcgcttggcattctattgatgaggtatatggcagtggtgaatgcatagctccaatacgactttggcatagaggcttggccaaggagggtgaggccagtctcaactatgtgacgatgctttcgttcggatataccgttgtgctcgggcgtgtgtggtggtgttgtaaatgagtgatgccatggtggagagaaagagcgtagggcatgactcgcacccgtgtcgantagagatgatga

SEQ ID NO: 12722 - DNA, 564 bp, Arabidopsis thaliana
ccccaaactcactgatccaagaagattgtatctacatgaatcgaagattacagaattggaatagcggtttctccttctattatactatccgagtctgttattggtttaggtgttctcaagtgccaacttcgatacatagtaatgcaaatcataaacatgttatcacaaacacaacaaaatactcttcttctctgttactcaattctccttttttttcttgattaatctatagttttaaaggagagtcggagattaaagaaagttaccgagacgacgagagcagaggtggcaagagcgaatccggcgattttgacagcgtcggagcatttaccggtgaagtccttaaagtcagactggaaggagcaagtgaggcgagccgaggaagtttcgagcccaaaagatttgccgacgcgttgagtcgatcggaggtgagaacttccgcgagaaggagcggtggcgatctttcgccgactggaggaatgtagcggtggattggagagaggctgccatggccacaaagtctctcttgagttttttttttggtgatccaagctgtgacaaagt

SEQ ID NO: 12723 - DNA, 2478 bp, Arabidopsis thaliana
cctctatacacctcctcaagatggaggcagttgtatgactccaatcttgttatttatttctgtgaaacgttggcgggagagaggcttggtaagagcatcagcgagttggtcgttggtggagatatgagcaacacgtagtatcccagcttgaacattgtctcgtatgaaatgatagtccaaggcaatgtgtttcatacgagaataaaaaactggattggcggagagatatgttgctccgacattatcgcaatagatgacgggagtagtgggcaatggtattccaaattcagtgagaagtgagatgaccatcgaatttcggagcctgcgtttgcaactgcacggtattctgcttcggttgaggatctagcgacgccacgttgttttttggatgaccatgaaatgggatttccgccaaggtatatgatgtatgcgttggtggaaacataatcctcattatcacctgcccaatcagcatctgagaagccatgaagtgttaacgggtttttggcgcgaagaaaaataccattcgatggagtcccggcaaggtaacggagtacgcgtttcatggcctgccaatgtagatcggtcggtttgtgcataaattgtgagagacggttgactgcaaaggcaatgtcaggtcttgtgaatccgaggtactaaaggctgccaagtatttgtcggtatcctccgggattgtcaatgggagtgccagatgttagcgtcagcttcggtgttggcgacattggagtggagactgttttggcgtccaacatctttgttttggtaagtaagtcaagaacataccgacgttgcattaagtgtaatcctgctttcgtccttgtcgcctcgatttcaagaaagtaactcagctggcccaaatcttttaaagagaagcgattagccaaacatgtaataaattgagcgataagattggagttacttcctgtgatgagaaaatcatcaacatacacaagtatgtatatgtagtctttgttatgttggcgtataaacaaggaggtgttagcgacggaattcgtgaagccacatgtgagaaggaacccacgcaattcttggtaccaagcgcgtggagcttgtttgagtccatgtagcgccttcttgaggtgacacacataattgggtctgtctgggtttatgaaaccgggtggttgtgcaacgtaaacatcctcggttagacggccttgcaaaaaggcgttgttgatatcgagttgtcgtatatcccaagagcgactgaccgcaatatcaaggacagtttgaactgtggtggacttaatgacggggctaaatgtgttggagtaatcaagaccgtgttgttgatggaaccccttagctagaaaccgtgctttgtacctgttaatagagccatcaggattatatttgatagtaaaaatccaacgagtaccaacaaagttttggtgtggttttggcgggaccaagtcatatgtgctgttccggagacctgcattaaattcctccgacatcgcatttcgccaatttggatcacggagagcttcggccacagtggttgggattttggatttaccttttggagtggcggcaagggtaagtttttttattggttttgttatgttgtttttggctcgggttctcatggaatgttgattttgtggaggtgggggtggggaatttgatgactgtggtgatggagagggaattggagtcggggaagaggaagaagacgatggggaattcggtggagttttattgggttggtttgagtgtgatgggctggaagtgggctcagatgggctttttgaggtggtaggtgatgtaattgggcctggtggattggaaggtgatgataggccatagtccacgtgagaataatctccatggagcgtcgttgagtctcgattgctcgagaattgtggcgacgatgtcatgaccggtgacgacatggaaggcggcgagagcggagagggtgacggcgccggttgagaaggcggcggctggtgaggatctcttgtagggggtggtaccgacggaagctgtacgaacggcggtgacgggactgttgtggttatggagtggttgtttgattcttcaaggttggtgaatgggtcgagtgtgggtttggtaaatgggtaggtattttcaacaaattggacatgtcgagatgtatagacacggccggtggttcgattcaagcaaagataggcgctttgggtttgtgagtagccgagaaacacacacggagcaggtcgatcatcaagcttgtgtgtagtatacggtcgaagccacgggaaacagaggcacccaaacactcgaagtttgagatagttgggggcttgccaaagagccgcttgtatggagaaatgccgccaatgacatcacttgacattcgattgatgaggtatatggcaatggtgaatgcatagctccagtatgatttcggcatagaggcttgtccaagaagtgtaagaccagtttctactatat

SEQ ID NO: 12724 - DNA, 1048 bp, Arabidopsis thaliana
cacaaaatcctaatttttacctcggttgattaatggatccatagattttgtagtgattctgtctttacacacaatgtatacttcacatgtttctggtgcgtatcttaaaacggtcagtggtactcctgtaccttttgttctcctagaccgaaaatatcgctgttagtgtatataaccgagttaattaagaagaacgtaaaccaaaaccgaactatgtaaatttaccatgtgaatatgtttgaagtaaatgatcccataaccaaactgttaactcctgatttggatatcaatctgacaagtgcttttgcaggatcgtcgtactctagcaatagagtctctaccttacactgaaggttacaatatttcagggagtttaaagtttgtctcttaatttatctagatttataaaccgaaataaaacaaaaccaaccttggtactcctagtactcttgcacattttcaaaaagggaacaaagactgtttcatattcttttttcacgtctcttacatacatttccaccacactctcctccacttcttccaccggcaatctatctccggctgtaacaacccacattctcgtaaacattaatatcaaaatatctttaaattacaatgataaattaagtatttaaaaagatgtcaaacaaaaattttgataagtcgaattagctaatttactttttaacatacaaaaaacggaacaatttcacctcattaaaatcaaactacgaaaaagtaattacttaatcatttgattatcatacgaacataatttgtaagatttgtgaaacttacttttcacattttcttccttcatgttctatatatttggtgtgaaaaaaaaaaaaaaaaaaactcagtaattattatttcctttcggtcttttggtttttacttcattttatctttatatcatttccattaggtttttaataacaataacaagaaaaatgtgaatgattgagagagacttactcggagtaggaatagaagtaatggtagggatgacgtggatcatcacaaatttatcagccttcggtaaaag

SEQ ID NO: 12725 - DNA, 1019 bp, Arabidopsis thaliana
gtcgatcctaagataatattattcatatttttccaaaattctttcttttattaaaactctacgagaacttgttttaaaaatgatctcataaatagttgaaaactttttcttaaacgtaactaaaaaagagtttaaaaatataagaaaataacaataaagccaaataacacgaggtttctgaaatataccataagcgagaagaacttgtacgactactcaggattttcaacgtgacctggaaaaaaagagaaaagaggtgagtaaaaaattattcagtgagaggatttttttcgcccactataaatatgatacaagatttaacttataaaaaataattaacaattacatagaaaaagacacaacattcatataatttacatcactatgcaaaactataatttcgaaagatttggatgtgttaaggctaacctcccaaaactcactaaaaagtatgttgcttcccaaaatccttttctcgccaatctaggtctcatggtttgttctgtcgaaatgtgttttttgtattttcctacttctctaattggtcccgatcggcccgactttcccgaatgtcgtccaccaccggcctttctcctttccgggtctagttttttcacgtcgtcagaaagcacattaacaactatgatataggagccctctcgcctgatacccactattatcaaaactcattcttgccttagaaaaatctccacatcataattaggttcaatcatctcccctgaactttgtcaccactacaatatatgttaggttgtttgcttatatcgtactattttctttatgaactttaatacattaagcttttatatatttttctttgttttattaattcaattaataataaagagatgttttggatttttcaaatctatgtttttttcgaaacaccaatggatgaaattgtcacaagagagttttggaaatgtctaatttgatggtccatcatgctccaggtgtggtcttgtggtagttccaccaattcttcaattaataagaca

SEQ ID NO: 12726 - DNA, 565 bp, Arabidopsis thaliana
gccccagtgtgtgattccagaacttaatcttcccatcacctacaccaccaccagttgaagcaaactcgcttggaaagcgcaccaagcaagagctctcactgcagctgtatgttcctcaaacctatgcagccattgcctagttgggtttgaggaagcgacagaacgatgatcccaaatgtgtactacattgtcgttaccaccacttgctagtttttttccagattctgaccacttaagaccacaaacctcttctgtgtgacccaagtaagtttcaacaatagatgatctgatcctcacatcattgttgacgatctttccatccattcctccagttgttagaatgtgattgttccatgccaatgatcctactcttgactcgtgaccacctctcagtgttctcacttgacgattggaaacacaatcccaaagctggacttcactgttgtcaagaccaattgccagatcaagaccatcttgcgtccagttaatacttgtgacaggtccctcctcttcatcaatggtcacaagcttatatgtagaaccactagacgcttaagaagctagg

SEQ ID NO: 12727 - DNA, 719 bp, Arabidopsis thaliana
cccttccaagcaagtttgcttgcaactggtggtggtgttggagatgggaagattaacttctggaatacacacactggggcttgcttgaattcagtagaaactggctctcaagtatgttcattgttatggagcaaaagtgaaagagagttgcttagcgcacatgggtttacgcagaaccagcttacactttggaagtacccatctatggtgaaaatggctgaactcaatggtcatacatcaagagttctttttatggcacagagtccggatggttgtaccgtggcttcagcagcaggtgacgagactctcaggctttggaatgtttttggagaaccacctaagaccaccaagaaagctgcttcaaaaaaatatacggagccatttgctcatgtgaatcatattaggtgaatctactgtgaagactaacaaggagaaaaccattgataggtaaataatgtatagagaagcaatgtattcatcttttttcctgattcattattcatgaattttatatagttaatacaaaaccaattatatatgtaaactgttgagtcaaacacaactaatatagtatatatatttctttatgagatttttatgtaaaactctgtgatgttgatgcttattgaagcttaatttgttgttgaaagaacaactctttccgattcaaagattgaattttccccatcaaaggctctgttttggatttcattgcagaa

SEQ ID NO: 12728 - DNA, 653 bp, Arabidopsis thaliana
tagtaacggaggatccctcgagatttggatcatctaatcgtcttttgatttctcagaatctctctctctcttttagccattttgcatttcgtgtttggtctcgtctcgatctgatttctctaacatcggaatctgtacggagaagatggtggaagatcggacatatttgatgtcaaggattttctcaagttctcgtctttcagaatcaaagtggccatacatgtatccacaaccagaagattcctctgaatctaatctcatcaatggcaaaagagcattggagaatgatgttgatgagctcagacagagcaagtctcccagattgatgggattttcaattcatgggaatgaagccattgaagaagatgaacaagaacaagaccaatctgattctaacaacaatggtaatagcgatggcgattcacttatcaatgatattggcagagacaattctataagctgtttgattcgttgctcgaggtctggttacggttcgattgcttctttaaaccggagttttcggtctttggtgaagatcggagagatttatagactcaggaggcaaaaccagattgttgaacattgggttacttctcttgtcagcttttggaatgggttgctttcaatccttttgaaagaagatggatgaattt

SEQ ID NO: 12729 - DNA, 1902 bp, Arabidopsis thaliana
caagaaaagcctacatgacgcaattggctgtggttatgaatcagaatcgcacccgtattcttgctttcagaaacaaacctaaagctctgctttctagcaatcactctgattctcctcaccaaaaccctaaatccgtaaagcctcgtagatacattcctcagaatagtgagagagtcttggatgcacctggtcttatggatgacttctaccttaacttgttggactggggcagtgctaacgtcttagccattgctttgggagacaccgtttacttgtgggatgcttccagtggctctacgtctgagcttgtgactattgatgaagacaagggacctgtcacaagtattaactggacacaagatggtcttgatctggcagttggtcttgacaacagtgaagtccagctttgggattgtgtttccaatcgtcaagtgagaacattgagaggtggtcacgagtcaagagtaggatcactggcatgggacaatcacattctaacaactggaggaatggatggaaagatcgtcaacaatgatgtgaggatcagatcatctattgttgaaacttacttgggtcacactgaagaggtttgtggtcttaagtggtcagaatctggaaataaacaagcaagtggtggtaacgacaatgtagtacacatatgggatcgttctctcgcttcctcaaaacaaactaggcaatggctgcataggtttgaggaacatacagctgcagtgagagctcttgcgtggtgccctttccaagcaagtttgcttgcaactggtggtggtgtaggagatgggaagattaagttctggaatacacacactggggcttgcttgaattcagtagaaactggctctcaagtttgttcattattatggagccaaagtgaaagagagttgcttagctcacatgggtttacacagaaccagcttacactttggaagtacccatctatgtcgaaaatggctgaactcaatggtcatacatcaagagttctgtttatggcacagagtccgaatggttgtaccgtggcttctgcagcaggtgacgagaatcttaggctttggaatgtttttggagaaccaccaaagaccaccaaaaaagctgcttcaaaaaattatctggagctattttctcatgtgaatagtcttaggtgaaacagagaagactaacaaaaagaaaaccttgtgtgaattggtggtgttgagacggagttgtgtgtttaccgaagatggtgtcttgtttcattcgcatcaggtatagatgtgttgggcaaatccaacatcatccattccaactgcgactagagaagtaggttcttgtttttctttagctttgagattgatgactgcatattttattttctgttgtaggttttagttttcgaaatttgcaagttttggttttctaagctctgcagttttagtgaaatttcaggtttttggtttaagaaatttgcatgttttggttatctaagtggcatgttttggcttgagaaatttcagtttagtttagttttctcttcttaccctaagtttagtttcagtttcaagtttgtttcaggtttctcttcttaccctaagtttagtttcagtttcaagatttgagtttaacttggttaagtttatgttttagtttggtttcaggattgaattcatataaatcaatgttattgtttcaaaaaagtctttcaattagtcggtctaaccttcctaacttggcacacatatgacacttcaatataatgttcaggtttaacgttatcatgtaccctttattgcaatactcaaatcttcaagaatcgggtaaaacgagataagcaactgtatagcttcattattggcgtatatacgtagacaaaactcacttaggatattattttactggggatgtctgcta

SEQ ID NO: 12730 - DNA, 1678 bp, Arabidopsis thaliana
tattatagtacccattaagcccaagttattaacactacaactctagaagcccatctaagcccatgttaataggtcttgtagtaaaagctcttatatattatatgtatatgtaatgtatgtcatgggttaatgtaacaagagtacaaacattcaaccttctataaaacgtaatcgaaatcatttgagtctttggtgacaaacccaaagctttttcacattttcaaacctaaagcttgaaaataagatagctcattggggctttattaggtgcaagaataataaaggaaaatgctttaggtttgtcaccaagaactcaaacgatctacttattgttttaaatcaagtttacgttttaggcccagagaaatttgaagtttacgatggaaggacaaaatacgaaatcgatatatggaaaacagcaacaaagaataaaagagttacaagagattacaagtttccaacaatgattcttttagtattacaatttttcacactttactttcatatcgaagctcttttgtgtgtggttgcggttcaaggttcatggctattaacacggctatggagttcgagcatctcctgatggttggggtcgaccgagagcgctgcacgacagtcccgcaacgcactcgtgacatcaccgatatgctcgtggaaagccgctcgtaagtgaagaagatgaagatctgctttaaaggcgatagctcgggataactctgtgatagcctctctctctttccgactatccatcaacactatcaaaacccacaaaagaataacgaataatcaagtttcggttaagccaattatttttcggagatgatgaacaaaaaaaggagcataagagttgcaagtgaagaaaaacctgcggcgcgatatcggtaaggataaacccggagagggtctaaccgggtgaccatttcaagatcagatttggcgagttcacgatcacaatactcagatcttttctcgtaggcggatcattgttttgagccttttcgattagtctggtcatttcttcgtaggctgcagctttgtcgtttctaaggaaatggacacgagctagaccttggtgtgcacgcgtgtgtcttaccttgagagcgtttatatagcaatccgcagctaaatctagcttctcgcaatcgacatagacactcccgagattgttcagagcctaaaaacaaaaacaaatagcattttcatagactaaataagcacaaaaccaaatcgactcaagccaaaaccaaagtggacatttcacaaaaaccaggcagtaacataattggctaatcctgactaaaccaaaccctatcaacctgaagcatagtttttcttttcactgattaacaaatggatgtactgatggtgaacgaccgtacctgacctttgcgcaacctatcagaggggcatttaagagcatcttcaagaagtgaaacaacagtagaagaactcgatggatcaaggctagattctgctaaggcataagcttggaggaaataagcttcaaatgatctctttattccaatggattccttagccttttgaagcccttcttcgcagtgacctgtatcatacaagatccatccttcgtaaactagacgctcgtggtcacttgaggcatgctcgcgggctaactgtaaactgcgcatcgctgcttctggacaattcaacctgaacg

SEQ ID NO: 12731 - DNA, 1275 bp, Arabidopsis thaliana
ctagagcaagaggatccccggcggtctctggtactccaaaaacattccagaacctcagagtctcatctcctgctgctgaagctacggtacaaccatctggactctgtaagaaatacaacacaaacaacacaagttttaggactaaagacctcaaacatctccaactactttcaacagttaaaaattgatttagttgttttcctttacctgggccatatatagaactcttgatgtatgaccagtgagctcagccattttcaccatggatggatacttccaaagtgtgagctgattctgtgtaaacccatgtgagctaagcaactctctttcattcttgctccataacaacgaacaaacttgggaaccagtgtctactgaattcaagcaagccccagtgtgagtattccagaacttgatcgtcctgtctcctccaccaccaccagttgcaagcaaattcgcttggaaagggcaccacgcaagagccttcacagcagatgtatgttcctcaagcctgtgcagccattgtgtggttgagtttgaggaagcgacagaacgatcccagatgtgtaccacattgtcgttgccaccacttgctagttgttgtccagatcctgaccacttgagcccacaaacttcttgagtgtgacctctgtaagtttccacaatgggtgatctgatcctcacatcattgttgatgatcagtccatccattcctccagtagtaaggatgtgattgttccatgccagtgatcctactcgtgactggtgaccacccttcaatgttctcagctgcaagtatatgataaaacacatgagactaagaacaccggatattatatctcaacataaaagagagagagtagtaattacttgacggttggatgcagaatcccacagctggacttcagagttgttgagtccaactgcaacatgacgaccatcaggagcccagttgatacttgtgacaggtcccttctcctcatcaatggtcacaagctcagatgtagaaccagtggaagcatcccacaagtagacagtgtggtccaacgctatggctaagacatttgcacttccccagtccagcaagttgaggtagaaatcgtcaacaatgtcaggtgcatccaaggtcctctcagaagtctgttaatcacaacagaaagtttagcaacagatcaatacaactcaaaagcagcaaccagtaagtgagctttaaggatcaaacgcattaaatacagtacatacctgaggaatgtatcgacgagggtttacagattt

SEQ ID NO: 12732 - DNA, 882 bp, Arabidopsis thaliana
cagatgccaaacattctcggttttctattcggtgtagctcagatgatactatacatgatgtatcaaggttccacgaaaacggatttgccaacagagaaccaactagcaaataaaaccgatgttaacgaagtcccgatcgtggccgttgaattgcctgatgtgggatcagacaatgttgaaggatcggtgaggccaatgaagtgaagggcaaacatgcatggggaagatgtatgggagacgacatgttatcgtatgttggaataataaactttaatttctatgttttgtcggtttgagtcggtctaaccaaaaccaatgttatattgttttgacttttgatcatcaccaacccttgataaaagataatctagtctacggtatttaagtctatgtcgatgcgtacctaagctaagctccatggaactatcagttaaaatgctttaacagttggaactgaaaaaaataatcaatctaatccaaatggttgtacaatcaacagatggaataaaatatttagatgaattttcattatttatttatttatttatagtggaaccacaggaaaaaaatattataactaattttgcttgaaaaagttgaattataagttttctttaatacattgttggatataatcacattattcttctataatcctatcccatttatgtgatctattttattcatctttttactaatttctcccactttttattttggtcggcactaatttgctctaaggctctaacaacaacaaatctttaccataaccaagttttgatgtcggcacaaaaaaaagactgaatgtgtcataaatggttgcgttgagagttgagacgtgttggtatctgcatgattgtgcagtgagagtctgactcatgc

SEQ ID NO: 12733 - DNA, 808 bp, Arabidopsis thaliana
tgatgcaggtcatggagaacaatttgtgtatgaccggattacaatggtaaagaggctgctgttgcaaaccagtttagtcattcaagaagtgatgagaaacaaaaagatcaagtttaccaaacggtggtggttcaagtataaatttggggaagagggtttcacgagactgaattctttcaatttgcgtatgacttatcattttgcggtttggcattgttggaagagcaagaccatggtgcatgttgaaatgagtggtgatcactggtcttggatggtcttagtcatgaaatctacaacatctagctttttgtcacttctctatgatcgaagaatgggagatccaagcagacatgaaacgggtcgggagattgtgtcacttcagggtcaaattcacactggttctcctatgattcagtgcataaagatgagcttcagcattctccttcttcagggtctgtttcagagtttgacaatgaagatgctcacatatatgcacttgtttggtagcaaaagttgtgtttcaactttgggagtgaggaaattaggcaaagattggtggtttaaatacaagacagatgcaagggctacagatttactgacaaatccgtagaaagagtaactacgaattagacaacagaggatgatgaagttgtcacaagcttggcgattcaaggtttaggacttggtaaaaggaaagctatgattcatgttgatttatgtggaagaggctacatggagttactctataaactggcaaatatgtttccatgaaccttgaggtcaaggttctctgaagaggggagatttg

SEQ ID NO: 12734 - DNA, 1363 bp, Arabidopsis thaliana
ctcaaatgaaaagtgagtagcttattagaagctcagttctgttcttggttctactagaaaatgttaaggcagatactactctttactttccctttccctttttttccaaggagattaaaaaaaatgttggctgtttttcgtcaggtgtgatgtgtacagtttcggggtaatactttgggaactagcaacattgagattaccatggagaggaatgaacccaatgcaagtagttggagcagttgggttccagaatcggcggcttgagatccccaaggaacttgatcctgtggtgggaaggatcatcctggaatgttggcaaacgtaagtgtcatgaaacaaactcaaaacacttttagaatctgcgctggttgaaaatatgtttggttttatgtttgggcagggatccgaatctgcggccgtcatttgctcagctgacggaagtgctgaagcctttgaaccggcttgtacttcctacaccacaatagatgtcatctgtgtgaatatgtgaaagaaaatttggttaatgtatactatttgacctctggtgctgcgcagagttattatacataagccagcctagaattgaggaatgtaaatgaaatcaatgtacactatactacgttttgatgtattatttgttataggaaaagccgctatgctgtgcttattttatcagaaataatgctaataagttaaacgtctgtcaccaatcatagttataatcaaatccaagctccatagagttacttgaatctccaaattaatcctttaacttaattattttgggacgaaattacatatactgcgaaaataataatagagtgtgttggagggagagagggtacgtgcgtgggtgtcgagaggagagtgagtgattaaggtccacgaattggcgcgaattccatgggaagaagaaacctaccgaagtccgaggatgattgtttcctctctcgcgcgaacaacaatgtcactctctctctttctctctgtttttctattctacaaattgctgtttcacctcttttctctctttctccttttccgatctcgatttttcccaatctcatgctttttctggtgactgcatcgttttacttttgttctgggtgaccttatgcctgaggatgtcttcaaattgtggattgattttgaatttttccgaaaaaaatctgtaaccgattgagtttcatccggtttgtctgaatctccggtggtcggtctgtttgtctcgaaaatctacagacttttgtatgtttcttgcgtacaaagtcacgtcatcccactatatactgtggaaaaatgcccaaggattggattccctcacttgtactcttgtaaagaggaagacagctacattggatat

SEQ ID NO: 12735 - DNA, 956 bp, Arabidopsis thaliana
ttgcaattttctatcttgtaacttaaaaaattgggaaaaatgctctttatggtttctttttgccaaagtaatcaatttctttggctcttagagcacctttcatccataattcttaagaaaatttatatattagtgaaaaaaataaaaataaaatatatattgatcacaagaatacatatattaccagctacactatgagtcgcaaagtagtcgttaaacagcgtgttaggactaaatagcgactaaaacaaataaagtaaacaagtaggtttatggaggatcttcacatgcatccacacaaatctaagcgcttgagtttaaagccttattttttaaagagctttgctcactgcacggatgttcaggtaagaaatttttcatgatctttaattgatagctaaaaatgattctagaaatcaaaatttactatctctactcaactaacaatccacaacacaaaatattacattctatctatccacaagagcttatgagtcactaatgatccagatgaactctttagagtcaatggaaaataatagtagatgggcgacacacgctgtgaagaaagacagagggaggaaccaatgataaattaatgtccatctcttatgtaattttttggattaaaaataaaaaatatctcgcctggaatttacctagtttattgatttttagctaatgtagacgacgctccatttgctcttccggcagagatcgtggcacaagcggttgcagagaaccgtttcattttgatgggacggccggtgatgccaaggagacaaaacattcgatcgattgtggcttcaatgccgagaatctggggtcagtcagggctggtccatggacggctaatttcggggaatcaatttcaatttatcttcccatctgaagaatccttggatacggtgatgcggcgaggaccatgggcgttcaatgaccgtatgttgatactc

SEQ ID NO: 12736 - DNA, 872 bp, Arabidopsis thaliana
gataagaacggttgctgcaatttcacgacggtgcaatcggccgtggacgcagtggggaatttcagtcaaagaaggaacgtgatttggataaactccggcatgtactagtatgttgtcgatttagttactacaataacaattaagaaatctatataagtaaatgatatataagtattgcatggcagtgaaaaagtggtgattccgaagactaaaccaaacataacgttgcaaggacaaggcttcgacattacagccattgcgtggaacgacactgcctactcagctaatggcacattttattgtgccacggtccaagtctttggttctcagttcgtcgctaagaacatcagtttcatggtaatttcattaatttatcaattaacatatgtacttaaatagaaactaatcaagggataaaatcaaacatgatatgaaatggttactataaacagaaaccggtaatcaattgtttcgatttagtacagttttgatttcaatttcttataaaactatagctttagtttgaagtatatttttgaaagatgttgctttaatcggtttgatatttcctctctcggcgttttctcggtttggttaccatatggtcgaattagtgttctcgtctttactcggttttctcataatttgtttggtacgctttcctttaatttaaccggataaggttaactagtatcaacaaattaaagataactttaccgtgatatatattgtgatagaacgtggcaccgataccaaagccaggagacgtaggagctcaggcggtggcaataagaatcgccggagatgaatcagcgtttgtgggatgcggtatcttcggagcacaagacactcttcatgacgatagaggtcgt

SEQ ID NO: 12737 - DNA, 492 bp, Arabidopsis thaliana columbia
ccaactggagcttctttcacggctggggcagcagaggaggactctgttttctcggcgcggatggcggttttggtgaaggagagagacttgggacggtggcttgatgagaagaggtggagtttcttgacggcggaagtagtggttgttatggcggggctgaagattccggcggcttgagttgccatagtttcttctgttttctctgaatctttctctgtggagtaaatggatagagatgaaatggcttaatagaatctgacaacgagagggtagatgagaatcgaacattttgggataaggtgatcataccatttggaccaataaggttccaagattcgattctcctcttacccttactagatctttaggccatgtcgttttatgagtttggatatgttcccacatgccacataagactagacaatcaggtcaacgttttaaatagacgataatacagagtcaacgttttgatcaaaaataaaacacaacaaa

SEQ ID NO: 12738 - DNA, 532 bp, Arabidopsis thaliana
agaatcattatgtagtatgtaatagtacgaggagttcagtgatgcagcaacctgttgaagtaaatagacaaaatattagagccaggaagattctacagtactaaacaatgaagaaatgtgaaaattgacatataccgggtcaacttgtatagcttgcatattttccggaccagacccttgaattcggaatagagcaacaccattctcattgtatgtatcatcatcaacttctttctcggctatgtatttcttgtatccactgctaataccaccctgtgaaaaatcaacagatcggttccatcagaaaacaacaacagcagatattgttatatactcatataagagactaagagagcatggatgataaaacaaaactgcataacgaacttatttttctccataccttgaaaacgataaagctttgcataatcacgaagaattgaattggttcctttccttcataaatgcgagcctaagacaagataatgaaaatgttaagaacatagaagaagatgaaatctacagcatagag

SEQ ID NO: 12739 - DNA, 1037 bp, Arabidopsis thaliana
attgtagatctgacctacaagcccaagtttgagattgtccaacctgaagaagctgtaagtatgatgttgtaactaagcacttccccccttaatatagtatttcaagtaatctccattgcaggcgaggatagctgagcgtcactttctcgacttaaggaaaaaatatggatcagttttggcggttgatcttgtcaataaggtgcatatatataacttctgaataattttgttcttgaccctcaattttgtattaaatcatatagtccaaaaagtaaattacttcttctgtgatcagcatggaggtgaagggcgcctaagtgagaggtttgcaggtgctatgcagcacatcactggtgatgatgtaaggtatggctatgccttctcctaacatacttccttactacttgaaggatattattatcagctgactcactcactcactaactcatcctctagatacctgcactttgatttccatcacatctgtggccatattcactttgagcgcttagcaattctgtatgagcagatggaggatttcctcgagaaaaacgggtactactttcctcgtacatgcatctccttgcatataatcttgaattacaaaagagcttactactatacgttgaattacgcaggtactttttgttgaaatgaaaagggtgagaaaatgaaggagcagcttggtattgtgcgaaccaactgcatagattgcttagaccgtactaatgtcacccaggctagtcttagtatacaattcttagacacccccttgtctcttttgtcttttctctttgctcatcctcctgccaaaatgcagagtatgataggccgaaagctgttggaacttcaactcaaaaggattggtgtttttggtgccgaagagaccatacgctcgcatcaaaactttgacgaatgctataagatatgtcggtagtttattctccatgaatatcttagatatgcaattttaaactcgattatatctggtgctgcttatgttttccttcagtgtgggctaatcacggtgatgacat

SEQ ID NO: 12740 - DNA, 569 bp, Arabidopsis thaliana
cttaatctcatcggaaagtagaaattaaaccctagttcattgcattagactagaagaatatagaaggattagaaattggaccttgagaacagaaccgggattgactttgttgaggacgttgcagagaatgaggccgttgcggagggcgagggagaactcgtcttccgacggtttttccgggagtgtctccatcgcgccttggtccatctgtctcagccatgccaccgcttggtatcttctcagagctaacgaaatttgacaattcacataaacccaaaatcaaaaattcaaaatacatgtttctcgagaaacgtattattaataacggaaaacttaacgcggaaataaattgggctcagatattgattcaaagcccaatatctttcctaatgggttttaaaaaaatattgttgttactgttcttatatataatcttatggcaacttatgttgcttaagggaatatttttggctaaaatacactaattgctttagggaatatatacttagataatcttacattttttaagtaaattacttatgattattttattaaataaacaaattttg

SEQ ID NO: 12741 - DNA, 605 bp, Arabidopsis thaliana
cccgtatagtagtacactccttcacgttcttccctggcctcaatcaaagttctcaaaatatagtcttgtaagaaacagagtgtgtcatgttagattgcaatggaatctatctatttaagtaattaggagacaaagatcaaagtgcaataagaatctaggaaaaataagacgtagcgaagtttatgggtagagcttagagggagagtgccacgtttggtggtttgtgaggctgtgcatccgattacgtcacgggtgatggaataatataaattctggataattttcttccttcaacacgagggaagagatcaaggatccaggattatcagaagatctaagtgagtatgggtttgaaggtgttgtagtaatagcaagggcaagttgttttgctgcaatgatggtgacgacatcttctcccaatatagattatagaagttttaattgtttgtagagtatataatagcagtggtcacgaggtatgtaatgacagttatgaagaagaagaaaacaaattaggtcagaatcgtatgctctaataccatgaaacagaattgcatataatataaagtatgtttattcatcgaagaaggttaatatcatagaag

SEQ ID NO: 12742 - DNA, 512 bp, Arabidopsis thaliana
ttggatttgatgcggtttcaacgatggctgaggagacaaagaatccagggagagatattcctattggtcttgttggatcgatggtggttactacggtttgttattgtctcatggcggttacgttgtgtcttatgcagccgtatcaacagattgatccggacgcgccattctcggttgcgttttctgccgttggatgggattgggctaagtacattgtcgcctttggggctcttaaaggtatgccaaagattttggccttcattatttatttgcgtttgcgtttacatttagtatagtctaaaatctatactaatctttgaaatgtttaggtatgacgacggttttgttagttggggccattggtcaagctaggtacatgacacacatagcccgagcccatatgatgcctccatggctagctcaagtcaacgcaaagaccggaacaccaattaacgcgaccgtggtaatgcttgccgcgacacgtctcatagcattcttcacaaaactgaaaa

SEQ ID NO: 12743 - DNA, 592 bp, Arabidopsis thaliana
taaaataatcgtacaatcttttctgttctatcctgtacatttactaatacacactaaaaaacgaagcattgcaacatttataataggctaggaggatgagaacattggttaccacgtaaatactaggctacaggttttgaaaggtaggataaacaacaagaaaaatacaacacaaaaatgctgttaaccttgaacaatagatccccaagcagttcaacagaactttgacggatacgccaattatcattgaaaataccatcctccacagctggaagaagaagaggcagagacctgcaaaaccgatgatactactattaagtacaggatccaatctcctggtacaagaccttaagtcaaacagaattaatttatttaatgaaccacaaacattaaattgcacctactaacaccatcaaaggaactaatcaaatggcttaaaaatctaatcaatctatggatcatgttaagtcaacattagataagctagttaactatgccaaaaaattcagagaagtatatatagagtaaattcatacgttgttgcatggtgctccacagtacatggccacccccagggtgcatcacgaacaga

SEQ ID NO: 12744 - DNA, 1275 bp, Arabidopsis thaliana
tcggtactatatgcaaatccaaatcatatcctttctgctttttagctgagtttctttgtttctgattgtgtaaagttttgatcttttgttagggactcctgagttcatggcacctgaagtttacgaagaagcatataacgaattggttgatatatactcgttcggtatgtgtattttggagatggttacgtttgattacccgtacagtgagtgtactcatcctgctcagatctacaagaaagttatgtcggtgagactctccgattactaaaacactaagataaaaaagcttcatctctttctgtttcaaaaggctaaaagttcggtttcagggcaagaaaccggatgcattgtacaaggtgaaagaccccgaggttaaatgtttcattgagaaatgcttggccaccgtatcgcttagagtctctgctcgtgagttactagatgacccttttctccgtatagacaatggtgagtttgatttaagatcagttgatatggaagattcggtcgggccactctataggcagccgcaccatcttcctgactactacaattacccgtcgaatagtagctctttgaatcgtcagtactcaaatggcaactacccgtcgaatagtagctcattgaatcgtcagtactcaaatggttataatagtcatcacgagtatcagaatggatgggcgtataatccagctgagacagaggagactcacggcatcgagctctttgaatctcgaaacaatgatgatcaagaagaagaaaagaaatctggtaatgttgacataaccatcaaagggaagaggagagatgatggtggcttgttcttgcgtcttaggatcgctgacaaagaaggtaacaatattctctttatcttttccttgtttcataacctatgaagaagagtggaaaaaatgcagttactttcatttgattcatggactggtttgttgcaggacgtgtccgaaacatttacttcccatttgacattgagacggacaccgcattgagcgttgcaacagagatggtagcggaactggatatggacgatcatggagtcacaaaaatagccaacatgattgacggtgagatatcttctcttgtaccctagttggagaccgggacctgaattcgaagaatgtcttgcggctgcggcggcggcaaatgctgcgagcatttgcaacaactgcgtatcaaaccgcacctcaatgggctcggtgatggatttcctgagaaccaatcctggggcaaatgtgatacaatgttgcagaaacgggt

SEQ ID NO: 12745 - DNA, 802 bp, Arabidopsis thaliana
gaggatgacgatcccctcatacggaaatctaaatttataaacacaaacgaacatgttatttatatagtaagacaataactttatctctaacccaaaagaatgaaagaaactagatctgctttgtgtcattttcacataaatgagaagcaaaatcacgaaaccataagagtgtccgaatgaattttgaaagtcaaaataacgtcacacaccattatccaattattcaaaattagccgacaaaaaaactaaacaaatctcaaaaccttgtctataaatacactcaatcctcttcttcaaactcaacatcgtcatctctaacaatggcgccttctccgatcatcttctccgttcttcttctctccatcttctcactctcatcatctgcccaaccatctttccgccccaaagctctccttctcccagtaacaaaagacccatctaccctccagtacacaaccgtcatcaaccaacgcacacctctcgtccccgcttccgtcgtattcgacctcggtggtcgagaattctgggtcgactgtgaccaaggctacgtctccaccacttaccgctctcctcgctgcaactccgctgtctgctcacgcgccggctccatcgcctgcggcacatgcttctctcctccgagacctggctgtagtaacaacacttgcggcgcttttccagataactccatcaccggatgggcaacctcgggcgaatttgctttagacgttgtgtctatccagtccactaacggatccaatccgggtcggttcgttaaaatcgccaatctaatattcagttgcgg

SEQ ID NO: 12746 - DNA, 878 bp, Arabidopsis thaliana
acaggtttgtgcatcagaataatcaagaaccaaccgaaatggccagttagagtaattagcgttttgatcaattgttatgcagaaagcttctaagctctaacttacgcagatgatattacagaatagtgataatagatagaacttatatattgttattacttgttttcaagacccttattagagtaaatgttgttgacataaatagaaagactacactggattcatactgcataggttgtgagctcactaaaacagaccattcttacttataataacttgggtgcaaattagagtcaagtcttgatcttggagcagaatttgaacataggaagagttgttgtctccacccaaaccaactccaacaccacagattcatatgccttaacgccaatagcattgcagaattctctcaaccctgaacccaaaaccatccttgtatatcttttatccatcagtaaggtcactggccactcttctccattcttgtccaatagagttatcttcttccctcctgccctttccatcttgttaacactaataaacttcttcgaaagatactgcaaagaaagggagacaattagcttatatactctgtgcacttcacaaagcatcaataccaaaaacaagggaacaaaacttacaagtctggaactgcggatactggatggtgtgacagttagtgtcagaaatcgggtcctatcttttgtggaagcactctttgattctgcaatggagaaaaggagtagaggcgtttttgtgttgctactctccagtttaaacgtgacagaatctccaggtttaagcccattctcacggcagaaacttctccagccacccctactgtaaaacgatctacgtgaatcctaaacttcagaata

SEQ ID NO: 12747 - DNA, 596 bp, Arabidopsis thaliana
aaatagagtgaaagataggtaccgtgaagataaagttatatctcagctttaacaaagtacccaaaaactctatacgacgccacatcatcttgagatagtccggcgtcatgaacatcttatcgccagcgaaatcaattccgggcgttttcatgaaataacagcgatggggatggacctctgagcaccgagaataggcctcctcgtcgaggcacgccaccacaaggtggcggagtaatggcttagtcccttttccgacatgaaaactgtggagaaacaaatcaaacgtggagttcggctcagaccaagccttgtttaaggtggttattatcaccgtcttatcctccgtcgctgcttccgtcaaaattttccccaattttttcagatcttcttgatgatgctgtccaataattaaaaacaagattcaagaacagataattgtttattttcgtttcgttcctttttaagctactcatacagtggtaaaaggaagagtacttgccaaaatgaaaaacccattaataacaagaaaatttgagcaaataaaactgatttaaagttaaagctaattgtacagcagcacataccaattagttgga

SEQ ID NO: 12748 - DNA, 590 bp, Arabidopsis thaliana
ggagtttataagagatgcattgctgcaacagaggttcctgatatattatcgcattgccacagctccagctatggtggtcattttgcaaccttcaagacagtatccaaagttcttcaagcagttttttggtagcctacaatgtttcgggatgctcagaaattcatatcgtaatgtgatccttgtcagagaaggagaaaaataagcgagcgtaatgagatgccccagaaatttatcctcgaagttgaagtcttcgattgttgggatataaattttatgagacccttcccaccatccaacaagaatctctacatcctattagctgtcgattatgtttccaagtgggtagaggctatagctagtccaaaaaagattcagcagttgtcatgaaacttttcaagtctatcatcttccgtcgttttggagtgccacgcatagtcattagtgacggaggtaagcatttcattaacaagattcttgtaaaattgcttattcagtatggagttaagcatcgagttgctactccctatcaccacaaacgagcggtcaggttgaagttttcacaggcagatcaaagagatcttgagaagcag

SEQ ID NO: 12749 - DNA, 572 bp, Arabidopsis thaliana
caagcacctgcgcctcagaattcagacataatgactatgctccagcagctcattcaaggacaagccacatgagcaatggaaatcgctaagaagctggctgaattaaacaacaaagtcgacggacaaggtgtcgaacttaacagcaagttcgaatcaatgagcactaggatgagatatgtggaaggcatcctcgcttcaccatctgttaacaacaacccatgccagctttcaggcaaagcaatcatgaatccaaaggagtatgccactgcccatgccatcactatcagacatgatcgagagctgccaactcgacatgtccctacctcaaacactgaggacagtgttattctagagggggaggatttttatcaagatgatgttttggctgacaaaacaatcaaagagcccatccttgacagtcatcgcactcgaccacaagctccgctagctactaccttcgttgcaaaaccgacagctgcaaagaccaaagatacagtcttcgtgccaccgccttaaaaactccacttccattccctggtcgatttaagaaagttctggttgcgaaatattga

SEQ ID NO: 12750 - DNA, 621 bp, Arabidopsis thaliana
  unsure (1)..(621): unsure at all n locations
tttgttgaatagtaaacataatctaattgttgttgtatgaattatgtctatccttttttttcattactcccaaaaggaacaatctctattttatatgttatacatggatttaatgtgatatgcggtatattattgtgttccatccatatttttatatccataaggtatacgatatgtggattattattctatactaattataaaataaaggtttgttacttacttagtagaaaggtctaaatcttaaatggtaatatagcataattggaaaactaaaaccagaaaaaagaaagaagctaatacatgaaaaacaaaggttcttaacggttcaagaaaaaagacaacattaaaattgaacttcacatatttggacaagttttgtgtgctgcacttttgcatcggcagcaccttgcattcattgctcgcactcggggctgagccagtaagctccatcgatttgtaccatcctccgtcctcttcataaggctccaccataaaggtgccctgtagcattcttcaacgaaattctcatatgctattcctttgtacaatacagcagtcaaagcatggggattgtntgcttgaagacatttattgaagaaatgataatagatcgagtgt

SEQ ID NO: 12751 - DNA, 867 bp, Arabidopsis thaliana
tgcgaatttactagcatcttgaagcggctctttgagaaagatgacgaaagaacagagtgccaaagcaattcccatcttgatggagaagtaaagtttcctacgatcagaatgtcccagcgcgtacaacttcgccggagcctcgtagagagccctccacgagcaacaccggaacttggagtcacggctatcagcgacgtcgcttgactgccagagaagcttctctgtgttttgctccggtactgatcccattttacctcccattagaaatgattctgacaattctacagaacctgagagattcttgtcgtccttacgaatagaaagatgtttatttatctatttatcaagatttgttttgtactacgcaattaatgcatgccttcgattcatcatctctaaataatcaagtttttttaaaaaatttacaatttggtgcatctacattacaaattttaataattgtccgatttataactttgatgtttttggttgaaatctaatcattaacatattaaccaccaaaagtgtccaaattttttgaaacagatggaatttaaaacgtgagaatttacatttgtggaccagtaatgcataaatggaccggtaaggccgtaatatgattttttgtgactattagttattcagtaaaaaaattaaaaatagaattatattatttcttaatttctgttcaatgtgttaatgtttcttaaactgtagactttacctttttggctcagctacataatattttttcatagttacccgatttagtaagtttttttgttgaatctaaacatcaacataattcattgtgaccagtaaaagtgtcgcagaaataacaacagatatctatggataaacaacctg

SEQ ID NO: 12752 - DNA, 589 bp, Arabidopsis thaliana
tgtttgtgttttccctcaggttgctgttagcccagaaattcacatccaggcaccagtacttgctaaaaattgttagatatgttgttgaagatggcgttgattctttaaaaaatatggtgaaggatggtccgatatttaaggcggctgtgtattccaaggaaaccctaagttgttgccgacttgacacatctcgttatttcatgtagtggtccatgaagaactccatctattaccatttctttacaaaatgtcttgaagccaacaatcctcatgctttgaatgcggtattgtacaaaccaatagcatatgagaattttgctgccgaatgctatagagctagcttatgggcggctgtgtattccaaagaaaccctaagttgttaccgacttgacacatctcgttatttcatgtggttgtccatgacgcactccatctattaccatttctttacaaaatgtcttgaagccaacaattctcatgctttgaatgcggtattgtacaaccaatagcatatgagaattttgctgccgaatggtatagagctagcttatgggcggctgtgtatccacagaaccctaagttgttgcga

SEQ ID NO: 12753 - DNA, 586 bp, Arabidopsis thaliana columbia
cttgttactcgacctcatactcgaccacccagttgtctggcaacagattgtacagtcgagtatctgtgttatactttctgtctgttactcgacctgtcactcgacctcacccagtgctctacaaagagctatgttggtcgagtgttttactgtttctgtttgattttctgttttctgcatgttcacttaggactgctagaacacacaaaaccctgttattgcttggcttgacttagtgacttctgatcacatcttgattgttagcatcacacccattgggattgacaaccttctgtactacaacaacatgatagtgctttaggattaattgattctaaaaacctattatcatcgactatcacaaagaagcagttgctgctacgggtttcctcttgcactccaactccaagtcctcaactccattcatgccctttgaagtaggattaaagagccagctgatttaagaaatttcatccaaaggcctgctgttgatcttggtcgcacgattcttctccagaaatcagatgttattccgctgagtgcctacaaatgtaagtaaattcaaaaaaccgtttatatgtttgca

SEQ ID NO: 12754 - DNA, 613 bp, Arabidopsis thaliana
actataactggtcatataatgtgcattgattataggaagataaatgctgcatgtaggaaagatcaatttcttttatcattcattgatcaaatgcttaaacgcctagccaatcatccatactattgctttcttgatggatatagtggttactttcaaataccaattcacccttaatgatcaagagaaaaccactttcacatgtcctcatggaacttttgcttataagagaatgccatttggtttatgcaatgctcctgcaacatttcagaggtgtatgacctctatattttcagatttaatcgaggagatggtggaggtcttcatggacgatttttcggtctatggcccctctttctcctcatgtttgttgaatcttggcagggtattgaccaggtgcgaagagacgaaccttgttctcaattgggaaaagtgtcatttcatggtgaaggaaggcatagtgttgtgtccaagatatcagaaaagggcatagaggttgacaaaggaaaaattgaagtgatgatgcagttgcagcaccaaaaacggtgaaggacatcagaagtttcattggtcatgctgggttctcggaagatttattaagacttctcaagatagc

SEQ ID NO: 12755 - DNA, 834 bp, Arabidopsis thaliana
aacctagaaggactgaagaaaagaaggagacaaccacccaagttcagaaaccaataagttaaaggaaactgagccaacaagaaagtactagttaataggagggacaggatcacgtttaaattctggtagttatgcatacctgatgattggtacatgtacttttcactctctttcttaggctgtcttgcatggatccaagagtctacaacatcgtttatggcagcagaaaaatcccgactcttgaatgttttcataaccaattgatgaagtttcccacggaaataaccaagaaactgagggtgcacaccatggaacgagtttagacttgtgtccatttcagaatacttgaaatcttgagtctctgagacaacaaggccttgacaagctgaaggcagagctggggttttccccgaagcatggcaatggtttcaggagattttgtgatagaagtaacagggacccagattttatcagatttcctgaagacactgctgtggctcttaatgaaacctttctccaccaatttctggagctccgaaaatgacagaggtccttgttcttgtccagccccatccgtgtagaaccaatcacctatatgcaattgcaaatcatcgactgtacacagacgatccctaggagtgtttacagatgtgtcggtttccaaagtcctgtgaatcttgaccagtggaagctgttgattgggaatgactttctactgatccctcttggaatcctagatgcaggggatggacgagcaggccttgaagggcactctccttactacgaacttttgtcgaggacaggaattggtggacttggtattacaccaaagag

SEQ ID NO: 12756 - DNA, 713 bp, Arabidopsis thaliana
tacctcgtgtattttacatttgtaggtgaaggaatgggcgaaactcataatatcaacgactcaaagaccgggactttcaactcttactctctcagtttgttagtcatcttccattttcaggtaagatagctgttctgtattcatagattttgctgccttcagccttctgcagttactgcatcattagaaaccatagtaagatgttctatgttgtttgttgcagacttgtgtgcctgcaatcttgccgcctctaagagtgatatatccgaagagtgcggttgatgatctgacaggtacgctcaatgaaaaggttttgaagccaaaccacacaaaatatatgtgtttttggggtaaagggacaaaagttttagcggtatggtgtcttgtaggtgtacggaaaactgcagaggaaagcatagcgcaagttactgctgctaatattgcgagatttaaatcagagagagcaaaatcagtcaatcgaagctcgctctcggagctgttggtctctttttttgcaaaggtgattgatttctcatacattctagctttaatttttttcccttaataatatccactaaagtgctcttgatagaaattagtatcttgattttgctgtgtggctgtatctatcagttttcagacataaacgtgaaggcccaagagttcggtgttcgcccgtttactggaaggtgggaaactatgagcagcaacac

SEQ ID NO: 12757 - DNA, 1065 bp, Arabidopsis thaliana
ccctttcctttttttcttgtcttgtgaattaaggagaggaaaattttcttttaatccaaacaaaaaaaatcatttcctaaaaaagtctcttcgtctgttggcaaaaacgacgccgtgtttcataagccaatatctctctatctcctccggcgtccgtcccgggatccttccggcgatcaactcccacctacgcgccacgtaggataggctaacagtcagtgttgaggaacttacacttaaccaaataccttttattccgataaaaaccgcataaagtttgtaattcggttaaaattctatggaaccgaaccaaaatcgtaatttacactttgacttcatacaaacatgctgtaatcaaaattgaaccaaactagccaaagtgagttctgacataaattaagaatatgttttgctaaagaatcatatataaaaaaagaaactgaaaacgaaatcttgattaggttttgctatttgaacaactaaaacaaaaaacagagaataataacaagatcaaaaatcaggctgaacacagtcattgacagctcggtaagttagacccaataatataatagaaaaaccaagaaaatgcataaataaacgaccgactttgagatcaaaatctaagcagattcgacaaaacatgaaagaccaaaaaaaagagaaagcaacaagatggatcgagagagaaagagtctctaacctgtcgccaacgagtttatacatccgagaaatgagatcttcttcttcttctgacatcttcacagcttcccattcgatactactcacctctgcgaaacaaacatacaaaatcagactcaaaccgatcaaaaagatatagagagaaacaaagagaaatcagaccttcggaacaagaagccttggctttgctctgtctccgtcgtcgtttatccattttttccgccttgtctgaacgaaacatcgaactaatctgaagacacgaaacacccagagaaagagagagagaaagagaataaatctctgagaacaagaagaaatgatttcatcacgaggggaagggataatagtagctttttttttgttggg

SEQ ID NO: 12758 - DNA, 936 bp, Arabidopsis thaliana
ctaaaggatatgcaggactattttgtcagcttctggggcgagaactgcccgatgatggagcaggtgatcgcgaatattgctgcgctgcgcgactactgcaaacagcacaatatcccggtttattacaccgcccagccgaaagagcagagcgatgaagatcgggcgctgttgaatgatatgtgggggccgggcctgacccgctcgccggaacagcaaaaggtggtggatcgcctgacgccagatgccgacgacacggtgctggtgaagtggcgctacagcggtgttcatcgttctccgctggagcaaatgctgaaagagagtggacgtaaccagctgattattaccggggtatatgcccacattggctgtatgaccacgcaaccgacgcatttatgcgcgatattaaaccgtttatggtggcggatcgctggccgatttcagccgtgacgagcatttgatgtcgctgaaatatgtggccggacgttctggccgggtggtgatgactgaagaattactgccagcacctatccccgccagcaaagcggcgctgcgtgaggtgatcctgccgttgctggacgagtccgatgaaccgttcgatgacgacaacctgatcgactacggtctggattcggtgcgcatgatggcgctggcggcgcgtggcgcaaagtgcatggtgatatcgactttgtcatgctggcgaaaaacccgaccatcgacgcctggtggaagctactctcccgcgaggtgaaataatggatttcagcggtaaaaatgtctgggtaaccggcgcaggtaaaggtatgcgctacccacggcgctggcgtttgttgaggcgggagcgaaagttacaggttttgatcaagcgttcactcaggagcaatatccctttgcgaccgaagtgatggatgttgccgacgcctttaaagcacactggcg

SEQ ID NO: 12759 - DNA, 546 bp, Arabidopsis thaliana
gtcctggcacattgagctcggctggaacaactgcctccattccgtacaccaatgagaacggggtttctccggtcgagcgcctaggagttgtgcgatatgcccataaaaccggttgaagttcattataccatcctcctttcaaatgacttagacgtttcttaacattgcttagaattgtcttgtttgcggcttcagcatgaccgttcccttgtggatatcgcagagtggaataactaactttgatcctccaatccgagcagaaagcttcgaactcgtgtgagatgaattgtggtccgttgtccgtaactatctcgtatgggacgtcgtgcctacatatgatattcttccaaatgaaggttttatcgctgaatccttgatgtttacatatgctgcggcttcaatccacttcaaaaagtaatcagttaggaccaagagatattgtacacctcgggttgacatatgcaatggtccaatgatatccatctaccacgtcatgaacgggtatggggcagagatcgaagagaatacgtccaaggttgatggatg

SEQ ID NO: 12760 - DNA, 621 bp, Arabidopsis thaliana
  unsure (1)..(621): unsure at all n locations
ttgcacaatctcttcagcccacacttcttgaggccttatgtgataagttctcttctatcatttctcccgcttaccttcgattaattctttagattctttgaagcctgcttcacatgttaacaagcctagagttcctcgaaagcttgtttctcgtgttgttcttgcaggtgatgagaagagtgtcgatcgacacaccagtgagtgtcgatcgacacctgcagctgcccagactggttcagtttacacaccgccttggatggcgcggaggcagcagcaatcctccaccattccacccacatcatgaactccgcaaagtcaagctattgactcaaaacatgcgcttagtgggaggcaacccactggtttgattcttcttttcctttcttttattttcttttattttcccgctttcttcggatttgaatgccactggggacaatgtcgtttaagtttggaggaggttcttactaatattgcttttatttttgattcttattatttttaatttttgggttaattgactcattttcccttaaaaactagaaagaaaacaaaaaccttttgtattgtttagttatgaatcatgatctatattcacattgattantgcatgattgatga

SEQ ID NO: 12761 - DNA, 801 bp, Arabidopsis thaliana
cataaagtgttaattttttgtatctaccttcttttgggttggtccattcaatttcacacagtgtagaccaaagaatctgattaccaaagagttctcaaatgctcgaacatggttataatatgctgcaagcatccccagaagcacctacattaagaagacaaaaaagacgctcagtaattgcaatctgaaaagttttggtaatagccagccaacactctctaaccggtaacttgaaaagaactcacttttgtttccgacttcttcattgtttttatcatgtaacgatcatcgtttgttaaataaaaaaaactcccactttttccaggggatgatagttctcgaagggcatcattcccacagatcgataacatgtaatcagctgggtctactttgaatagcttcctcaagctcctggaaaattaaaccataagcaaaacatgtcaataagtaagacaggatttgtagcaatgtgaaataggtaaaggaatttttttgtctaacctgaaaactagtgggcaataatctttccatttgaattcagtagattgatgtggaggtgtgtacttggttccttcgcgcggaaacctcctccatatcttatcttttggatcgaaagctgaaggcttcagatcaagagatgccgctggagcttgtcttccgacagaatgcctgcggaaataaaatcactaaacatgacaccaaaaacacaagcattgctcgatatgcgcatatatataccaacaaatttcaaattttacctgattcctaactgtagattaagcataagctcgtaattgcgat

SEQ ID NO: 12762 - DNA, 634 bp, Arabidopsis thaliana
tcacataagttgaaactatactattaagttgtcctaagtgttttctagttgtccctatacactactttcaatggatattcaaacaaaatcttcagaaattaatgttacctcagggttttcttcttccctttctttttcctcttcttgagggttttcttccatcccatgagatgacattggttcatcatcatcaatttcctgaaaattcatacacaaccataaaattaatatttttcgttatctcataccaacattataaacttttctcagaatccaattttctaatgcaaatcaatgtatgattgatcacgtataaatccatgcatgcaccaatcaaacaaaccaatactattaagttgtactcattgttttctagttgtccctacacaatactttcaatattcaaacacaatttacagaaataaccatttacctcagattcttcttcttcttccctttatttttcctcttcttgagggttttctccatcccgtgagatggcattggttcatcatcatcaatttcctgaaaattcatacacaaccataaaattaatatttcgctgtactacttgtactagttactcagaacacattatcactttctcagaatcaatttctaatgcaccaatgta

SEQ ID NO: 12763 - DNA, 581 bp, Arabidopsis thaliana
ctttctttcgaagggtgggaagagatgagtgagaacgaagataagatttgtgcagagctgctcaaggaaatgggagcgataggatcatgcggtggatggctacctactttgaaggacggcgtgttgcgtctccgagaagtgaatctaaaccatgaaacggatcggaaacgcatttcgctgcctcctcttgtgactctgcctcattgccaaacacaatatgtcaccaacgtggccatgtctacgtcttcccctgaagaagaggactgtgttgtggctgtcaagttcctgggacctcaactcagcttttgcagacccgctcaaagcaattccgagtggatcaacatcagaatgacagacccctgcttcttctcctcccctgtcatgttgtccaagaaaaatgagatgttgcgcatagctggctctggaggccaactcatcggatcatgggatctcaaaaccatagcaacaaccccaagttgcagatcttgcggtttcaaaccttcccaagctgtccgagacaagacgagaacttctggagtcgtgctcacaagtgacacttggtggagcaataaccacagtga

SEQ ID NO: 12764 - DNA, 491 bp, Arabidopsis thaliana
ccatattttcggtctggccagtcctttctttcggtcatgataactccgtagaagtcaacatcgtcttctccactgtccagcgggatatccctaacaaataataaaaagttataatatacacaaatagtgtaagcatgccgtacttaacaacttaataaagtataaaggaacatacttgttggagcttaacaaataatccttaagtttctgcaatttggccggatcaaccagtgtcataggatcatagattcctcctgaaggcacacaacccttcctcatgcagctcagtccattgtctccgataaatggaaaagtctttgtggtcaaattatcgactggaaattaatgaactcccatttggggccagcttaactgtttctctcctcttagcttttactctcccatgccgcatggtttcctccacatcttcatcagactcatgtagcatgcgattgtcttcagctagtaactggtctatgatatcaaatata

SEQ ID NO: 12765 - DNA, 546 bp, Arabidopsis thaliana
tcccctaaaagaccatcaccaccactggtaaatttctgcactttaacttacagcctataaaatcacttaagtattatttctgcttgaatgcttggtattatttctgcatgaatgcttggtattgtttttgaatcttgtagagcttaagtaacagtactgctaccaccagcaaatctgccaagaagaaatacatcatgttagattacaagaacggaagagaaagagttgcacaaggaagagtatgtacctctaaccgttcagacacagtccaccatatgcccctaggtccaaatgcgagcaaggtatgtgtagaagtttcaaagattaaagatgttgttgtatggagaccaaactctgaaattcaaaccattgccgatgcagtaggtagtattgtggcttgcctagtgataaaatcatgtttgtgtaaacattatatgggttttttttgttaagtactttgacattgaaatgtaatttgggatcttgaattttatataatatgaatttctttctaaattttgaatttatgatatctcaataatatga

SEQ ID NO: 12766 - DNA, 531 bp, Arabidopsis thaliana
tcagagaagagctaaaatcgctagaggaaagagggcgatgtcaagtagatatgagctgattgatgaggatatcgaaactgagtatgtgccagagtcatggcgcaaggagacgaagttgctgaacaaacctgacgaggttacagtggaggagtatatcaggttctttgagatgaatgacttctggggaacgaggtatccgtgctatgagactttagcccagctggggttactggaggacgtacagcatctgttcgagaagtgtcatctggagatactcatgtcttacccttaccatgcctataaggaggagacaatcgagtttctttccaggctgcaagtggagatgtatgagggactcacagactttgagctggataccatgggattaggtttcttgacgttctcagtggatgaacagcggtatcagctttcgatcaagaagttagaagaactgtttggttccctagtggaagggaccaaaccaagatttgacagagaagagcttaaggacttgtgggcactattgggaca

SEQ ID NO: 12767 - DNA, 873 bp, Arabidopsis thaliana
caaacagtactggtctttcttccgccgtccaaaagaaatcgaaaccgccgagaaagttccagacttcgtcgacacattctacaatctcgtcaccgacatatacgagtggggatggggacaatccttccacttctcaccatcaatccccggaaaatctcacaaagacgccacgcgcctccacgaagagatggccgtagatctgatccaagtcaaacctggtcaaaagatcctagacgtcggatgcggtgtcggcggtccgatgcgagcgattgcatctcactcgcgagctaacgtagtcgggattacaataaacgagtatcaggtgaacagagctcgtctccacaataagaaagctggtctcgacgcgctttgcgaggtcgtgtgtggtaacttcctccagatgccgttcgatgacaacagtttcgacggtgcttattccatcgaagccacgtgtcacgcgccgaagctggaagaagtgtacgcagagatctacagggtgttgaaacccggatctatgtatgtgtcgtacgagtgggttacgacggagaaatttaaggcggaggatgacgaacacgtggaggtaatccaagggattgagagaggcgatgcgttaccagggcttagggcttacgtggatatagctgagacggctaaaaaggttgggtttgagatagtgaaggagaaggatctggcgagtccaccggctgagccgtggtggactaggcttaagatgggtaggcttgcttattggaggaatcacattgtggttcagattttgtcagcggttggagttgctcctaaaggaactgttgatgttcatgagatgttgtttaagactgctgattatttgaccagaggaggtgaaaccggaat

SEQ ID NO: 12768 - DNA, 779 bp, Arabidopsis thaliana
ccctcctttcagcgaattttgattcttttaacctattaatcccccaatatgaaaaaattcattcaatataatccatataatgtcctactcgataaaagtgttgaccatccaaatttgccaagttttaatgagaagctcaaaaacagttaaaaacttgcaacacaacatatcagaagctcaaaagaaagtgtccaaagtccaaactctctagtttattatacaatctgcaaagcattattacttcattacacacataaacattgtttaccacttcaacgacaaaccccaaaacacacacaaactttacaaactcttttctatacgaagcatcctcgtatcttacatctaatctaaaatctatcaccaacaccattttattttaatcttacatctttctctgaagagtaatcaaatcaagagtagctccatatttcacattcaaagcttgagcacaccaaccatgtccatcatcaaccgtaggcatcctcacctcaatcacaggaaccactggactcgaagatcccggcatcaacacagctgcgaaaacccgtaaagcatttgatgcatcaatgtccatacacacattgatctctggaacacctttcggtgctggcggaatcccaacgagcttgaaataaccaagaagatgattctcttcaacagtctctccttctccttcgtatataatgatcagagcttccttctggttgtcttgaaccgttgtgaagaagaggtctttccgcgctggaaccattgtgttacgcggaatcacgggtatg

SEQ ID NO: 12769 - DNA, 486 bp, Arabidopsis thaliana columbia
tctggattaattatttaagggcccgtggcattggatgataactcgatttgcatcctattacggggtttcagatgcatacactagattaaggtaatcattgagtgactaagaatggttttagtgtcttaaatttctgtcgcagtaactaaacgatgttttgtgagaacttgcagatatctttcttatgtcatggatgtcgcatcgcctaccaaggactgtcttgatctgatacatgattttctattccctattataatgacaagcaaccacagggctgtattgagtcatcaagaggtgggttagctttgatcatcaaattgttatattttcagtattcaagtagcttacttcaacttttggtcctttggtcagaatcggttacttggggaaattgacgaacaaattcagcagattctcgcttcagcatttgagaattataaatcacttgctgaactgtctttctccgggatgaaagatgtttttgag

SEQ ID NO: 12770 - DNA, 534 bp, Arabidopsis thaliana
tagtaacgtccgccagtgtgctctaaagacagtttctcagcaagctcttgtacgcggaaggatttgtgcatgttcatcggcagaatcgccacctggaacggcgcgatagtcatggccatacgatgcctcgttcgtcgtagttctgctcaatcgccgcagctaccacacgcgttaccccgataccgtagcaacccatcgtcaggatttggttacggccatcttcaccctgtacggaggctttcagtgcttcggagtacttggtacccagctggaagatgtgaccaacttcgataccacgtttgatcagcagcctaccctggccatccgggcttggatcgccagccaccacgttacggatatctgcaacttccggggtagcgacatcgcgatcccagttgatgccgaagtagtgtttaccatcgatgttagcaccagcagcgaaatcactcatcgccgcaacggtacggtcaatcaccaccggaatcggcatgtttcccggcccagtgaaccggaccggctttaacacggcacgaa

SEQ ID NO: 12771 - DNA, 524 bp, Arabidopsis thaliana
cagaaataaaaataagataagaccgagttcataaagataaacacaaaaacataattttaagtcgatgttcaaccgccattccttgcaccttcatcacggagcctacaaaacaaacaaatgtggcatgcaattatcaatagtaatattatattccgtttatacaattactaataacgaaatgtaataataaaagaatatatcaaaacttacatctcatggatctcgttagactcggggaaatcaggatccggaaagacggttgatttcgggcatgcggcgcaaacacgtacgttctttggaccatcaaaataatggtcaatcttccaccatccaagaacagcgacaataactccaccaccatatcgacgataattatgatcaaagtcaagagcttcattcttagtagctagacatttcaaaacacgatttctaaacagataatcaaaaatagtattagaacagtttaatttaggtaattcaaattaaactatcaaagtagaaaccttactcattgtcacttattt

SEQ ID NO: 12772 - DNA, 882 bp, Arabidopsis thaliana
ctggaagtgaggtaaaccaataaaaattggccttaagcccatcattataaaagcccactatagaaatgacccagtgttttagtaaacttttacacacaaatgacacaatctttttagtaatgcacaaaacaaattggaaaaaaaaaaactaaataactaaataaaatatcgttttctaaggtaagccggagttcgtgcgaccacgctgctacccactaccgcaatgcgacaaaccataagcctaaaataaatcaaaatcaaatctttaaaagatacatagattaatatatcagacagttgacgacaataacatatgcatatcggacagcccacaaaatcccacacgaccactcccgactcactactacagacacaatgtgacacctaaggacttaccaaactaccctcattgatgatactaaaagtttatgcaactctatagacgtgctaatccggtttattccgagtttgatcttagaaattaaaactaaacagagacttgtaaactctacaaaattttaaaaaggtaaaggatcactccaatagaatttcccggctaattctttcagaaactatttaagaagagcgaaaaactaatttccagtgatccatcatcaatttaaacaaatcaaattgaaaaaaaaaaatacaataaacaacaaagtgataacattaatacgacgacaaagagattcttaaggggcaaaacatgaacttagaaagaaagaagaagaaaaacgagaacaaggaagaagattctcaatcattcattcagaagctttctctggttttctacagagaatcatatgcatcggagagaagattccagtctcaccacctctggtcaaataatcagcagtcttaaacaacatcttatgaaca

SEQ ID NO: 12773 - DNA, 470 bp, Arabidopsis thaliana
tactgcctataatccctgcaattaacagagcctcggtggattttaaaattccaccaaacactcttccttagctattgtagcttggaacttccaagggttgggaagcaccctaacaattcctagattaaaggaaattcgacgcatctgtatcgtgatatctttataatcatggagaccaaaaatcaagatgacttcattattaaatcttttgaggggatgggttatcacagcatgtttactatacctcctctagggttaagcgggggtttagctctcttctggaaagatggagactgcccacatcatggtttcagtgagggtcaactctttggatccttcttcagatgagtcgattggagaatcccgatggctctagatgcagcgagtaatggtgacttcaacaccgttacccagctgatgctgcagctctaatagagacctcgcttgcagcaaaagtgattataggtttt

SEQ ID NO: 12774 - DNA, 658 bp, Arabidopsis thaliana
cgtgaagctgtaaggactagcttgttcatctgttggtcgtcgtacttatcttgcaatttcggatcaaccaactcacttgtgttacctgtctccatcgccggctttgctgttcattttgttttccatcaatataacgatcaacgagaggaattactaatctaaaataagaaaagagatgaaaccctaaaatatatgaaccaatcaacatttttatcatatttgaattggaaacctatgaaatttaacaatcaactgtcgattactacattaaaataaagtagatttaacaagcaaaactggttatatgacaatataacctgtagtggtaaaaaaagccaatgaggaaaccaccagaaggtttcctttcgtgtctaagaaggcaaacaagtataggtatgactagataatagaattatacccataagagaatgtgtttctgagtgggattaaccggtcttcgaccagttatgatctctagaaggagaatgccgaatgcgtagatgtcggttttctcgtcgatggttccttgcattaaggactctggagctagataaccaaacgttccttcaaccggtataaccgcatggtgagtccatttgttaggcaacatttggccaatccaaaatcagttatctgcacaatagtaatcacatcgaat

SEQ ID NO: 12775 - DNA, 542 bp, Arabidopsis thaliana
  unsure (1)..(542): unsure at all n locations
tagtaacgtccgccagtgtgctttaaagagcagaagaattagcctgaaattaaaaggtctgactccaattgaatatcggaatcagacctatatgcctcgtgtttaactgtccaactttttggggtcagtacaaggtggtgcttcaggatgggcgtttgttcggtagccccatagacattcttaaccgtgcagctcccgttgcgttactggcgattggcatgacgctggtgatcgccaccggtgggattgatctctccgtaggggcggtgatggctatcgccggagccacaacggctgcgatgacggtcgcgggattcagcctgccgattgttttgttaagcgccctgggcaccggcatcctggcgggattgtggaacggcatactggtagcgatcctcaaaattcagccgtttgtcgccactctgatcctgatggtcgccgggcgcggcgatggcgcaactgatcaccgccgggcagatcgtcacgtttaactcgccggatctctcatggttcggcagtggatcgctttagagnnnnnnnnn

SEQ ID NO: 12776 - DNA, 960 bp, Arabidopsis thaliana
cccgttgtatatttagcaaaccaacggaaaccctctgagcgtgttggaaggtttgactttgagaaagaggacggacggtggtgcaaatcgccggagattttttcagagattgaattgtgtgattattttaagcaatgttttatgttcagaggtggatggaacatgggtgagcccaaaacagaacacactcctctgtaatattaacaactgaaactatacaaaaatggagaagattggaacatgtaaccatgcatgatgtactcagagagagatagagagtccttgagtcaaatgtaaccatgtattctcgaaagccttgatgataacgtcatgatactcgctcgaattcaatgaaagataacatgctagaagatcttccagatctttctgttccctcatcttgttctccataatcatctcaaccatggattctctgaaatctttctcaggatccaccgaagacagaactatcgcaaagctctttacaaccccctttttcttcgatacctgggacgttctttcctttttcttctttctcacgatcttcgtgggaatctttatccctgacgaatgagctttcggtttcttcagtttctgctgtgtcatcatctcaaagggtggttcctttgcagtctcaggactcaagtttggtgaaactgaaggatcttcaggcacatcatcaagcttcctcacagagagctcgtccttaatgtcaattgatgaatgcggttcaggatcatgtacaaagttttggtcagaaggagatgatacacgatctaagaagcttccaacggcggaatcggagattgcatttgcagaggatgatgacttagagcgatgatttagagaggaagaggtagagagcttgagccttgaggaaggcttgtaaacggttttacgtttgatttttctcttgaaagaagaagatttgggaggtgaattagaagcttgaggatgatg

SEQ ID NO: 12777 - DNA, 585 bp, Arabidopsis thaliana
tagtaacttccgccagtgtgctttaaagtcctgtgctcgcagtgtgacatgctggtggcgttaccgcgccttgagcatggtcagaaagcggcatgtccccggtgtggcacaacgttaaccgtggcgtgggatgcccctcggcagcgtcccaccgcctatgcgttggctgcactgttcatgctgttgctgtccaacttgtttccttttgtgaatatgaacgttgcaggagttaccagtgaaattacattactggaaattcccggcgtgcttttttctgaggactacgccagcctcggcacctttttcctgttgtttgtgcaactggttcccgcgttttgtctgataaccattctgttactggtgaatcgcgcggaattaccggtccgtttaaaagagcaactggcacgggtgctttttcaactcaaaacctggggaatggcggagattttcctcgcgggtgtgctggtcagtttcgttaaactgatggcttacggcagcattggggtaggcagcagctttctcccctggtgtttattttgtgtcctcaactgcgcgcttttcagtgcgttgatcgcgctggttatg

SEQ ID NO: 12778 - DNA, 1529 bp, Arabidopsis thaliana
aacaatcgattcgttggtcagttccctgaagttcactctcatggccttctttgaagtttcttgatctaagatacaacgaatttgaagaaggcttgccatcagaaatctttgataaagatcttgatgcaagtgtcttgaacgacaatcggtgtgaatcggttatccccggtacaattgggaaatcgaaagcatcggtggggacgttcgcaaacaagaaagtcagtggttgtatcccaaaatcgattggtaatatgaagaacctcaatgagattgtcttcactggaaacaatttaaccggttgtttcccaaacgagattggtttgcttaacaatgtgacggtgtttgatgcaagcaagaacggttttgtcggtagtttaccgtcaaccttgtccggtttagctagcgttgagcagttagatttatcgcataataagctcaccggatttgttgttgacaaattttgcaagttgcctaatttggacagcttcaagttttcttacaattttttcaatggagaagctgagagctgtgttccagggagaaacaatgggaaacaatttgatgataccaacaattgcttgcaaaatagaccgagccaaaagccggctaaacaatgtttgccggtggttagtcgtcctgtggattgtagcaaggacaaatgctctggcggtagcaatggtggctctagcccatcaccaaatccaccaaggacgtccgagccaaagccatcaaaaccagagccggttatgcctaaacctagtgattcatcaaaacccgagacaccaaaaacacctgaacaaccttcacctaaacctcagccaccaaagcatgaatctcctaaaccggaagaaccggaaaacaagcatgagctaccaaaacaaaaggagtctcctaaaccacaaccgtctaaacctgaagattctcctaaaccagaacaaccaaaaccagaggagtcacctaagcctgaacaaccacagatacctgagcctactaaaccggtttcaccaccaaatgaagcacaaggaccaacaccggatgatccatatgatgcatctccggttaaaaatcgtcgttctccgccaccacccaaggtagaggatacacgtgtaccaccaccacaaccaccaatgccttccccatcaccaccatcaccgatttactcaccaccaccaccggttcactcaccgccgcctccggtttattcatcaccaccaccaccacatgtctactctccacctccaccagttgcttctcctccaccgccatcaccaccaccaccagttcactctcctccaccaccaccggttttctctccaccaccaccagttttctctccaccaccaccatcaccagtatactcaccaccgcctccaagccactcaccaccaccaccagtatattctccgcctccaccaactttctcaccaccaccaacacataatacaaaccaaccaccaatgggagctccaacaccgactcaagcaccaacaccatcctctgaaacaacccaagtgccaactccatcatca

SEQ ID NO: 12779 - DNA, 555 bp, Arabidopsis thaliana
tgttgtaggagtaaaggcaataatagaaacgtcctactaaatcaatatcgggcatattgtttgagttaaattactgatatggaatttagaaaatatgtaccaattagaacattttcatcataactctcggtcttaaccccttcaaaatatgctagatccagaaaaacactatccgatacaggatcacatttaatcacatctgtgttgtggttaaagcccattcgatagctcaaactcgatatcttgtacttgccatacgaaggactcaaagtgaaggtatcaatgatcatccaatcaccaacctttagtgacatgtgaaacttgccaatataatgctttctaatggggatctgcatcttagatccctatatcaaaacaaaataaacaaaaacacataacaacatgctaaatgtttcaaagcgaaatatatatagattcatatatttaatcaatagcattctctcatacattttcatcacatataatgacatctaacgtcaatttgtttgcctcatagatgaaggatcttgacacggaaacgccaatttgttttga

SEQ ID NO: 12780 - DNA, 354 bp, Arabidopsis thaliana
catgataccatccgggacttctggtacaggttgtagtaaaagatgtggtacagcttgtagttcagcggtttgtgaagtaaggttgatgtccgcataattccctccctcttcaaaaggttttgtcctcaaaactgaatctcatggatcataagcagacaattcagcaacattaaaagtgtgagaaattcttacctcacttggcagctctaaacgataggcattatcggttatcttttcgaggatcttgaagggaccatcgcctcgtggtgctagcttggatgctctttgtgtaggaaacctctcaggtcgcatatgtagccaaacccaatctcctagtgcaaataacatttcctg

SEQ ID NO: 12781 - DNA, 290 bp, Arabidopsis thaliana
caccaattgccggatgcggaccggttgtaggcctgataagacgcgtcaacgtcgcatcaggcacaaatgtctaatgcctacgactacagcgaaatacaggtccccgcttcgcccgccagcgtctcttcaattcgcgataacgccccaatccacgcgggtttaccactgcttctgacataaccactcagcgccgatacattcggccccatcgaaccatcggctttggcaaatggcgctaactcatccggctgtggcatgtggaatggcacgttgctgcggcgttccccagt

SEQ ID NO: 12782 - DNA, 513 bp, Arabidopsis thaliana
gtaacgtccgccagtgtgctctaaagaaattcctagcgacaacatggcgttggagagcgtacggccaatcaaaaactccatcgacaggtagtaaacctgacgagtttcttgcgacaactgggcacggtttgaacgtaaccagcgctccacgagacgatcgcgcacagcaaataacgttgcgttcagccattcatgtttattggcgacgaccgggtcctttccaatcgtaaacatcagcttgtaagcgatagagtgcttaagagcttctacgctaagcgtgggcgatgaatatgtaaacggagcattcatataggcgtttcctgaaaactatttcaagcgatagtaaagctcacggtacgacttcgccgcgacctgccagctaaaatccattgccatagcctgacgttgcacaaaccgccacagtgaaggacgggaccacagtacaaaagcacgtcgaatagcccgtaacagcgaccaggcattactatcttcaaagacaaacccactggcgac

SEQ ID NO: 12783 - DNA, 476 bp, Arabidopsis thaliana
gtcttcgagatgatctaaacccatatgcatcgtatacagatccgagaagcattcgcctgcctcctcttgttactctgcctcattgtcaaacccaaatcatcaccaacgtggccatgtcatgttcttctcccgaggatgaagactgtgttgttgctgtcaagttcttgggacctcagctcagcttttgcagacccgctcgaagtcactccgattggaccaacatcagaatcgaaaacccctgcttcttctcctcccgtgtcatgttttccaagacatacgacatgtttcgcattcctggatctggaggccacatcatcggaccatgggatctccgcagacacaagcacgatcccgtattgcagagattgcgattccgaaacctccccgagcttcgcaagaccaaacgggagcttttggatttttgctgcatcaccgaacacttagtggagtcacagctggtgaaacattcttggtta

SEQ ID NO: 12784 - DNA, 450 bp, Arabidopsis thaliana
ttgtgtttctttactctgcatgagttctggtaacgatccatcgaaatcggatttggatttacggtttttcttcaaagaattggagcattcgtgggaagcatgcggatggttggccaactcttgtaccgccgcattgtcgtcaatgattccggtggttccaccgccgttaaaagaattgacaagtgttgggttgactgaacatcggagggataaatcgaaatcggagagcataatgtgcccgtcgtctcgaaccagaacgttctctggctttaaatctcggtatacgattccgagcatatgtaagtactctaatgctaataacgcttctgatgcaaagaacctataagccatgaaaacgaacccttaagatgtacttttcctctgtttctacagactctgtttgtatactgaccttgcggcgtcttctgtgcactcttgttgggttgcttc

SEQ ID NO: 12785 - DNA, 565 bp, Arabidopsis thaliana
atgtgaacacataccacgatttcaatttttataaaataatatttatcaatgacactttaatagtaatagtagattttttgttgagctagtagtaaacttcaaacgtttctacatattataaaatcgttaaacacattttactaagtgattatagttgaacgagctgaacctgttgtactaggcttacagatttcgggaattacaaaggaaacatagaaagacttgttattagttaaaataataaagtcagattacaaattccttcgtttatacgaataatacaaagtacccaaaaactaaaatactacattataaatttcatcaacttccgaaatttccagattaccaaacaccttcgacacgaggccatgactcacaagcttcggtttagaatgaccgctcacacgccagcaaacgagtacaaccacaattccccgagtacaaagactccgaaagtgagcttgaaagtccaaagcttgttgattgtgtgctcacaatagagaacttcattgctgcaattcatagaaattatctacttgatcagacattgtgaacatgactatct

SEQ ID NO: 12786 - DNA, 628 bp, Arabidopsis thaliana
tagactatgctgtgtttgagctttcaccgaaatattcacggttagtaaattctgttagtgtatgttctgtagcaattgatcatgcttgtatgtttggtctcagttgtatatttgtgttacagatgcgagctgtttgtatcgagtaatgaagaaagagagaaactggcttcaggactgatagaaccatttgtgaatcatttgagagttattgaatcacaagcttcaaagagagatcaatcctctgttagactggaagtagaacaaagcgagaatggcgaatcttggttcacaagaagaactctcgagaggtctcaaagaacgttttgcatttcccttttacacgaaaatgttggttaccttagctatcttttaacctgtgtaatttttgttttccagatttgttcaatatgttaatagtccagaagtgttggaaagagtcaatacatttgatttggagatgtcacagttggaagcagctcggacattatattctcaaggtgtgtttagtttcttatttgcttgatcaaattctaagcatacaagttacaagtgaccaaacttgataacttttttttctccttttatgtctagatgatggaggcgtagagatgcaacccagtaagtaaat

SEQ ID NO: 12787 - DNA, 2697 bp, Arabidopsis thaliana
tattggaaaagcctttttgaatacttaagagaactttgaaacgtgtacgataataactacaaccataaaatcccccacgaatcgaaccatgtgttgttcgtgtcctaacacacattattaaagatgagcatttgagacattcattcaacaaaagtcgctaacactgggatgccgaaaacaagtttcccctttttttttggtttctcatttgtttgaagagtacaacgctaaacagaacacacaaaataaaatcaagagggaaactaaaccaaaaactaatttaagtttcatgaaaaatggagaaaacaagcacaaccttcaaaagccaataacccttattaatactgatatttggtcaacttcatcagaagaccaatatctcaaactgttccactctcccaccacaacccaacacaaaaccacaagtagatccgaacctgaaccgctttgtcgactctctctctctctcagtacctgtagtgaggaggcttgtatggtccctcaattggaatgctgacgtagtcagattggtcctttgacagctttgtaagcctggctccaagcttgcccaagtgaagtaatgcaaccttctcatccaaatgcttgggaagaacgtacaccttcttctcgtactttccgcttgctttctcgttccagagctcgagctgggcaatcacctggttggtgaaagagcaagacatcacgaaacttgggtgaccagtggcacaaccccaggttcatcagacgaccctcagccaagacaatgattccagccttggtctctgggaacacccacctgtcagtctgtggcttgatggtgatacgcttcacaccagggtaagtctcaagtccaagcatgtcaatctcattgtcaaagtgaccaatgttgcacacaatagcgttgttcttcatcttcctcatgtggtcgaccatgatgatgtctttgttaccggtggtggtgacaaagatatcagcttctgagacaacatcctcaagggtaagaacctgaagtccttccatcaaagcttgaagggcacagatgggatcaatctcagtcacaatgactctagcaccagcagtcttcatggcagcagcacaaccctttccaacatcaccatatccacagataacagcaacctttccagcgatcatgacatcagtggccctcatgagaccatcagggagtgagtgacggcaaccatacaagttgtcgaactgtaaatcaagaacaaatgaatttatcagtaacagcacataagtgtaaacaaaatgttgaatataaaatcaaagaaagcatgagaaatattgacttttcatgcaaattctgtaaccaaggaaggacttttctctactagatcgtaatactttcaacaaccaacaatgaaaagcttgcttctacttagtgattatgttgttgttaagcctatcgcatcaaaaactacagagctaaagacctagcagatttatcatcactagtaaagaaacaaatctgaagatcaataccttgctcttggtgacagagtcgttaacgttaatggcagggaacaaaagagttccattttgctgcatctggtaaagcctcttaacaccagtggtagtttcctcagagacaccaacaagtctctccttcatcttgtggtacttcttaggatcaacttgaagaccttccttgataatagacaacacgatctgaaactcagggttatcagtagaagtaggatcaggaacttgaccagtcttctcaaagatctcctcagctttaacaccctcatgaatcaaaagagtagcgtcaccaccatcatcaacaatcagatcaggaccaccacctggaccccaatctagagcacgctcggtacaccaccagtactcctgaagagtctcacctttccaggcgaaaacagcggcggagtcacgagcgatggctgcggcggcgtggtcttgagtggaaaagatgttgcaggaacaccatctgacttcagcaccgagagcagttagggtttcgatgagtacggcggtttggatggtcatgtgaagagatccggtgattctagcgcctttgaatggctgagaaggtccgaattcggtacgacaagccatgagtccaggcatctcaacttcggcgagctcgagttcgagacgaccgaaatcggcttgagacatgtctttgaccttgtattcacggccacttgaggtcttctcgacgagcaacgccatggttgagctagatctgagatttgaatccgaaaggaggcagagagagagagagagagaagtgtgtgcgaggagaagagaaagggagtgacagagaatatatagatgaggtcaaaatgaaatgaacggttcagattgttttgagggtttggtggatctggtagaagttgtaatcccgtggatgacggaacacgctgcacgagcggtatgacccgtgttgtaagcttgtcgtgggttagatcggacggtgatgtgggagggtggacacgtggctgtgttttatttgtttcagtgaatcgtagatcgtagttattgacttatattgagaaccctaacgggccgtcacagtagcccaagtgaagaatcagttgatatcttttcgatgactattatcaactgttgtttatttacggtatatttctgttgaatcttggtttacaattcaaactacatatttaaaatttgtaacattttttccaagaaaac

SEQ ID NO: 12788 - DNA, 526 bp, Arabidopsis thaliana
tcaccgtgttcttctggtaaacccgagcggtttgtagctggtcagttccgcctctgataaaggagctagctcgacccacatgactctcgatgtcatcaagctgagctccctggtgctctaccagcacggccatgtctagaaacacctggtgaagctccctgagattcttctcaatgtctttaaccgcatcatgcctttcttgaatctcgttaatggtgtctaacacccttcctcttccttgttcttgtattgctttctgcaagaatctctcactctctcctgcaacaaaaacagtatcaatgtcgcaccaccactcatgtaacaacatgtctaagtatccagagatcaattccagctctaacagctaggaactagcacaacataagatatacaaatccattttcatagtctaaacgcaaaatctgaagttactgttcttcacaaccacaacactgtatactaagaagcctggaatcagtgttcggaaaccaattggtcatcatatgtcaacctagatgacgatcta

SEQ ID NO: 12789 - DNA, 599 bp, Arabidopsis thaliana
tgattgttgtttgagtcgagctcggtctcttcgatgaacgttcatatgaccgcctagtgcttgcgccgacttgaactctctcccgcaaaagctgcatgagtaagacctcggtggccacatgcaaccacctccgccgccatactcctcagctgacgcaaacgctctctcttccctaaacggccaaaataaagtcccatccgaagatggcctcgtcaccatcggtctaagcttcatcgacatcaagcattctcctctatccatcatatgtaagatttttctatgcagtagaagaagttaaggtgagtgttttttttgtgtttatttatgtgggagtagtgaagtatgtagatttagacgcacgtagacttatataaagagagacgcatatagatagaggtatgtgtgtgtgtgtgtgtatatgactatatggttaaagcattgaatgtgagaaagcaacgtggagaaccatgagtaaatagggagaggctttgatggggaaagttctcttttactttagttactcgtatgtcttcactctatacatgttaaatgtttagatattaataattagttggtgtgagcttttgatttgataatag

SEQ ID NO: 12790 - DNA, 890 bp, Arabidopsis thaliana
actcctactttaaagtattaaagttgagaatcacaacagatacattccagaaaattaattgtaccagtgatcaataaatataaatcatattgtataaatatgtgggttcacaagtacataagggacaaatgcattctaatttacaaggctaatactatgttattttctattcttacttatatttactcgtaactttgcttatcgaatatctattatatttagattttaagtacttttgcttatcgaatatatgcataaaaatttatatgtgccaatcctatatttacgcatgagtaaggtgtactttttacacttttatcccatttacttaatgacgttacttgtagtcattgtccaatcagtgacgtcatagataattttccttttgtttatcttttaaactgttatgactgagtgaaggaaactattatcttcgtccctatcaaatttttcagcaccgaaaatggcaaacatcggcgtagtgacgacagcgactaacaaccaggtgatcttccgtaactacgtgaatggattccctaaagaatccgacctctacattgcagcaagcaccgttgacttacgtgtacctcccggatccatggcggttctagtgaagaatctctacttatcttgcgatcctcatagccgcactcgcatggggaagcctgatccctcgtctcctgcttccatggctcatgctttcactatcggcaaggtaaaaatattcgaatctctagtgaacgtatttcagtatgattatttcattgtgttgtgtgtgttgtagcgaatctctgggtttggagtggctaaagcaatagattcagggcacctaaattacaaaacaggagatttactttggggaagagttggttgggaagagtatagtgtta

SEQ ID NO: 12791 - DNA, 535 bp, Arabidopsis thaliana
agtaacgtccgccagtgtgctctaaaggagggtatgaatcaggatgtcgctgatgcgacggggatttttgttattcgtgcaacgcaaaacaagcagaatggcaaaatcgccaatatttatcagctgaatgcgaaggacgcatcggcaatgatactcggaacggaattccagcttgaaccttacgacattgtttatgtcactaccgcgccgctggctcgttggaaccgtgtgatttctctgctggtaccgacgatttccggggtgcatgacctgacagagacttcacggtggattcaaacatggcccaactaaaatttaactcaatcctggtggtttgtaccggcaacatttgccgttcgcccattggcgagcgcttgctgcgtaaacgtctgccgggcgtaaaagtcaaatcggcaggtgttcatggtctggtaaaacaccctgcagatgcgacacgggcagatgttgccgtaatcatggcgtatctcttgaaggacatgccggacgtaagctcactgctgagatggcacgaaat

SEQ ID NO: 12792 - DNA, 1080 bp, Arabidopsis thaliana
cccacattctcaaagtatatgtctattccttctgggaaacacctgatagatccaaaaacaccaaaatgatcaaacaaaaattttcttacaaaagcaagccaaactaaacccaatccaaaagttgaaatgaaccgagccaaacaaacttttggtttctacttttggtatacatttctcataaccgagcaaaatcgaaccaaacggaacaactgatacacgtccctagaatttactgacctctttagggcagcactaagatcatgctcttccttgtaattgaaagcttcgtcatacccgaacttagtcttgagaagatcaacctataaagaggggatgacatatcaccctctctggataaaaaaacaaattcaaaatgtgaattgcattactctttaataattgatataaaccttctctttactactggcacttccaacgacatagcatcccgccatcttcgcaaactgtcctacaagttgacctactgcaccagaagcagctgatacaaatacagtctctcctttcttcggagaacatatctcgtaaaacccaacatacgcagtgagacccggaatacctttaaaagaacagaacagaggaaaacagataataggtaataagtaaagtcttcaaaaaaaaaaagtaaaaaaacattccaaatcaagaaatcaccaagagaaagtgtataccaagaagtccagtgtagaaagataatggaacatcagtgtgatgaatcttgaaatgtgaagaaggagttggagtaataacactatactcttcccatccaactcttccccaaagtaaatctcctgttttgtaatttggatgacatgaatctattgctttagccactccaaatccagagattggctacaagaaacacaacacaatgaaatctaagtgaactataaagctaaaagattcgtaatgtatacattcttttatacattgccgatagagtaagcgcgagcgacggaagcaggtgacgaagggtcgggtttttccatgcgaatgcggctgaaaggatcgcaagataagtagagattcttgactagaaccgccatggatccgggaggtaca

SEQ ID NO: 12793 - DNA, 507 bp, Arabidopsis thaliana
cctggtatgaccgcgtatgttgggttttacgagatatgtactccaaagaaaggagatactgtgtttgtgtcggctgcatctggcgcggttggtcagcttgtaggacaatttgctaagttgatgggttgttatgttgttggaagcgctgggagtaaagaaaaggtaggttttacttgaaactctagctttcgtaattggatcttgatttgttgagcttctttaggttgatctcctcaagaacaagtttggattcgatgatgccttcaactacaaggaagaacacaatcttattggtgccctaaaaaggtacaagcaaagatttcttctatccacaaatcaagactaactaatatgaaaagattaattctctcatttttaggtgttccctgaaggcattgacatatactttgagaacgtaggaggcaagatgctggatgcagtgatcttaaacatgagaccacaaggccgtatcgcggcatgtgggatgatccacagtacaatctgaag

SEQ ID NO: 12794 - DNA, 539 bp, Arabidopsis thaliana
tagtaacgtccgccagtgtgctctaaagttacactttcgcagtttggacagcttgatactcaactcgggcaactttttgctgatgcggtcaatgccttgcttaaggaacaaaatctgcaggcaagagatatagttgcgatcggttgtcacggtcaaaccgtctggcatgaaccgacgggcgtggcaccacacactttacagattggcgataacaatcaaattgtggcacgcaccggaattacggttgtcggtgattttcgccgtcgcgatattgccttgggaggacaaggcgcaccgctggtacctgcgttccatcatgcgctgctggctcacccaaccgagcgacgaatggtgctcaatattggcggcatcgccaatctgtcactgctcattcctgggcagccggttgggggctacgataccggtcctggtaacatgctgatggatgcctggatctggcgtcaggccggtaaaccttacgataaagatgccgagtgggcacgggcgggtaaagttattctccactgctgcaaaatatg

SEQ ID NO: 12795 - DNA, 559 bp, Arabidopsis thaliana columbia
agaagtttaggcccatatttttatatggattttagttttgaaaatagcttggttgggctaggctcatgtctaattttaattttattaacttgatgggatgacacggaaaaatagtaagtttttattggtcaacgtaaatgaggtgtattattggaaatgttctgattggctgttgattttaatgaggtgtcaagttattgttaactgaaaaagctgaggtgtcagcacaagagagacttgtagtgtttttatggtgttgatttacaaatatttttttcatttcttgcttttcagatataccaaataatccatgggtatggagacgaatcaacaccagaaggtattctccaaaacaaatgatccaaatttgcaaaaataaaattcgagggaaaaatacccggagtcgtaggaatttgcgagagtgcccaaatttgcgagagtgccaaatctgctaggtagggtgacctagaaaaagggtatgattaattgttcctcagatgcacgcatctggcacaatccttatcacaatttatacctcttttctgtagatttgttgtta

SEQ ID NO: 12796 - DNA, 500 bp, Arabidopsis thaliana
gatagatgttcatcaaaacaggagtgggaatcaagttggaatctcccacatcggaaattcttgagcaatcattctgtttgctattcaatgcttctaacaatgaggcagaatatgaagctctaatcgctggacttaggttggcacaaggagttggagctaaagaattgatcgcttattgtgattcacaactggttgttaaccagttcaatggatattacaaaaccaaagattcaagaatggaagcatatctcaaatttgaactcattcgcatacctcgaggagaaaatacaaccgcggacgcacttgccacgctggcgtcaacgtcagatcctttggtaaaaagagtcactccagtagaatgcatttcagaatagaacattaaggaggaaaaaaggaccctcgtcattacaaggtctcgagctgcggcgcgtgacgttgagtgagcctgagaatagaatacttccataaagtggaggaagtcacaggtcgaccatatttga

SEQ ID NO: 12797 - DNA, 812 bp, Arabidopsis thaliana
catctacacaaaaaaatattgaatcggaaaaaaatggcgaacatctgcatagcgacgacggcaactaacaatcaggtgattctccgtgactacgtgagtggattccctaaacaatccgacctctacattgccacaaccaccattgacttacgtgtacctcccggatccatggcggttctagtcaagaatctctacttatcttgcgatcctcatagccgcactcgcatggggaagcctgatccctcatcccaggcttccatggctcatgctttcactatcggcaaggtaaaatattcgaatctctagtgaaagtttttcagtatgattattttcattgtgttgtgtgtgttgtagccaatctctgggtttggagtggctaaagcaatagattcagggcacccaaattacaaaacaggagatttactttggggaagagttggttgggaagagtatagtgttattactccaactccttcttcacatttcaagattcatcacaccgatgttccattatctttctacactggacttcttggtatacacttagtaaatgaatctttttttttgttttcattactatacttaaaactatgtgttttcctatgttttgttcttataaggtattccgggtctcactgcgtatgttgggttttacgagatatgttctccgaagaaaggagagactgtatttgtatcagctgcatctggcgcagtaggtcaacttgtgggacagtttgcgaagatggcgggatgctatgtcgttggaagcgctacgagtaaagagaaggtctctatcacttgtttaagagtaa

SEQ ID NO: 12798 - DNA, 591 bp, Arabidopsis thaliana
gtaacgtccgccagtgtgctctaaagtggcagatcgagttgtttacggcgatcttcagtaatgcacaggcaaacaataccgctaccgtggcgaatggtcagcgccatctgctcaacagtcatggtttctgccgggaagatcatatcaccttcgttttcacggtcttcatcatcaagcaccattacaccgcgtccttcacgcagcgcaccagtgcattttcaacacgttcgaaaggcgtaccaaaagaggaaagtagcgtctgattcatggtaaaaaaacctcactaaaattatggttaccagaatcagggcagtcttaggagtggcggcatatagccaaaataacgtgagcgggtccatgcccgacagaatcgttactctctcccatccggactctaaccgtcggccccggaattacaccggatctgctgtcctttgagttcgcacccaaagcgctcgcgggctttcaactgagttgatttacgccggtggggaatttcgcccgccctgagaataagcggattcactataacgctaatgattagcggcacgacgcatagcttcacataattctggtttatgacttaccctt

SEQ ID NO: 12799 - DNA, 540 bp, Arabidopsis thaliana
ggaagagaccgagcagagccggcaactttgggaaatcgaatcacgatgaactgaacagaatccgcagctccctcttccccgagcaaatttgtcgaggccgattagatcggggtctcggacgatgaagattcagaagagaacgttcgatgggttgaggaatgcgccagagaacaagaaataagcgttatcaagctctccctagccaaagcagaaaacgagatgaagcttgtaagatcccaaatgcataatgcagtctcctcggccccaaacatcgatcgcattctggaggagtcccacaacactcctttcacacgcaggatctccaacgcaataatctaagatccaggaaagcaaaggatcgaatacttcaatggatccggcgacccgaaaggacatttgaagtcattcataatttctgtggcccgagccaaattcaaacccgtcgaaagagacgctggtctctgtcatctgttcgtcgaacacttgaaaggaccagccctggattggttacaagactcaagggaaatttcgtgaacagtt

SEQ ID NO: 12800 - DNA, 803 bp, Arabidopsis thaliana
tgagataacagagagccatgagcaccatgtggtaatgattgagataattctcttgatcacttatggatgcaagttccttggaacagcagctgcgtctgcttactgccaaacgcagattggagacgcgctttgtttggccttcttgatgtgttgccaaggtatcattgaagtctacactactatcgtgtggaaagacgctcaggtaaaaataaatagacgttgcttaatttgttttttttagttaggttttggttcacaattagaaatatagaaagagtttttcttcctattcacgtaaacttttcttttaacctaaggtaaaagaaaatttgaatttgggttacaggttgttgatacagaatgctttaatctggtgatcatcacgattttgttcgtaactggtatttcccggttcctcgtggtgtacctctacgacccttcaaaacgttacaaaagcaaaagcaaacgaacaatcctcaacacgagacaacataatcttcagctacgtcttctccttggtctctataatgttgaaaacgttccttccatggttaatcttctagaagctacttacccgacacggtttaacccgatctcattctttacgttgcacctcgtcgagcttaaaggccgagctcatgcactccttacaccacaccatcagatgaacaaacttgaccctaacacggcccagtccacacatattgtcaacgcctttcagcgttttgagcaaaagtaccaggtaaaacagctctggtctccggcttgaggggatgtatgggtctaggcctataacctcaggg

SEQ ID NO: 12801 - DNA, 513 bp, Arabidopsis thaliana
tatttcaaatttctaacgaatcagacctaattgtccggaataaatgattggttctgaaaatatcagttgggaaattaaaacccggttcaatttgaaaccggaaacaagactagctacgcctcacacagagtcacaggagaagctcccgcgtctgcaaggaacggataaagtctctctctttctcactctctctctctctctctctctcaaagaagaagaagatgttgacgagtcccagtaacgcacttcacagtagtactccacaattctggccacttcgccggagcaagctttgccgttcccggaatttccctcgttttcactccggcgaacgcagcagcggcggaggaggaaaattgtgctcgctctctcttctctccggaagtggcgccggtaaattcagtgtcagagctctagttaggcctgatgataccgacgacgctgactccgtcggcgatgggtctctggcttttcctaccacgtttctgtcaaaattccattcggaaatagaga

SEQ ID NO: 12802 - DNA, 569 bp, Arabidopsis thaliana
gatctcttatttgagggagtaagcttaaggcaatttgagctatatcattagtttgtaaaccggcgatgttgtgtggagcaaaaaaccaattccggacttctagaacttatgattcccttctctgtcttttagccacgcagtgttgagtatcttctgtggcataggcctggcgcatgttgcaacacaccaagggacttccatagttagacgttgaagaagaggcttcagttttcctctttttggcgcattttggtgttcatcttcagtgctctcttccggatgttgctgattcattggaccatgaacttggtcagggttgtctccaggaacatcgggatggtcttcatttgcgtcattatcatcatcatcatcatcatcgtccgcatgaggaccttggttcccggaagttggacattcggaggcatcatgactcagcattccacaagtggtacaaaaattcttgagtttctcgtattgaaacttcagaacactgacttttctccgaatcggaaaattctctgaaagcgtagtggatcatcaatattacacagaattttgaccatgacata

SEQ ID NO: 12803 - DNA, 525 bp, Arabidopsis thaliana columbia
gttagtaacagcctcccccagacttaaacgacactgtccccagtggcattcaaatccgaagtaaacgagaaaaataaaagaaaaacgtagaataaaagaaaaggaaaaagaaaatcataccttactagtgggttgcatcccactaagcgtttttttttaatcattagcttgactatgtcaggtttcaggcatcaggtggatcagatggaggcaataaatgcttcttagaagtacatcgcatcatccatggtggtgtatgaacacttagcgcgtgagatcgaccatggaagtgaggcacatcagcaggctgggactcacgtatgggtggtatactctctttcctacacaatcatcaaaataagaaagaagcactctacgagaaactcgtggcttgcttaaccgtgaagcaagcttggaaaatttaaacgtcttattgatgaaacatgaggtttaagtggaggagatgagtacctttggcgtttaggaggtggattgagtagtagaggtgcattgcttgacttaaca

SEQ ID NO: 12804 - DNA, 894 bp, Arabidopsis thaliana columbia
tcacattttagtttttgtccctttgatgcaacgttgtatcctctcactcatgtattttgttgtatcggtttctccggtttaatataaccaaacagaatcttgttgcttcactgtgtttcttgactgatcataaagttaatgtttcgttttagaactcgaattcaagtatcaaagatagatttgaacattccacggagcaaattggttttaaacaaaactgagtcaaaactggaccatgtccattgacagacatgatttcatcttgtatatgacaaattgagatttggttcctggtaccgtacaattatactagtgtctcttcttgtaactggttcgttcttataacattaaagtagagtgataatggtaaaaatggtgtctctgaaactcgaattgtattttgtatcgttgcatggtaagcgacaagtgacctatcttctccgcttcgattctttacgcatttctgcaaagtaattctcaagattctgcttctcccacagccttttctgcaccagatcttccttcctatattcatctgaaaaatatcgaatttgcacaatagatttaatcacattgtattagacatcaatctttatcaatatgtcggttcaggttggaaattagagaatagaaggatacctagattagcccatgcgtcggcaggcacactaagtgatcttcgggttaggtatgatgcgtcttcccatgaataaggagctttcttgaccttatatctccacacccaactgctgtaccatactagaagctggaagataacagaatgttgaatcagctatctcgggaaagtaggatatggaggaatctgtgaaatgtggcacagtgaaagtattttaagaaaatgaaaccttaatgatagtgtatggtaggagaatg

SEQ ID NO: 12805 - DNA, 1117 bp, Arabidopsis thaliana columbia
  unsure (1)..(1117): unsure at all n locations
ttttttactacaatgaataaaaagaaacaaccttcccagctatctcatcaatgcttactggcctcacaacacaatcttttcgctaattgaaatcaattcaaattcaacaaaatacctctatatcaatatcatcatctgttctatcaactcaaatgtattgaattgaatagcttctttacatgatcaaatctctgaagaagctaccggagacaatttgtatgcactaaatgcacagagagtttttacttaacatgaataacttcggccataccaaggcatcatcaaattttgtcttccagaaaaatgatgatctcagattacagcatactggtcgtagtttctgtgacgtttgcgtntgaatcttagatccatcgacgaagttcgataattagagaagatattgaaattgataactttttatatcgttttgtatagatctctaatcactttggaatcatcaaaatccatacacacagagaaaagggttcaattttgctgatctgaaaacataatccattggctaattgatatttctgatgtacaaaagaggagcatctacctcaacaacaaaccctaaattttctcagtcgatttccgaggaagacgatgatgagaagagagagcgagcgagtcagctttacagagaggattctaaaaaaacatttgaaaaaaaaagagagagaagaaggtttcggttttaaggctgtctcgcttgccggacgacagaccaatgatctgtctccacgtggacaccggattacgccgatcacagtttgagaaatcgggcaagctgggcaggattgacgatgccgggcagttgggccccatctgaccggagaagattagcaacctccctatacctcttccgtttcggctcacattcctcagccggctcaacagtatggctcggctttatcttactggactcggcttgggctcgagcctggttccattgctctccgaagagtgtgccttgggtgaggtactcgtggctcagataaccggctaacatcagttggttcgaccgatcggctcggctgctgcggttgaagatttcttggaaatgggattaaccggcggaggaacaagtttaggcggcggagagggaaacttggcg

SEQ ID NO: 12806 - DNA, 471 bp, Arabidopsis thaliana
atggaaacattgtgcttagtggtggcaccacaatgtttggcgggattggtgataggatgagtaaagaaatcaccgcgttggcgccgagcagtatgaagatcaaagtggttgctccaccggaaaggaagtacagtgtttggatcggtggctctatcttggcttctctcagtactttccagcaggtaaattacttactatactcatacacacaaatattattaatataaagtctataagtgatttgatgtaaaaattgttacaaaaatgtgttcaaatttgcagatgtggattgcgaaagccgagtatgatgaatctggaccgtcgatcgtccacaggaagtgcttctgatcaaaagtcaccaagtaaaacaagagcggtaaaaattttgatatcagtttttcaccctgaagccatttgctataattactcacaacttctctatttgtgttcttttattcttgtccctcattg

SEQ ID NO: 12807 - DNA, 882 bp, Arabidopsis thaliana
ttctcttttttagccccaatccgggaacatttgagtttctttctgttgatttggttccctaggttgttctccctccaatgtatggtcatgattaatatcgagtccaaacttgtttcaggtattttctgcttttggatttgtgcataaaattgccacatttgagaaagctgctggtttccaggtgagatgttgagattggtattgactgtcttgtatctatggagatgaatgaagtgatattaatcttattttttgctttcctaacctgccaggcactagttcaatttactgatgtggagactgcatccgcggcaaggagtgcgttggatggcagaagtatacccaggtatctgctttccgcacatgttggttcgtgcagtttgcgaatgtcttattcagctcatactgatctcaacatcaagtttcagtcccaccggagcaggtagagtttctgcatatgctgccagtaatgttgaacaccttatgttagaatagttgattcatatgtttgattcgttggtgtactcagagattacacaaatccataccttccagtgaatcagaccgcaatggatgggtctatgcaggtatcattttcgtcccctgcatttctctgcacttttatctatcgctttccaccaatatttacctttcttacgtggtctatgacattgtcttcagcctgctttaggtgctgacggcaagaaagttgaatctcagagcaacgtccttctcggtttgattgagaatatgcagtatgctgtcactgtggatgttcttcacacggtaaggaacaacagtcatgcacatttctgcttctaagcattcttagtctctcaaaaataacatcctttgcttctcataggtgttttctgcatatgg

SEQ ID NO: 12808 - DNA, 540 bp, Arabidopsis thaliana
tgagctaaagaaggtaactttgttagctctagagggtgaatctagtgagcccttgggtttacaagttgtgactcaagcaaacctacttcaccaaatccgagagggacaagcgcaagatgaaaagttgcagaaaatcgtggaggagttaaaaacattagatggaccaaacgctagtggcaaccatctagctgatgacggcaccttattactcaatgggagaattacagtgcctgatcgtaaaggattacgataagaaattttaagggcggctcatacttctttattgagcattcatccgggaagtataaaaatgtacaaggatataaggaagtattaccattggcctgggatgaagagatcagtggcgaaatgggtaagccaatgtgagtcatgccaaagagttaaggtggaacccaagtgccgacaggtttattgcataacctaccaattcctgcatggaaatgggagtcaatatcaatggtttttacactgaattccaacaagccaggacgtacaatgaggctatatgggtagtagtag

SEQ ID NO: 12809 - DNA, 496 bp, Arabidopsis thaliana
  unsure (1)..(496): unsure at all n locations
tcnnnnnnnnnnnnnnnnnnnnnctaaagaacgagtgccggggccgttgacgatgtcgacaggatagtactgatgataattcatgatttcgcctggcgtatcagtccgcgtgtaggctgcatccggtaatcaatgcctgatgcgacgctgtcggtcgttatcagacctggagcaattgccaaatgtaggccggataaggcgtttacgcgcgatccggcatttgcttagctcagagtgaagattaacctatctgcccattccccaaatgtttaacgcggcgcttaacttcttcctgcttaccagcgttaaacggacgtgcatccgggctacctaaatatccgcacacgcggcgagttaccgacacacgggaggcgtcatggttaccacatttcgggcaagtgaagcctttgctggtgcactcgaactcaccggtaaagccacactcgtagcactcatcaatcggtgtattggtgccgtaatacgggacatgctgata

SEQ ID NO: 12810 - DNA, 583 bp, Arabidopsis thaliana
tatttcaccctcttgcttgaacggggagcaagtccggcgctttaccttgaaggagtccgtttagcttgcaacttcgtcaccgtagcacatggtataaccatgttgggatctatctctgccaccgacgcatatgcatgcttccttcatggtctgtttctaaccgcaactggcaacggacgggagtttgaacccgtgaatgcgactttctgggatttagtgccatcatttgaagatgcaaacacagtgggggagttagttatgtatcacataagtcgattgtatgctcaaggacctcggatgtggaatctatcatggaggttcatgatttcaccagactgcttgggtcattgcagctacggagcttgctgccacaattatttgttctactggtatgctagggagttgtgcatattttattaaggaatggcgttcgttcagcatcttttttcccattctatgcatcggcatcggttatatgctttggctttagtatccttttgttgtatgctctactcggtttattgttatgctttgtatttccttgtgttattgttataatgtgtatttccttgtttaattgtta

SEQ ID NO: 12811 - DNA, 514 bp, Arabidopsis thaliana columbia
gtgtcctccctcgtatatgtgtaacatgtgatgataaacacttttgaatgatgtaggttcaaaatttgatagaaagatgtcttcagttgtacatgaacagagatgaggtcgtgaagactctcttgactcgtgcaaggatagaccctggatttacaaccttgggtaagcttttgaaggttattaaattctctttgcttcattttgtttcattgcatcatagcctttctttcagtcttagattttaagaattctcattagcataactccatcttctgtactgacgtgggatagaagagctacataggatactgggttgttgaagagtgacacaaaatgcatgttatatattgtttagttatagcattagcaacgtgaaagatgaaatgaaatctctatttctgactctcctttttattttatgtgtgaaatcagtttggcagaaattggcagaagaaaacgcagagtttttcagggcatattatataaggctgaaactgaagaagcaaataatttt

SEQ ID NO: 12812 - DNA, 595 bp, Arabidopsis thaliana
ttttacactattaggtaaatcaaccaaagtccattctttgttttgtgacatggattccatttcggattttgcggcctctaaccacttatcagaatcggggcccatcaatgcttcttcgtttgacgtaggttcatcactttttataataaatagagcatgatcatccgtcactcaatctatgaatctatcgggttcgtgacggttcctttcggacctacctacctcaggttccacacgtataggttctacgactcttcgtagatccaacgtatgttcttcctgagaagttggaacatcaccatgtggttctcgaacttcttcgagtaatactttactcccactagttccttttgaaagaaactctctttccaacaccatttcgagcaacaaacactttctagtcagttgggtggtaaaagtaataacctttggtctcatttggataacttacgaagtatcacttatcaggtttgcgtcaagctcatcagtaatcaatcatttgacacaagcttcacaaccccaaattttcagaaaagacaaattaggaacgttccaatccatatctcatatggtgtcttctcactgattttgatgg

SEQ ID NO: 12813 - DNA, 541 bp, Arabidopsis thaliana
tagtaacgtccgccagtgtgctctaaagactccaactagccgcgcatgtctatctagcctgctacatgggcgttctccgcccaagcgatgatacggagctggtaaacaaacccgcttccaacacagccatcgcagccgttttcatctacgccatcggctggtccattggcctctgcacagttccatacctctacggaacggaaatattccctacgcgcatccggaatgtcagctatgccgtaagcatgtcgcttcactggttcttccagtttgctgtcgtgcgcgtgacgccaacatgtttgtctcgttgcatgattggggcgcgtacatgttctgggctatcatatgtcttgtgggtttagttgtcctcggcatatggatgcctgagactaagggagtggatattgaactgatgggagagctttttgaggggccttggtatctcaggtggcgtgctcgggttcgaccaaagaatggggagcaaactggtctataaacccccatttgtttcggcgtttcggacagtttgggtttcgaaata

SEQ ID NO: 12814 - DNA, 586 bp, Arabidopsis thaliana columbia
tgaaacacaagaaaaagaaaagtttagacttaaatcgacacctagtctaatgatgaagcaaagagaactttggcaacgacgccaaatttgatatagctccaattgtcttaagcttactccctcatataagagatcgtcgttagcacttaagggttgaattccactgagctcttcatgttcacacaatagacttatgatgattttaattaagctagacaaagtgtattaatgtaaaagacaataaaataagtaaatgagttctagattcaagcgatttaagcatcgggtctaaggaattgtcttggaagatagataaattgtagatctagctaatagtaggattgttatctcaccgttctgaaactcaaactatgattttagagtaaccggtggtgttccgcgaaactctctatacttagagctaagataaccggaaaagccgagaaatcctatactaaagcatgcattattatcaagtttgattagttccctagtatctaaactagagcctttctatgagcctacctgttctttcataaatgcctaggttcatctatgatcggttcaaatacaagtacctatggtg

SEQ ID NO: 12815 - DNA, 659 bp, Arabidopsis thaliana
taatacgcgcttcgatatcacttggctgatcaccaacaggaaccttagtgataccaggaagatccacaagactaatatccaaaacattaggtgaaaatatcttcaaaccaatcggaatatctgatacacctttgttctctcctgatactctattagtctccgcctacaaacaaattgtcatattcatacaattagacgatcatcatcaatagattctatgacgaacttagaagaagagaatgaataaacaaacctcaatctcacggcgaatctcagagaaatcgtagatacgtctaacaggatcgtggtgaagaaactcgccccactcttcatcggatccaccatcagagctaggtttcgtctgaacaagctggagacggagaggtcggcgcgtgcaaatatcattgccacgaggaagaaagtcacggccgacgagagcttctagaacgctggatttgcacactgctttgactaccgacgacagctacttgcggaagagcgatcgtcgattgacttcctagctgagcgaatatgtcttggagcttgttcacaatcggaatcacggaggagcctagtggcgttacgacagaggccgacgacggatgggagatcgtcgacggacattgatttgattcgatctaaagatggaagtaatctga

SEQ ID NO: 12816 - DNA, 265 bp, Arabidopsis thaliana
gatccccaaaggacacagtccgttgtcgttgtgagaacacttcaatgcttggtgaaagaaagaacgttaatctccctggtgttgtggttgatctcccaactctaactgaaaaagacaagcaagacattcttgaatggggagttcccaatcaaatcgacatgattgctctgtcttttgtcagaaaaggttcggacttggtacaagttaggaagctacttggaaaacatgctaaaaccatacttctcatgtcaaaggtacatatata

SEQ ID NO: 12817 - DNA, 697 bp, Arabidopsis thaliana
  unsure (1)..(697): unsure at all n locations
aaaaaaactaatattcacaaattaaaggaaatcatccttctctgtactgtataagtgtatataaatttttttaatcctcttttgatttttgactattttataaattcaaattatataatcttgtaagaatttttcctgcggcaatgatcccatgcagcgatcctcaactggactttttcaaaatccgaaacccgacaaggaatagtgatccgacccggttgatcaaacccatgaagcngcgccgcttgctccaacaattctccaaacaatggatgattaaagtaaatcaccggcaccacaactcgccgcgtgtcatcgtctgattcgccgacatgaaccaccaaatgtcctcgaggaacaacccggttcgactttttcggatccttacccaaccggatctgattctgacccggattcttcttgcttccaccgcacaatctcttagctccacggcttaaacaccgtgctaatgaccggattccggtaaccgggtttgtgattcgggtcgggcatctgtttcttggtatccatttgaaaattttgacaaatctgtgtccaattttgaaccctctgactctcttcatgcttggttttaatcagattccgacaaaaaaaaaaaaagtctttggtgaaaacaatgagatgggtttgtttgaaatcgagtttcaagaaatgggtttgattcgaaagaaatagg

SEQ ID NO: 12818 - DNA, 541 bp, Arabidopsis thaliana
tccccacatcattcaaggccaagccacatgagccaagtacattgctaagaagatggccatgttaaacacaaacgtagattgaaacttgaacggttttaacaacaagttggaagcattgaccttaaaagtgagatatataaaaggcacaacatcttcaacatcagctcacacaggatacatcccaggaaaaccaatacaaagtttaaaggggtatgctcacacaatcactctaagaagcgaacgagcattgccaacaagaggagatcctaactcaaacactggggacaatgtggttcactgctatatatggtgctatctctgaagaacaggggatgaatagcttatgtctctcaaaatagggttttgcaaagaacttgatatatgaaacttaggtctaaaaacaatttaaaaaccctataaaacgtctagggactaataatgcaaataaaaaagtcttctgggcaaatttcctcttttgtaaacttggaagcgtcatggactttgctgggctgaaactggtgtcgattgactccaggagttt

SEQ ID NO: 12819 - DNA, 486 bp, Arabidopsis thaliana
ccggcccgtgagagaaagaacgttaatctcccaggtgttgttgtggatctcccaactctaactgagaaagacaaagaagacatcatgcaatggggagtcccgaatcaaatcgacatgattgctctgtcttttgtcaggaaaggttcagacttggttcaagtccggaaacttctaggaaagcacgccaaaaacattcttctcatgtctaaggtatgttaaatcaaagctctctttttagttccggaaactacaggatcaaatctttaggttgtgatggttttgtgctatcttctttttgattgattaggtcgagaaccaagaaggtgtggcaaattttgatgacattttggtcaattcagacgctttcatgattgctagaggagatctgggcatggaaatcccgattgagaagatcttcttagctcagaaggtgatgatctacaaatgcaacatccagggaaaacctgtggtcacagcaactcagat

SEQ ID NO: 12820 - DNA, 1438 bp, Arabidopsis thaliana
ccacattaagagctctcatcagaggattgtgtgcatctatgacattgacgccagcgtttcctttctacttactagattaaaaccattgattcaattccaaaaaccaaatagaaattaggaaaaagtaataattagaccaaccattcaacagcaactgagaaaaaaaaaaaaatagaacattcagtacatgtagttaaaactaaataataaccactaaaaatctaataagccaatttctccaatatgcagtttctttcttcttctttatttgttgtccccatgaaaataaaagaagagaaggaaaccaaaactaaaagatattatcatcattcatcaatgaacaacaacttgttgatcatcgatgagcatcactgagctgtgatgatgaaccatgtgccaccttccattgtggaactcgaacacattggttattaggaatggaccaccatccacgttcaggtatgccttcatggtgacccaagccatgtctgttagtatccgagtgcgaaccgtgtggacctgaaagtcaaacccttgttcccaattgaaacaaagttgccagctttgtatcacttcattgtacctgcaattcaagaagggaaaacatagatgattcataccgatttcttttaatgaaatccacaaagatgtatttagcctatttgaagatggccaaatctagaacaaagatgcataagaataaaactgtgtggagtagactcaaacaatggaaggtgctgaaagaatccaaattctatcagagctgctgtggatatactactgttaactctgttatcttattgctataacttttttgcttaaacgtttttactaaatcatacaatactcttaacatcttgtatcacgaggaactgcacaagagcattgttccgctagtatactcaaactcagataccatctcatagctaagaccatagaaacatacccaaaaccgttaaagaacatgctaggtacacattagaatgacaaaagggggtgaaatgtggagttgttacccggagaagagttcgccagaggcatggatacacttgacatagtccgagttcaaccacaaccgagccatcgcttgaagcgctctgtctctaatgatggtgaagaattccgtattcacactaataatcgctctagtagttgcatagtactctttccacccattgactggtgttataccatcttgctccagagtaaaatcctaacacatgagaaaaaagtaagagaagcattaaacaaaatagcaccattcacgaaaacacacactaatccagaaactgctaagaatacacatcttttaacctagaatcatttctgaatttccaatacacaaagctaatacaaatgagtgattagtgaatctaattaccttgtgataaagagctttccaagcattatcatcattagcagctttcctcatcaagga

SEQ ID NO: 12821 - DNA, 899 bp, Arabidopsis thaliana
actatttacatatcaaagtattaaatcccattttccctgtaatgagtatctatttatccctttatcataaaataataatccaaaatacgtgctctcttaatttatagaaaaataaaagttaataactatttagaaccttatggtaaaaaaaaatacaagtaaaagtatatctctaagcattttccctttgaaattttcaaactaattaaatagttaccaaacacaaaaagcagaagggcagaatagtccaaagagctaactcgcgcgtcaacgttggcgtcgtcttgccaaactttgccaataataataattagacttctgcactttctcacgaacctctctgtctcgtccattacttaaaaaccaaatctttcatcatcttccttcaccagttgactctctttcaatctatctctgaatctctcactctcctaccctaaaaccatgaactccaacgaccaggatccgattccgttcagacccgaagacaacaacttctccggttccaaaacctacgccatgagcggcaaaatcatgctaagtgcaatagtaatcctcttcttcgtcgtcattttaatggtcttcctccatctttacgctcgttggtatctcctccgtgctcgtagacgtcatctccgtcgtcgtagccgtaaccgtcgcgctacgatggttttcttcaccgctgatccttccaccgccgcaacttccgtcgtcgcttcacgtggacttgatccaaacgttattaaatctcttcctgttttcactttctccgacgagactcataaagatccgatcgaatgcgccgtttgtttatcggaattcgaagagagcgagacgggtcgggttttgcccaattgtcaacatacttttcatgttgattgtattgatatgtggtttca

SEQ ID NO: 12822 - DNA, 522 bp, Arabidopsis thaliana
cacttcaccatatgttataggtcgctgcaaaagttcctcctacaatgcaagtgaaacagttaaaatcacaaaagcaatattagaaaattggttaagtgaatggactctaaccagttcttgatgaacttgcacaaaagatttctgaccagctaagtgtttgtgcactccaagacctccacgatcagagtttctagactgtgaagtagtctcactcttcacaatagcttcttcagttctccaatgctcccacatgcgattccaaatggtagtacgaatccaatctggttggtttccactcctctttgcttgactgacaatccctttcatccgtttcttggcaataaccaagaacccttctttaacaagctcagtaatagcatgatcccaattatacttacgctacataacaagcagctaagtcacatatagtaggctgtaatagagtaatgcataaatgaaattaccgcaaaagtcctgaaatatctctcttgaacgtgtattggagtaccttccagctgaagt

SEQ ID NO: 12823 - DNA, 398 bp, Arabidopsis thaliana
  unsure (1)..(398): unsure at all n locations
nnnnnnnnnnnnnnnnnnncgctgtaaaggctgctctggtgaaattagcatcacgagagtatagtgtggatgaaagaagataaaagtatacttgtggtttttgagtgctttgaaatgattatttgtcatttcccagtatttttgttaatcggataacctttattacgtatgctttgagtagtccgtattcaaggtatctgttttaggcggtagtgagatgagtgattcaaactatatgaaattaggaataaaactgcgctaaacaggggctggttacgttaaaggaaatcctatggtcggcgcagttactgtccaagatcagttccattatcggataacgccatcatgagttttttggcgccccccatgctgagagacatgctgttacaaactgtaga

SEQ ID NO: 12824 - DNA, 597 bp, Arabidopsis thaliana columbia
catgactgccttagtacacttgtcttgtgccaaaattgttgaaacacatgtagatcctaaggaggcacatacggatccacattaccgatcaacaatgaataatatttggcaacaatatctcatatgactattgtcgggcaagactcggaacttgaaccaacagagcagcttgtagcggaggaggagcttgtagccgaggggcagcttgtagcggaggagcagcttgtagcggagtaagctttggcggaaccaaccagtcctatgactcgttcgaagactagacttctcaaccaagctgttaaaggaatacttaaccacttgggcaaacatccaaacgaagtcattcaaaccgtttggaactcgatagcagcccaagacgattgggaatgggctatgtgttacttgggtactctttttcccttctaaggttttgtcccaatgagtttccgttagtaggtttttaatgaggcttgagtaacacttccaaatcccccgattatcattccggcccaagcccaataagaggagcaagaatttggaaggtcaagggtctatttttgtcacactttcatttatgattttttcttttctgagttg

SEQ ID NO: 12825 - DNA, 497 bp, Arabidopsis thaliana
atctcgtaacatccctgatcccccaaaaacagtatatctaggacaactaacctgaggtacccaattcttcataaatggtatcaagaggaaatcctttcaaatggttcttcttgaactccaccttgcacatcctaggacatcactgatctgctcctacaatgtcctcaataaatttttccctcaactgtgggattgcctcgaatgcaagaagctacagagatccaaaacaatttttaataacaaatagtattccacattattaccagtattcccaacattcaccaattaatataagttataactaacctccatcggaacacagaaacccggaagcggtcatatgtacttcttgttgttgacgactaaaccattaaaatgagaaatcgtgtgtgggatggttcctaacatgtaatcacaagaatacctcccccacgtgaaaattcatacgaaacgtgagatcactcatagccttgaggtcaaattcatcaacttgaggt

SEQ ID NO: 12826 - DNA, 552 bp, Arabidopsis thaliana
tcatccgccgtcaaccagagctgacaagcaaagaagaaaaaggctgccaagcacaggggaggcacgccgatgacgaacgacgacctggtcgacctccggaggagatgccaggttccggcggaggtacatatgatcctcccaaggccaccgctgcatcctgagaacgtgccggtcgggtggtgctgcgcttatgccaatttcttcgagaaatgcggcctatttttcccaattccggcgtgaattctcgagatgctctactgtctcggcctcgccttttccgagatgtgtccgaacttcgtccgccatgtgttggcgttattcacccgggctcgggaagtaaacagagaattcagctgtcatgacctgcttcagctctgccaggtcaagaccaatgctaggagtgaccaaggcacgtactacatcagtgcacgtcccggatctctggtcctcggcggtttgaaagcctgtcgagacaccaattgccgatccaagtatttctttttcagagtagatcgtcattcaggtggcaattttgatcccgcgagataataa

SEQ ID NO: 12827 - DNA, 1022 bp, Arabidopsis thaliana
cagagtagcatacaatgttaccgcccggggcattctccatctttgataaaataccatgggaaagtagctttacctttgaaacttcacttcatacatttgaattgtgggttatggaagatgctgagaaatggtcgaagatacgtttctctatttgtcattctatgcatttatttggacaagacgacgacgatgcatttctcattacaggcaatattcacacgggtgagattatattcgcaccttacgattgcgatgtaagattcggtatgactcatgttgtctattatgatctcaagacaaataggcttaggtttagaactgttgcgtttgatttaggaactcttttccctcagatttctgtaatggtaccttttttcgattatgtagagagtgctatgcttttgtaaggagattatcattaccatatgttgtccctaagtcttttagacaatagattaaatgtctcctccaaatagcaaaacaagtgacagctatgctgagagcaattgaaaatctctttgccataccttccaaaaaaatagaataaaaataaacgatacgtatagaaataaacgttggacatacaacaccaggatgttattgttatatatataaattaagaagtagtaatatcaggtacgagatgaacacaaattacaaacaaacaataaacgtatataataaacggagaatgtgatgatgattaagcatatcgatccatcattcctggttatggagaatgtggtcatccgaatcagcaatcatcttctcgagaaacttataaaacttggcgggttctgagtcttcggtgcgtttctcccacttcacactaactttgcagacacaagcattttgggactcggggatgaattgtagatttgggatatacaccttaagctcctccatgacttgaccatcgagcgcagtcatcgtcaccgccatcttctcttcgtctatctctgttctctccttaaactcttcctccttcccatcttcatatataatgaatgatgccaaacaca

SEQ ID NO: 12828 - DNA, 618 bp, Arabidopsis thaliana columbia
gacacgatcggcagcaaacccaaagtgaaatgtagccgtcacaaatgacttggaaaaccaaagctacagggtgtctcccccgaaactttaagagataagttggaaaaacatacgtttttcaaacttaattatcaaagcagtacggttcctattcataattggagatttcagcgggaccaccgttgtgtccaatacagataaagtggggtatgttttcttttgtggaaattacgtataagggcttccattatttttatgagaaaacgcaaccctctggccgagttcgggtttttgttttgttaagtcatagtcaaagttaggaaacgtctgatcgttatgggctcaacgaaatcgtaaatggaccttaaacggaaattcttcttatcttagaaacgaagtacgtgttgaagtcaacttgtcttcctcgtcgacaaattcaatgacggagtgggagctgaaagaaacgacggaatttatgagattttcaaatcaacgaaattagttaacaggttggtgaataaaatgatttaatactcagactctctttagttttttttttttgaaattagctaaatttttggattggcagtttagatgctttaaatctttaagactagt

SEQ ID NO: 12829 - DNA, 587 bp, Arabidopsis thaliana columbia
  unsure (1)..(587): unsure at all n locations
cgtatgatatggaagtcctaaattgcgcatcaacttctcggtctggtaatgtgaagtggtagcctggtttccttatggtaaaaaatttgtaaacattttgcaaacggagtccaccaacttttcactcatattataccccgctttgttgtgcatgagtcgagatgctaatgataactgcgactgcccttcacgacaataatcgtacaatgtattatttgcaccttctaacaagtcgtagaacttatttgaatggttacggactggctcttctacattcttataactaccatcatgatgatagttatcatcataccccacgttatcatcataacccacgttaaaattaaatgcatcgttcaccatatccacatatggatcttctacaatattacccacttcttcatgattctctctaaaatacgtcctattcgtataactagttccgatatccatattcaattcttctccatgcatgcttataccaaacataataatcaggcataaatccttgactaaacaaatgactactaactcttctacctgagatgatgtgttttcantcttgcatacactacaaggacaatgaa

SEQ ID NO: 12830 - DNA, 185 bp, Arabidopsis thaliana columbia
ccttcttctcggaataggttgagcagcgaaccaatcgcggatttgtttcggaagaaaagggaaagaccatcccgttgcagttcttctcctaagagggataagacaaaagcccgaaccgatcgttctcctcgatcatctcccccacctcgcttgatgggtccccctctctaagtcgtcatgtcccc

SEQ ID NO: 12831 - DNA, 520 bp, Arabidopsis thaliana
tttgatagcccaggttgatagccttcgggatggaatagcatcacgcatagcagctccattaatgatgaaggaataagagattgtcttcacacactacatcatccaatttacccaagttggatagaaatcctttctatcaagaacagcctgaataaactcccattctaatctgtcataagccttagacatatctgttttgatagctaaaaagacgtttttcgagccctataaaccttaaggtaatgaagcatctcatgtgtgataagcaaattatctaagattgccctaccagccacaaaagtagactggttctcacatattagaggggacaggactgtcttgagtcttctggttagcactttggagaaaacctgatacacaacattgtagagagcaattggtctgtaatccagtaccctccttggcccttgaactttgggaataagcctgataaaagttttgttgattgaagcttggagtacactggttgaaaagtaaccttggatttactttactaggg

SEQ ID NO: 12832 - DNA, 576 bp, Arabidopsis thaliana
aaaaaaacaatacaagatttttcaaaaactaataagtataactgctaataaaaacacagttgtacatagtttaactttcttaaaacaattcataaatgcataatgaaatgacatacctccaaaggcataacaaaactaggaaacaccttttgtggaccaactacttcattgcactttttaatcaaatagaaaatgtctttcacattttcttcaaatgcaaatcttccccacggaaatgttttgcacaactctagatcagccacagccctaaggaagaacttctccacatagatatacctaatttatacatagatatattgtttagtctctaaaatatctaagttatattcgaacatagatatacctagtttttagtttcgaaaatttctaagttagattcaaaaaagatatactcaatttatgcatagatatactaatttatacatagatatactttttaaaatttctaagttacaatatcaataaagatataccaaattcatacatagttatacttttctaattgtgtaaagtttaaagttcatatcgctctatcgtcgttagagattgaatttg

SEQ ID NO: 12833 - DNA, 781 bp, Arabidopsis thaliana columbia
attatcagtcaatgtccttgttatgtgcttaactatatatatctaagtgtattagtaagagaaagataggaaaaacattgtaccttcatcttcaaacttatcccattcctcatcccaaagagctgcaccttcttgaattccaggttgccagcctgtaagtcacaacatagcaaattccacataagttgtttgtttacaaaatacatgttatttgcaatcatctacaacgaaagcaagaagtcacaaggcaacggaatcatataccagctggaaggtctacaagggccttcgagttaacctccaacccgtgtttcttgcatcgttcagttaaagccttcatcaattcctcaagatctgattgtattctgtcagcccggacctaaatgtgcccagtacagcatcaaatcaggcatgtacagcagatactcgacagttaaggcatctcgtaagcatatagaatagcatgtacctgaaggagaccatcagcactaccaccttgctccatgttcacaattgcttgactcaactccatcttccgcccctggatgggttagcaaagcaaaagttcaataagtaacaaatttccgtaagatgtgttacaaaattattcaaagccccttcaccagcaaaggtgaaagaagggagcattgggccatagaataagaggagaggacaagacgcacaacatgatccagagaaaaagaaaaagaaaaaaacaatgatgaagtttagataagcctagtaagggaaaatgcacatagaagacatggagaaaaaaaaa

SEQ ID NO: 12834 - DNA, 720 bp, Arabidopsis thaliana
tctattgtcgtcaagaaatggcgtcaagtctttcttgaaaagctcaggaggacttgaccttcgaaatcgttgaacctaaggtcgaagtatttgacatcaggccaagagagaacgacgttagggaaaggtccaacgaaacgttgttactaacatcgaattcgtgcattagctttagcttctcaaagcttttaggtatgatcccacaaaaccggtttgaattcaaatggaacattgcaacatctgtcatcaaaccaagctcagcaggcaaatgccctgcgatatccgcaccgttgaggtcaacaccagctacaaccgtgacatcggaatcatcaagagctggcgcacaaaccacaccggtgtagccgcacacgtgtgggccatgccagttccccgtggtgttaaatgggtctgaaaatatggcctttttccaagcctgaagagctatataagctctcttaagcctggtgttggcaaaggtagccttgagatcaacctcgtattcgatatcatcaggaagttcgccgttgtctggtaacgttaaaagttgtcgctgcacaatgaaggcagcttctgtatcggttagggcaaatgagacaaaggaagaagataagaaggagaagaataagaggaagaagcagcagccaaaggacggaggtttagccatggctaaaacaaaaacgttggaaaagcccaaggctgcttatagaagggcatgagagg

SEQ ID NO: 12835 - DNA, 1420 bp, Arabidopsis thaliana
ggaatgagctatttacaagtaactgtctgggataactttgaatgtctcttaagacaattctatggtctttacttgaattttagtcgagtttctgtcatgttcctgattttttggggcatctctggtcatacctcttgaagttgtacttatcctcggtagagtttgttgctaatcttagtggtttgatcggcttggtttccactgcacgtgctacagagattgttagtaagaagtaagatcaagccatgttagtctccatctatcatcctccgggactaagaaaatttgcatgtaaagctcttggaactaacttagacttttcaagatggtcaagtttgattctctcttctggtcttctcacttgtggaatagttgcgatgtcgttgtgcttcagagattttctcgatggaacaaaccgacgttgtttaagctctcttaactcagttaccatcctctccaagaattatcattgttagcttttggttttctccttattattgtcactatagcttgtcaacaataccttattagttattaccttacctcgacagaatcaaagcatcttcctcagtcatatcataaccctttctttatctctgagcaattttatcattacaaatatcttcgtaatgtattaatcaatagaaagagaagcagccatgaattttgtcgaagctattacaaaggatatgaaaatgattccatggctggactgttgagaaagttggaaactttcgcatcttaatccttgaaagttgaaagctttagtgtcaaaagacaagtttcatatctcaaacgtcgtcacgtggcagagtcaaaggtcaaacctttttctcccaaaaactttcctaaattctccaaaatcacactctcagcgaaggagaagaaaaaactagattggcgagaaaatgtcttccgttgcagctatggttttcagaggagctagatcgcttctagctcctgcttctcgagccacctcttctttggtttcagctggatccactaagaaacccgcggcgaaaccaaaggccaaggctaagcctaagccaaaggcgaaatcagactctccggcaaagaagacaccgaggtctaccggaatctttaaggtgactcctgtgtctccagttctcgctcagttccttggtaccggtgaaacatcacgtaccgacgccatcaaggggatttggacctacatcaagtcccacgatcttcaggttcatagtctctttgcattttgttgtaaattttgagtatagcatcataatctctaaattggtaggtagattctctagtttctgatgatataggtcttgcatgtagacgacatttgccggaaaaattaggtggtactttgctatatttttcatggtctcttgaacacattaacttcttgatgatgacatagttgaaagattgttag

SEQ ID NO: 12836 - DNA, 452 bp, Arabidopsis thaliana
atgcgaagattaaggatcccccttctggtcaaaacctctctgaatcacgtaatcttggcagattcagtaatcgaatgatgggaggaggtgctggtctccagtcacatatggtagacccaatgtataatcagtatgctgattcacttgatcttctcaatgatccttccatggataggaactttatgggtggttcatcatacatggatatgcttgaactccagagggcttatcttggagctcagaaatcacagtatggtgtcccttacaaatccggggagcctaacagccatagctaatatgggagtccaacatttgggtctaatatggcatattctggcagcccattggctcatcatggtatgccaaactctcttatggtcacttatagccctatgagacgggatgaagttaatatgcgaatttcttctgcaacaagaaattattcgggaggg

SEQ ID NO: 12837 - DNA, 877 bp, Arabidopsis thaliana
gatgacaataaatagaatgcaaaaagaaagaataaaaggagataagatggaaattaaaaacctttgctttgaattgaagttactctcatgactcacatgactctgtttgtgcagttcaccaaacttcctactctttgctacttctaaacatataaaatatcatattattctttgtccaaaaagatcacaacaatttcactgattatgtatctacctatcaccttaaaaagattggatatgttttattctctagacaaataactaatctctctactagctttcaataactttttttcttaaaaccttcatatacattatgtgtaagaaaatctcaaagaaacaatttggtgtaccaacttacaaaaccttggcattcaaataaaaaatttctgcgattacaaataattttatttttcttcttcccacattatctctctacttaaaagttaaaaaataacaacaaatcatttaatcaagagtttcctcatggagatttaatattttactcctccggtctatatggtgatgaactcatatccgtactataaaacgaatcttctccaccaccatttaagtaactctcttccttctcttcatcccatttcaaaacctctctcacatacttaaacccttcatccacattcgcgcggtccctagcccgagcttgccacacaaacagtttctgacccgtgatagaaaagtaaagaagcttgaacttcattgctacatagaagtaagcttggtaagctagtgactgtacgttgttgttcgttctcaaggggcagaaatcgctgaaccagtcacaagatgttaacggtgcacggtttagcttttcttcgaactgatcatacttgtttaggatcaagatacaaggtgt

SEQ ID NO: 12838 - DNA, 611 bp, Arabidopsis thaliana
caaactagcatccatgtgccaggaacccattacccctcctgcgtagtttcttgttgcagagggatatcgcatattaacttcacctcgtctcatagggctacagggtgacacaagagaattaggcagaagatgatgagccaatgggctgccaggatatgacccaaatgttggactcccataatcggtgtggctgttagggctcccggatttgtaagggacaccgtactgtgatttctgtgctccaagataagccctctggagttcaagcatattcatgtatgaattacccataaagttcacgtccatggaaggatcattgagaagatcaagcgaatcagcatactgatgatacattggatctgccatatgtgactgaagaccagtacctcctcccatcattcgattactgaatctgccaagattacgtgattcagagaggttttgaccagatgatacataacctccaccatgaagtctggaatccattccagaaaatcccatagcagatgctgcagaagcattttcatacactggagaatagttattagttcaagttggttagcatcatagaagctacagctggattaatcataattgttgagcaatagttt

SEQ ID NO: 12839 - DNA, 619 bp, Arabidopsis thaliana
actctcttcactttatttccctaacttcttcagtttgattgatgtgtggaatatctctgttttagtcttccatggcaaggactgaaagctggaaccaaaaagcaaaagtatgaaaggattagtgaaaagaaagtttctacatccattgaggtaagttcatttcacaagtatgctacatttttactcagatttttgtttccctcattctgattcgtatatgatcgccttacacctgcaggctttatgtcgtggttacccatccgaatttgcatcctatttccactactgtcggtcgcttcggtttgatgataaaccagattacgcttatctgaaaagaatatttcgagatctctttatccgtgaaggtttgatatttccttccctctcaatttttaagcctaatatattttctaacaagatttcatttccctgttgcagggtttcagtttgattacgtgtttgactggacaatcttgaaatatcaacaatcacaactaaccgctcccccatctcgtgccctcgtaagtaaaacttgagttcttggttaaactatcttttttggtttgacattgtctgatggagtctctcctgcttcagaatcctgctgtgggaactagtg

SEQ ID NO: 12840 - DNA, 509 bp, Arabidopsis thaliana
gtctcatggtttcttttttagtcttccatggcaaggacttaaagctggaaccaagaaacaaaagtatgagagaatcagtgaaaagaaagtctctacatcaattgaggtaaagtctcaatcacaaagtttgattctttatttcaaacttctacatgtttttgcgtacaaattgctcattttcctccagtccttgtgccgtggttacccatccgaattcgcatcgtacttccactactgccgatcgcttcggtttgatgataaaccagattacggttacctcaaaagaatattccgggacctctttatccgcgaaggttttgaagcttttcttctatccctcccacatattttctttcccaaatctgcgctttctaacactagactgttttgcagggtttcaattcgattatgtctttgactggaccatattgaaatatcaacagtcacagctaaccgctcctccatcctcgtggcctagtaagtcctgcggttcggacagtgcgggtttg

SEQ ID NO: 12841 - DNA, 582 bp, Arabidopsis thaliana
aatgggaaccatgtggttcaaaagtgtattgaatgtgtgcctgaagaaaacatcgagtttattatttcaactttctttggccatgtggtgaccctctccactcacccatatgggtgccgtgttattcaggttcttgctattggtgattgagaaagatgacaccttttttgatcttatgactctatgtacaactcgttttcatctcctgatgcagagagtattggaacactgccatgaccctgatacacagagtaaggttatggaagaaatcctgtccactgttagtatgctggcccaagatcagtatggaaactatgttgttcaggtttgtaaaaagatatgagttttactcttctggtgattttttatactttgctcaaaactgatacatgttttgtggacagcatgtgctggagcatggaaagcctgatgagcgcactgtgataatcacagaattggcggggaagattgttcagatgagccagcagaagttcgcatcaaacgttgttgagaaatgtctgacttttggaggtcctgaggaacgagaattgcttgtgaatgagatgctgggaacaactgatg

SEQ ID NO: 12842 - DNA, 1279 bp, Arabidopsis thaliana
cttgtattactaagagcaagaacctgaataactcggcacccatatgggtgagtggagagggtcacaacattgccaaagaaggtggaaataataaattcgatgttttcttcaggcacacattcaatacacttttgaaccacatggttcccattctgatcacgtacgcatcgcatcacatgtccatcgagttctttcaccattttaattttctggtctagatcaaccacctcaattgcctaaaaggataaacataacaaaactcttaactgtcctggatcgaagataagacttataaacatagcaaaccattttgagaatcgaagatagacttaaagagaagagtaaaacataccttctgaataacacgacaaccatacatctgtaggctaagaggcaaaacattgtcaaagagtttatctgccaattctcttctctgtggtgggagtccatgctcaaagaactgtaggaagataagcaaaattcaggaatctcttatctcaactctaaaataaaaccaaagaggaagactaaataaatctataccttctgaatcacatagtttccaaaaacgtcagtcatcagggcaagagcttttggcatgatctcctcataaaccatgtttttctcatcagttgttgctgtctcgagtttctgctgaataaaccggcttccatactgatccgaactggtcatgaaaatccccaagtacgcgttagcttgggacaaagtgtacacaagaaaaaaggtaaaagaatttaaagggaatacctgaactctacaacatggccagctatttcagaaagttcgaaccctcttgttttgttacttttgaactcttcaagcattgaagatccaaatccttcatccaaactagcatccatgtgccaagaacccattacccctccagtatagtttcttgttgcagcgggatatcgcatatttacttcacctcgtctcatagggctgtaaggtgacataagagagtttggcataccatgatgagccaatgggctgccaggatatgacatattagacccaaatgttggactgccataatagctatggctgttagggctccctgatttgtaaggaagaccatactgtgatttctgagatccgagataagccctctgaatttcaagcatattcatgtatgaattaccatagttcctgtccattgaagggtcattaagaagatcaaacgaatcagcattttcagagaaccttgcatactgatgatacatcgggtctgcaagatgtgacgggtgacccgtactcc

SEQ ID NO: 12843 - DNA, 580 bp, Arabidopsis thaliana columbia
caaagcgagcaaccggagcaagaggcgaacgaattcgagcaagctcaccaaagagaaaatgcggatcaaggaggagatgagatagctgaagttcacaagaagctcggtgtgcttgaagagcttgggaaccttcacagcaaaacagtaaagggtttcaagaagaagatgagaacaatgaataagtcgctgaagagtatggctgctcaaatcaaggacttctagagcaagccaaggccaccatctccgacccccgaagtaagaagaagcggttccacaagctcagctgcaaggagggctggaaggattgatcaaccccgaacttcatcttttgagcctcgggaagtgatctctgagttgagagagccaaggagtaggcagagacgagcttccacacgctcgaccaactactcgaccgaacagaacgagcaaaaccctcccgcctcaactttagcccctgcttatactcaagagaatatggacgattatgtctcatctacttcactgaccgatgaggtaacacacatcaacattgtcatccatagtattttattttcttgtgtgtatttgtttggcttgaatt

SEQ ID NO: 12844 - DNA, 254 bp, Arabidopsis thaliana
ttaaccccaacgtaagcaccataacaagttgcagaagtggtgcaagaaacaagataggctactcatcaagtgcttcaaggccatcaagtttctgactgacaagctaagctgctcctcttctaccacagctattccgcagggagagcctcctctagacatgccctcgaggagatatgacgcgtcagagccaagtcgccacaggccagagccagttcaacacaggcctgagcctagtgaccgagtagtctcatagg

SEQ ID NO: 12845 - DNA, 546 bp, Arabidopsis thaliana
ttggaaacgagtatacaaggtatctgtctcagcagcagcaacaacaaccagtgtctcctcacacgagtgtaagtgatgggaacacctcagcggttggaggaaatcaccgttcctctgcacctcagacgccaaccagtcagaaccttcctccaaatggtgcttctactcaaccagaaaatcagcagcctgcaccttctgtcaatcctactaatcctctagctgtcaggctcaacaacatgacaatagaagagttgcttgaaagttctgggcgtgcgtctttgcccagattagaccctaagcgtccgtcgggaacattctggtaagtataagtgaaagttttggtttaagctatgttattactgcatgacttgtatctgtctgattgaatatatgcttgtaggttcgacgatgactattcagttgcagacattgtccggagcatctttgaaagagatttcaaagaacctcatgctaattggacaaagacaccaggaccagttatcgatcgccggtttgaaacctttgctgtaagtattttaagttgtg

SEQ ID NO: 12846 - DNA, 426 bp, Arabidopsis thaliana columbia
ggaaaatatttgcaagctttaaatccctatgagataatagtcctggggaattcagtatgaagatacgctacagcatctgcaatctccttggcgattctcaaccttacattccaagggaatgaccggacgccttcaataacacatctaatacagttaaaagctccatgtactggatattcacacacgtgaaccggccgaggacactctcgacaacaccccaagagcttgtgtacattcttatggctactcatcgcagatgcatcagcactgtcacggtaagagttgtcagcgtcgataacagcacagtcttggaatttcttgatcggtacgggtctgttttcaatcatgcctttgtaccactcgaatctgtcttccgtgatctcgtagttcccgtcaaagtgatttgtcgcttgttggctttggtcg

SEQ ID NO: 12847 - DNA, 457 bp, Arabidopsis thaliana columbia
atctatagagatggcgtcgatcgacaccattacctatgtcgaccccaaacgggctgaaccagaactatctactaaagctgctttgcaagttcagaccactgctgctgttccaggacctgttgtcacaccaaccaatgcacctctataactgcatccacatccgaagaggcaaaggtactcatctcttcctccagatataatcaatttgactttaaaattttcaaagactgtttcacggtttagcaagccacgagtttctcatcgagcgcttgtttattcttttgatgattgtgcagttaaaagaagtataccacccatacttgagtctcaccctgctgatgttccacacttctttggtcctactcacacaccgagtgcctataagccaccttggatgatgagacgtctttcaaaaaagcatttactgccaccttcagatccacttgatccccatact

SEQ ID NO: 12848 - DNA, 604 bp, Arabidopsis thaliana columbia
  unsure (1)..(604): unsure at all n locations
aatctacacatagacatcctagactccttcatgtccccaactccagatgaagctgtggaatttctaatgacaccaatagttcataacatcccttgggtcctgaagaggtattgctgcactactctgacaaaggacctaacgacagagcctttcacttgttcacgaataacaggtttgtacgacaacaaaggagacggagactgtgggcctgtttcatgcaagttccttgaaatgcatactcatggtatggattacgcagacatgtcagcgctaacagatgaggtagtgtctcgcattaggaaggtttatgcgatggatacttatgctgcttttgttgaatgtgaggacgagtactagttttattctaagagacgtttatataatttgtgtaatattgaaattgtaggatgttaagtgtattttgaacctaatttgtgtaatttgagtttttagaacctaatgatgtttgcaatttctgctttaatttgagtacagaattattgcaattcggtgaaactgtccagcattattgcaaatcgaaaagacaatatctgtacacttctttgaaaaagtaatgtnttctggaatgtaattgtaaatatat

SEQ ID NO: 12849 - DNA, 464 bp, Arabidopsis thaliana
ctgcagcataagttctttgttttcctccgggatactccattatctccaaatgcatcccaaacttgtaaagacctgaaaaagactagaaaagactcaagaaataataaatagattctaaaacctaaatctaaaacataattaacaccactaaaaatagggatatatcgaatgcttttgcaggtccttgagtgaatgtagaaagcttgttgcgcaacttttcagacttagcatcgttataggtccttgtgaaactactctacggataagtcttctgaaaagcagtctttggagtcacctaaagatttggttgcctccaaattagttaccactgtagtttcctagtggcggactaaaattcttatatccctgacaatcaatatagaacatgccttcctcttaatatgccttaggctcgatagtctctgcttctgcaacgaagtgaacttgcttcttccctgtaagta

SEQ ID NO: 12850 - DNA, 540 bp, Arabidopsis thaliana
tgccaatttgtccgcctttacatttgcagttcgagaaattaaagataaagaaaattttgtgaattcctctttatcggtttttaattcctccaaataagttgaaaacgctggtcattcggttggagaagacaccatcttcaccatgtctgaacagtctgtaaaaaatgctacttcttggttgtcggcaccaatcatacacttcatcgcccaaagtagagcttcgacttctgtatggagtggagaaagacttctacgaagattagcagctcccatggctggcgagtctccatttgatgatgtgcaaaaccaccataatcaagaaaacttatagcttccttttcaagatccgtccacaaaacaacgcaaaccagaataaatattatcgtgtgatatattctggacccaaatttgtttttccgatcccatggaaccgttattttcggaactgagctcaaattgagctaactaccatgattgtgcctctttttctgctaaacataatacgtctaacggatctttaccacattttcaaatattttt

SEQ ID NO: 12851 - DNA, 488 bp, Arabidopsis thaliana
cgttgctctacaactctaatgtggcgagctgagctgatgggagcgttgtgtgtggctctatctggggattctaagcagtttgaggaggtgtgtgtgtgctagaggcaattctactgatagtcttagtgaactctgaaccatccatgccaaactccatctccaaatcacacactttgagagagatcctacatctcttcacatcaatcctagtaccagctgtagctaggaatgctcttccaaggataagaggatccttgggttccttatcgtagtccagaaccacaaagtcaacagggattaaggagttaccaaccttaataggaacatcctcaagaattccttcagggattcgtttggaacgatccttgaaggggagagtgattctagtcggcctgtagttagtcatgcctagtctctcagcaacagacttaggcatgaggttgatacttgatcccagatcacacaaagagcagctgaacctgcttgtg

SEQ ID NO: 12852 - DNA, 458 bp, Arabidopsis thaliana
cgcttatctgatgtcattccctatctattagaaccagtgtatacaataaaaaccatttactttttgcaccttattcttttggagatttctgaagatttgttactttgactgtaacaggaacagagccaatctgatttctcggaaggtgattgggatttggatggtttagctcactcggaacatgcatacgagaaactccattttcccttttctttgtcagcttgagaaacctgttttattcagacacaatcaattattattatcttttggttctgtctcttctctcttctctgtaatgaaagtgtaagctattgtttaccgctcccccactggtttgagcaacttaggaagatccaaatccataaataaaattcaaaaagtaccctctttgctacaaatgtaaaggtgttttgaagaggaagtcaaagtcttcgtgtctaagtgcaaaataacgttag

SEQ ID NO: 12853 - DNA, 578 bp, Arabidopsis thaliana
tagtaacgtccgccagtgtgctctaaagcggattgatcccctacagtcttgcagtgactgcggttttcgtcgagggctggattttcctcggtttgactttactcggtatccggcagtggcttgctcgtgccattcccgcctcgattaaactcgcgaccggcgccggtattggattgtacctgacgctgatcggtctcagctatagtgccggtcttggagttgtgcaggggggtacaagcagccctattcagttagccggctgcgcgtcagatacgttcggcgacgacgggttgtgtccttcgtccgaaaaaatgcgcaatcccacaatgtggattggtatcttttgcggcggtgttttcactgtcttcttgatgatgtatagggtcaagggtgcagtgattgctggtatcctgcttgtctcgatcatctcatggccgcgtccgaccccagttacctatttccccacacagaaaccggtgacagctcgtttgatttctcaagatagtcgtcaccttccatccgattcagcatactctggtggcgcaggaatggaatatcccagtaatggtggacagttt

SEQ ID NO: 12854 - DNA, 583 bp, Arabidopsis thaliana columbia
tgaaaaggttacaacttataatccccatgtctctttgacttcttcttcatcttcactctccaatcattcacttctttcgaaagtctttcataacctctcacttgacttgtatctaacgaagcttctttgattcaaaagtaagttttatatcttaaccgactctatctcctcttttttttttgctagcgctttgttttgagatctctacagagtttgttttgtattggtattggtgaggatgacttatgcaaaacatgcagcctccttttgtttttttaatatattcattcatttcgtttactctatatactttataatcgagaattgttttttttcttatttttttctaacctttgtaatagtggtggtggcaaccatgacaaacggtggtggcggaaacaacggagcagcaaaccggacggaagagttaaaccccaaccggtgaaagaacaactccccggaatccagtactgcgtcaacagtcctcctccttggcgtatgtattgtttaaaaaattctggttatttatgttatacattattatttctatgtgtgtgtgtgtgacatgtaatatgtttggtgt

SEQ ID NO: 12855 - DNA, 472 bp, Arabidopsis thaliana columbia
ttcaccgctgattctgctcggtgcaggagtgttcctccgcgattggcgttttgttggcactatgatgacttcattctccaattttccgatcatgtcaccgtcgtcatcattatcaccgcctttaaaaaccggatgaatataagcgtcttgcaagtaacctttcaggttcagatttggctctcttgctctttccaatgtatctttcatcacagcttcctgtaaaataatcaacattttgccatttctggggctcgtaaaaccgatccacacagtgacaaaaatcgaactaaacagaaataataaatctagataacgtagaagaaactgacctgtaaggggtaacggacaaaggcaggttcgaaacggcctttacagaagcggtggaaccgatagtaatcacaggaagagcaatgagaaacggagcagctgaagcggcatgttttgtacctacaaaccatcagaagcaactgag

SEQ ID NO: 12856 - DNA, 1145 bp, Arabidopsis thaliana
cccctgatgagaagagacagcttgtttatgaactgtcgaagcaatcacatctagctgctgaggtcttgcaggcatggagccgccaagagattctacagatcttatgcgcagaaatgggaaaagaaaggaagtatactggtttgaccaaagtcaagatcatcgagacccttttgaaaattgtatctgagaaaaactctggagagtgtgaagggaagaagagagattctgattgtttgcctattcagagaaacactaagagacaaaggaaggttgataatccttctcggtatgtgattccagcaaccaacattgtaacaagcaacaatgcctcagggagctgcagctcggttaatactaaaggtaaacagtcttctttttttggttcaaagttatcaacctttttgtacatactaacccggaaatagaatttggtcaggtgagagtactaccatctactgcaaaaatttggcttgtcgtgctgtactgagacaggaagactcgttttgcagaaggtgttcatgttgcatctgtcgtaagtatgatgataacaaagatcctagtctctggttaacatgtagctcagatcctccatttgagggtgagtcttgcggattctcgtgtcatcttgaatgtgctttcaacactgaaaaatccggtcttggaaaagacaagcaaagtgagggatgctgcttctattgtgtctcttgcggtaaagcaaacagtttgcttgaatgctggaagaagcaattgacgattgctaaagaaaccagaagggtagaagtgctttgttaccgtcttttcttagtccagaaactattgaagagctcaactaaataccgaaatctgtgtgaggttgtggatgaagctgtcaagactcttgaagctgatgtgggtcctctcactggtcttcctatgaaaatgggtagaggaattgtaaacagacttcattcgggacccgatgtgcagaaactttgctcttctgctcttgaatctcttgaaactatagcaactacacctcctgatgttgctgcattaccttcacctcgcagctccaagatgcagcaaggtcagaacttttgtacccttcaatgattgagtaatatattaagtttgttgaataatgttgattctctgattttgtttcg

SEQ ID NO: 12857 - DNA, 532 bp, Arabidopsis thaliana columbia
aatcttcaaaacatcaataagttgcgtcttcgaattgccgtcaagtcattggtgtcgctcgacaacaggggtggtgcctttcgacacctacgtgtattttagtttccggatttcttcagcagtataaattctctgttttcctacagaatgctctattatctccaaataaatcccaaacatgtaaagacctgaaaatgacaagaaaagactctagaaataacatatagactcgaaaagctatacctaaatcatagttaaaacagtaaaaatagggatatattgactagcattaagaacaaccaaagatgaagaatcctacagataacctagcaaggagaactctactaaatcatttatatccataatgagaaaccctaaacctaacaagaagactactcaaacatgatcatagaagaacaaaacatgtttgagtaagagatcaataatgaatataagaagagaatagagtaagaaatatcttctctaaagggagtcccacaaggttttgctccaagtcaaaaaaaagaggaga

SEQ ID NO: 12858 - DNA, 548 bp, Arabidopsis thaliana
gaccaccaccagagtaactactaccacccaagccacggctggagtaaattgaagaatacgagctacctcctccctgtaaatccaatactaaaatgttacacaacttgactttccaaaataaatataaaaaaggggaaagtgtgaagccacttacatctcttctgggtaagtcgccaccatagcttgacgagtacatacctcctacatcgctgccactataagaacctgaagaaagcaacattatgaaattatagccattgaaggcagtaagtgtatctcgacgaagtattgctctctgttaagccaagttctgaatcaaacctcctccataatccattccctgacgactgctgtatgggccccgcgagtcatgatttgacatagaatttcggctgcttccatatcctagactagacctaggaatcctagaccaaacatggaagtaagaaaataatacacttggcacagaaaattgctaccaaaaataactgaagctatccataaaaagagaacataccggtccccgtaggattccccatattgagatg

SEQ ID NO: 12859 - DNA, 839 bp, Arabidopsis thaliana
aattatgtctgagccaattcagaaaatgcagagatgatgagaatcaaaagaaatatcacaagtttgagttcttggctaagaaaacgcatcacctttggtttggtggcagatgaggacgatcaagcttgtgttaagattacgaggaaacgagaaagagagagatcataattgagccaaaaagaaaaaggtggatatagagataacaacaaagtgtgtgtgtgacgtaagataccaatatcagtgtcggtccaccaccaccttggtatgcgtgatagctttgttgccagataatttcttccaggtgttttattattaagaaggtagagagttatgagaatctgccattgatggtagtttacctggagtttccatcaaaatgtacacacaagaagaaaaataaggaagagctaagtgatgagagcagaacaatgtatctcaaagattcctaataaattggtgagtagtcacaaaggcacacttggaaacaagacaagaccatactgatgttgcaattatactagtcacaaacgggtctcgtgttacaaactaacataaaataccctattgctacttgtttgttccaggaggatcaatcaactttatcttcaactcaatctcacccgattcaacagcacacagcctcagccacacactctgcaccacctctccgtctatgcaactgattgtgctctctcgagatacgcagttctctggatccggtaatactttcctaagcgttgtctcaccagaggacacgcggactacgtgtcttagtctggcaactgagataagcggttgaaggctgagagaggcatggcccatcttgtcatctgccttga

SEQ ID NO: 12860 - DNA, 480 bp, Arabidopsis thaliana columbia
catgcgctatgctaaaatcaataatttcaaaggtatccactcttcccttaactatgtctaaagttatcatattgaatgtatatttgcatgtctaacaaatattgtctaattctgttaactagttgagattagtattacaagtgtttttgatgtttcggatgtcaacatcaatccggttcatgttcttgaggtggagctgttcgtaaatcgtaagtgttgatttaaattatgacttacattgttctgtttaaattcacaaacatgttaactagtcaaatgcttatttacagactaccaagtgatggccttgctctaactattcaggataattatgtaaaccgtgacatcattaagattaaatcagttgattttttttattatcctgccaaaaaaattgttgatttatttcatgggagagatgtaagttatataactctatttttaccgattttagttatgatttaggtataggtttataga

SEQ ID NO: 12861 - DNA, 274 bp, Arabidopsis thaliana
gggtagcatgtgctcttttgctgctgctctgaaagaaaaagatgtctgggtaatgaatgttgttcctgaggacggacctaacacgcttaaactgatatatgacagaggtttaatgggcgcggttcatagctggtcagtttttatacttaaattttcgaaatgacacattatttctacaccgaatttgaaatttttagcatgtttttgaatgtaccacaggtgtgaagcattctcgacatatccaaggacatatgatctcctccatgcttgggat

SEQ ID NO: 12862 - DNA, 646 bp, Arabidopsis thaliana
tagtaacgtgcgccagtgtgctctaaagccgtctcagcattcagggcggtcatctcggtcacgataacaatggcggtattgcccgtggggcacgccggaaagcagcggcactactggattcgtccgtctggagggtgacctgatgagaacagaggttgccggtatgtctgtgaccgcgggggtatatggtgctgctggccattcttccgttgatgttaaggatgatgacggctcccgtgccggcacggtccgggatgatgccggcagcctgggcggatacctgaatctggtacacacgtcctccggcctgtgggctgacattgtggcacagggaacccgccacagcatgaaagcgtcatcggacaataacgacttccgcgcccggggctggggctggctgggctcactggaaaccggtctgcccttcagtatcactgacaacctgatgctggagccacaactgcagtatacctggcagggactttccctggatgacggtaaggacaacgccggttatgtgaagttcgggcatggcagtgcacaacatgtgcgtgccggtttccgtctgggcaccacaacgatatgacctttggcgaagcgactcatcccgtgccccctgcgtgacagtgcaaacacagtgtgagtg

SEQ ID NO: 12863 - DNA, 434 bp, Arabidopsis thaliana
ggtacaaggcattaccacctgaggctacttgagagtggagtgagaaaatccttgctttcgcgtgggagccgagcggtcacaggtttgccgtgattcacggagatcaatcaaagccaaatgtcagtttctattctatggagacaccccaaaaccctggaaaagtttcaaagctagctacctttgacgacaaggaagctgatgctctcttctggtcgccaagaggcaagcacatcgttctcgctggtttgaaagctgcttcaatggccatctcgagtttttcgacgtggataagcttgagatgtagtaggtagtaggtatacagtcatgagcatgagcaagatcttggcaagatatatgaccagacgaggagtgaccgtagtgttgcgaagtcgtcttactgtttgttttcaataaatgcatctcgcagtgagaca

SEQ ID NO: 12864 - DNA, 367 bp, Arabidopsis thaliana
caggcttatcatttttgtctatagaaaatgcatgatcttcaatggtgggatttttccttgtccttctcatgtcaaacaccaaagcaaagtccccaatctgaaggttaatcgtgcttgtactcacatcaattatggcgcctgtggtagttaagaatagcctaccaataatgagagggtcatgtggttccttagcaagttccaagacaacaaaatcagtgggaatgtaaaaatttccaactctaacatgcacattctcagccaaacccactggaaatcgcatagagcgatctgctagaattaaagagatctataaagtgttgaaattggtgatgcctagtcgtattgacatagaaagaggcagcaagtt

SEQ ID NO: 12865 - DNA, 617 bp, Arabidopsis thaliana
cgtgagttttcattattctatcttcttttcactaacagagtttcgtcattaacttcacaagcttgtgatattgcatatctgagaacaaatatgctcactaaattatttttcaacgtttctattagatgaccacaaaaccaagggaagtggattggctccatggccagctcgattaacctctcctcctcctcggctagctgactttggctattccactgacatttttgagaaggatacagtatgttatgcccattatcctttttatttgttgcaattgaagctccaataatataaagactgtagtcaccttaaatcattgcttgctcatacaggaaacttggaggcagagagtagatacttattgggatctcttgagtcctaaaattcaatcagacactgtaaggaacataatggacatgaaagcaagcatgggttcctttgctgctgctctgaaagaaaaagatgtttgggttatgaatgttgttcctgaagacggaccaaacacgcttaaactaatatacgacagaggcctgatgggtgctgttcatagctggtcagtatctcccttaacctttcacttaatcaaaatccattagtatatatgtgctcttatgatt

SEQ ID NO: 12866 - DNA, 555 bp, Arabidopsis thaliana columbia
tgtgatttcgccgcggatgatgatcgcgttattctcttcatcatcgagactcggacgaattcgaggagccattaacggaacgaacggcgacataggcgttaaaactccggcggatccgagaatcgccgtacgcagtaacggacagttagggtgagatcggagccattcatcgatgcattcaaggtgaaaagcatggaagcataacggaagtgttcgtacataatcaccttcttcgaattccaacaaacaaacagcacaatctctgcaattggcggcggaggttttccccaccgcgggttttccggtgcaagcagcggcggagtagagaaacagcggtaaagttttgataacggaatcgtctaatccgtaaggtgagtaagaagagtaatgaaaagagtcgaaagggaaaggtgaaaatgatcggagatcggaggatgaagttgaagcagaggaagctgaagataagtgaaggagacggcgtcgacggcatcgcgaccttctaaaacgacggaatagaggtgaaagaaaacggcgggagatgagacgagagtaagt

SEQ ID NO: 12867 - DNA, 614 bp, Arabidopsis thaliana
  unsure (1)..(614): unsure at all n locations
ctttgacttgagattgaaattaaaaaacaaaaatcaaattaccagagccacccatttgctcaaggcggtggagaagcatgtgacggaggtggtggcagatatcgcaagggaggcggtaatgtatacggaggaggtggtggttacgagagacatagcagaggttacagatctggtggaggttgtggtggaaaaagatacggtggtggtggccgtgagggaggtggctaaggaggaggtgacgctggaagttacggaggaggcgtagtagggtttggtaatcaaagatagtgtagtttattgacactgttagattgttgagagatagggaagatgatgataaaccttataagatttaaatttgaattttgaatattgaagttgtcctataatatttgattttgattctggaaaaatagagagaggaacaagagaagttttcgtaaaagagatggtgaagaataaaagaaatattgctaaagagaaagagaaaataagattgagggcaaattggacaatttaacaagtccaagtgccttctcttttggaagtccctaaacgcnaatatttttgtaaagtgcgcacagtgtaatatctcttttttttatagcagtatt

SEQ ID NO: 12868 - DNA, 522 bp, Arabidopsis thaliana
tagtaacgtccgccagtgtgctctaaagatttcttgctcagaaacgatgatggatgaacacattaccaccgaggaaaatcaaggttcaaatctatcggggccttttttacccggccagtcacggacgttcagttaccggcttgcctgaatagcaatcaaaccgaagccacatatgcgcggccagattgttgacaaagggcgctttgttcatgccggatacgcatgaacgctgttattcggtctacaaaagcaggcaaattcaatatattgcagagatgatgtagacactggcaagcgtagccatcaggtaattttgcgtttatcttcactctcaagccacgtatatgtggctttatttttaacaaaataataaccctgggtgagttaattataatataattataagttaactaaatgttaatattggcggggtggatttatgcctttattagtaatcctgaaactctgcgtcgtattagccagtgaccaaaaaaagaattaaggtcaaccgtgctgtttttg

SEQ ID NO: 12869 - DNA, 555 bp, Arabidopsis thaliana columbia
tgttgaattcgcctgtgacccttgcaatttcgatctctgcaaagcttgctcagatcttccccagaaaatgtcacaccatcttcatccggagcaccctctagaatttcgtataggcgaagatgatcagaagactaaacacatggtgtgcgtcgtgtgcggaaacatgtcttctggagccaaatactattacgagtgtagcaagtgtgagatctacctcgatttgggctgtgcacttcagaagaacatagcgacgagttgggaagccaaagaaatgctccattacagccatgaacacttacttaaaaggtgtaggccaggaccagattccaaagactcttgccttctctgtgagcaacctctctccttcactgcaatatgttacggttgcgttcattgttacttgtcttttcacgagcgttgccttgatctaccaaccgagattcaacatcccgtgcatcctatgcaccctctcaaacgccttaattatatacaaacttttgacggtgagaaatcttgtaatgcctgtcacggccaatttgttggtgtccatttggt

SEQ ID NO: 12870 - DNA, 576 bp, Arabidopsis thaliana
gtaacgtccgccagtgtgctctaaagctggaaatctgggcaggccgtaaactgcctgaaatgaaagatgtgattgaagctgcacatgcgctacgtgaacaaggcatcgcgcatgttgttatttcactgggtgccgactgcgctttgggttaatgcctccggcgatatggatcgccaaaccaccgtcagtcgatgtcgtaagcaccgttggcgcaggggattctatggttggtggcctgatttatggcttgctgatgcgtgaatccagtgaacacacactgcgtctggcgacacgtgttgcagccctggcggtaagtcaaagcaatgtgggtattaccgatcgtccgcagttggccgcaatgatggcgcgcgtcgacttacaaccttttaactgacagcaggagaggcataatgaaaacgctgctgattattgacgctaatctcggtcaggcacgcgcctatatggcgaagaccctgctgggcgcggcggcgaagaagcaaaactggaaatcatcgacaatccgaacgacgctgaaatggcgattgtctcggtgatccacccgaacgacacgcgctg

SEQ ID NO: 12871 - DNA, 508 bp, Arabidopsis thaliana
tagcataaacattagcatactccttggaattttgaattaacttccctggaagtcctgtaactttgggagcagaggtagatgcggattgtccttccaagtatatgactttggtattcaatgcctccactttggcgttcaggtcattatagctgcagtccagcttatggtgcaattcagataacttcttagcaatttccatggagctagatgcttgtccctgtaacagctattgtagcatttgtttcatgtcagcatcaggagtagcaggaccatggttttgctaaggtgcaaatccaggtggtggttgcggctgatagttcccttgaaattgctgtttgggaacaaaacttttgttgtagggaacaaaaggttttatttgaccttgttgttgctgtggaggatacacatggtcctgaggataagcgacgtttgtgctgcagtaggagaggttgcggttgttggttttgaagttgctgtatcctttgtagccaccttgattgttgatgta

SEQ ID NO: 12872 - DNA, 564 bp, Arabidopsis thaliana
gtaacggccgccagtgtccagtgtgctctaaagttgctgctcagctaaacaacagaccgagaaagacactgaagttcaaaacaccgaaagagataattgaaaggggtgttgcattgacagattgaatctacaaccgcgctcttgatgtcagactccctgaacagttctcgataatcgggaaactcagggcgcgttatcctgtggccactctctgccatgtgttcggggttcatcgcagcagctacaaatactggaaaaaccgtcctgaaaagccagacggcagacgggctgtattacgcagtcaggtacttgaactgcatggcatcagccacggctctgcggagcaagaagcatcgccacaatggcaacccagagaggataccagatggggcgctggcttgctggcagactcatgaaagagctggggctggtcagttgccagcagccgactcaccggtataagcgtggcggtcatgagcacgttgctatcccgaatcatcttgagcgacagttcgcagtaacggaaccaaatcaggtgtggtgcggtgatgtgacctatagtgt

SEQ ID NO: 12873 - DNA, 456 bp, Arabidopsis thaliana columbia
gaatgagagagacagagccttgggtttccttcaacactacaagaagccaaggatttatcatgacatcaaatgcacaatagggttgtggataaacaactgagaaattttcaaaaactatgtagaaagtttcttacaatagttctagtctcttcttttgaagagtttgaggtattgaaccactaagattgttcccacttaaatttctgttaaaaacgaaaatgatcttaggtggaatctgaaaaacattaagaagtatgttgagagaaacttacatgaaggacaacgatttcatgttgcctagaaactccggcacccctccagtcaagttgttattcgacaagtccctaatgttagaaagagagaatttatatgatattatatatagaacaatttcttgctttcaatcgacaaaggagtcatacttacagtttttctagttgcgtaaggttttgaatg

SEQ ID NO: 12874 - DNA, 645 bp, Arabidopsis thaliana columbia
aaatggttagatataaatctatatgtgattaattttcatcttacggatattttgggagtcaaatggtaatagccactaccacctgaagcaaatgatacacccgtgagaagatcttctagttgtacattggggtcaaaatatgctggtacaattggttttactcccaaatattcagctgtaaaacaaacataaaatttaacatataatcataatatatactataacctagtatattatcaatctatcaccaattatgttcaaagtcacataatacatgttatgatataaacaaatcttccaagtccggcacaaaagaagaggaaagaaagaaagagagggagagaaagagtacgaacatatataatgggaaacgacctttccgttgctgaatctaccagttgcaactccgagtggaaaatccttaccataaggactaaaattacatttcatttctgttgttagattactattatttcctgtatctatgatcgaaccccaaagaaaaacactgccggtgtggttttgttatgtggtgatggagatgggccaggtgatgggccggcccagattcttgctggtgcatggcgtagacgtcggtgatggacacttgggaataggtagtggtcacgagagcgtcgaaatgat

SEQ ID NO: 12875 - DNA, 490 bp, Arabidopsis thaliana
tctcaagacacaccgactcccaagaaggctggaactgttagtcttcctgttgaggtacgtctacagcaggtaccttgtgtaaataaaatttaaaaataggtttttatcaagtgtacgtacaaccaaatacttaggaacgccttctattggtgtatattccacagaaggtaccagacaatgatggggatggtgaagtttcagccaaaaaacaccatactgtctctgactatgatatggaaaacaaatttttgggtcaagcatcaccacctgaacatcactacaagaaaacagacaaacgacacactacgaaaggcgactaacattgtagtcgtccatttttgcgactaacttacgactgctggacgacgactttacgacgacaatacagttggtcgttacatagtcgtattttagcgactacgatatttagtcggtacatggtcgtccagttacgactatccgacgacaacattactgagaacaatacgta

SEQ ID NO: 12876 - DNA, 563 bp, Arabidopsis thaliana
tgctccagaatgttccataatcttcaaatgaatctcaaacatgtaaaaacctgaaaaaaactagaaaagactctagaaataacaaatagactctaaaacctatacctaaaacatagttgaaaacactgaagctgagccagtacactgcggcaaattcagcaggcctccttcccaaaaagttcgatgggagctcatttaagatgtggcagaatttctacttgacaacactgaagctgagccagtacacgcaggaagagaaaccaatcctcccagcggacaacatggaccctcgtgcgcttgcgagtgttcatgcgtgggaacacggtgatttcatgtgtaagggatatatccaaagccgcctctccgatccgctgtacaatgtgtactctaatgtcgagacctctaacgagctgtgggattctcttgataagaagtaccaaaccaaagatgctggatcacagaaatatgccgcggcaaagtttctagactacaaaatggtggactcacggcctatgatggtgcaagttgaggagctgacctgtctcttccatgatatatgatat

SEQ ID NO: 12877 - DNA, 1491 bp, Arabidopsis thaliana
ccctggtaaaacatttcccctatttcagtgttccatttcaatactcaaaatctatagttggtatttgtagaaattaatcaaatatagttggttttttaatttttctttcaagaattttttttatatctattaaaattatgtttatgtaatgtaagttatctaactcttttagggcaattatttttttaatgttacatttaaatacttgtgaacaccaattaaagattttgagtatggaattcaaaattgcttacatatatcttccaaagaccaaatgaaaattgcttacacaattacactatcttcaagtctttgagactcggtgatgaagcctcaagtaaaacttcctcgtcctataaaccacactcaaactcaaaaccatagccattagacacaacatggacatgagactgcacgtgactgaataacacaccgagcccgtgcagacgagcgactcagtctctgtggtgggtccggcttgctttctggcgtagtagtcatagatgttactagcgatcacacctgagaacacaaatgacccaataggcaaagctgtaatctggaaattgtaaagagaaccgaagctcttcaggccaaaaatgtcagagactgaagcaggagcaatcgcccaatgagcgccataacccattcctatcacaatggtcactacgtagatcttccctggccaatctatggcatagtagatgagccccaaagacattatcgcctgaaccacagacattgccaacgttcttggaagtgagagtttccttttgaagaggcagaaagagatgaatctgtcagtaaaaaacacagatgcttcttaaaagcgaaagtgaaatggttaagggttttgtaccttatgattagctcagagaagtagccaccagcaacacggccgagaaaattggagatgctgatcagtgagacaaatattttggtgttgctgtacccgagggaataacaaatctgaccaagattgtctataatcgtgattcccgaacctacacctagaaccagagacataaatataagccagaagtcagcttgtcccaaagcttgtaacaaggtgaaatcttctcctatacacggcgctcttttcttttccggcggtctgtcacttctctcaattaaagttctagcctcatgctgatccacattggaagttccttcttcaggcttcactgaggtgacattattacccgagatgaaaaccgatgaaaaagggacaagaactggaacaaccatgaaaatgacaaggatggctccagaggttgtgataatcgtttgagtcatatcaaaaacactctgaagtaccaacaatcctagtaaatataccgcaagacaacacagaaaccgtaaatagccaggaatcttaaatcatcagatcgcaagttcgttctgcaacttctttccacgggtctaacaataaatagtagagcaagaaccacgactggtggtccaagagcaacgaatgcgagctcggtaccc

SEQ ID NO: 12878 - DNA, 733 bp, Arabidopsis thaliana
  unsure (1)..(733): unsure at all n locations
atcccgccgagtaaaaacatagaatcaaagtgaaacaacacaatgtagtcgcaagacaatgaaacaatgtttgttttttcagggaagagcaacagaaaagagaagtgaagctgaagggatgatgagtaactggggatggcagagaccggggcaaacaagcgccgtgagaccgcagccaccgggaccacaaccaccaccattgttctcagttgcagcagcatcatcaggattctcacatttccggccacaacctcccaatgacaatgcaacacgtggttacttttatccacacccttaacttgtaaggggacatatgagagtttttttaccatctctctctctctcaacactctagtcccctttcaaaaatgtcatttgggttttagatttttcacatacaatgatcaatttttccaaattcagatgagaaaatgtgtttttttttacatcaaaatttggtttgttgagaaaaaactttatcaactaaatggtaaaaaaaatgtgtatgtttgtggtaaattttaaatcttctcaaaatgtctttacctaataaggtttgtttatgtgaaaatatgtttttttggtaagaggactcttgaaatttggaaggtacaatttgtaacaaaaaataaaatatgaggatgaagttttgtcgttttatgtgaaggtttgatagtataagatcatttgattaaaatacactgttgnaaagaccagtaagagagatagtgat

SEQ ID NO: 12879 - DNA, 497 bp, Arabidopsis thaliana columbia
cagagcatctgtcggtagaaacctcccttagccgataataagttcagaatcaagtttcttcagactaccaaactgtctcatgtgggtagattggttccaagtaacttttttcgatttgttgccttctccataatcgaaaataagactattaattctttaattgtccatggtaattttcttatgtagattttttaaaaatattaagtctgtttatttggaaatatatatctgtcatgttatcgtttttttttgtagatgcttatggtgttgtcgtgagagtcgggaatataagaagaccggatttagttcctcaagcttcagaaaatcctacactttcgcaattgctcgagagtgagattaaagatacttggtgaggatctgccactatatagttcgacagctatttagttatatatttaaatgcacaaacatagtaaatcatgttatctttatagttggcttaattcataggacttagatgtgtgggtgaaataatt

SEQ ID NO: 12880 - DNA, 462 bp, Arabidopsis thaliana
gaagcgctgttcgtagttcgctaactcttctgctttgttcttgtagccagtgtgaatattccatctcaaatgatgcaatccctgtgttaatactcccagatggtcctaaatggcccttgaaagaaaacatttagtactgagtcaattacgaaaccaaaactgattttcttgatagagactcaaaacagaacattttaaacatatcttttgacctagctcacctgctgcttaaccttttcgagttcttgctctaactgcgataactttaaccggctttcctctaactgctgaacataagcctaaagatacaaaaaaaaagaggacttagtagcaactaactaaactatatgagattcaataaagggacttgcttctaccttctttctcaaacgacttttgcgagccgcttctcggttctgcgctaaacgccgtttcatctattggcatatgacaaaagaatat

SEQ ID NO: 12881 - DNA, 1195 bp, Arabidopsis thaliana columbia
ttctataaagctttgttgtaataatttttctagtttcaccgttctgcatttaatgcagcattcattttcttttctatctcaaggtatgttctgcagtacagctaagtggattcttcttgtgcttgttgggtgctgcaagaatcacacacagagctcaaggagtagtgtgtattgcaacaaggtggcacatggctttgacatgcgcttctgaagccgtatcacccgaaagtgacactgactcatccgacaacatatacatcaatgtgtcaccgtcactggatctatcttccttcttccaggctaggcaagctctaggtacgttacaattatgatagcatgctcttcttttttcaaattatttgcgagcaattgataggagttacattgcagtggaatatttgcgacataacaacaaggggattacactctatggttatgcactcgataggggactgcttcatacgctctttgcatttgagttctctctggtgatgtggatcctgagcaaagtcgtggttctatcttagaattcattaaggtatttatgagacaacaaaagacgctgcaaaagcttctcgtgaagcctgacttttcgaaagatggatgctctgattgatgcacaacacttggtcaccggtgtttgaccaaacaaaaaaaaaacttgatcactggtttaacagacagaaccgggttattgtcctgtggcgttgttggatttgaatgtttgatgaacatcataaatgttggttgctccaactgtatcgctttttctttattttagtatttgtccctttctctgccatctccaccgctttctaataacttagccaatacgaaacaaacctgaaaaatccatcattttatctgtaaattggtttgattttgcttctttattaaccaataaatcttgaagaagaagacaaaaaggaaaaagaattagaagtctgtagtttctagctctgttacactgacaaaacttctaaagctacatcaaaatcatcacaaactccgtgaacgtataaatccctgcttttgcaggctttaacagtgtacaatcctgagaagaaaaattgcaggtgttcgctgatgcttcttcttgtatgagagatcatgttcttgaagcttcttcttcaataactgcagccagattatgcagaatgaagtatatctcttctttccgagcatgagcatgtgc

SEQ ID NO: 12882 - DNA, 514 bp, Arabidopsis thaliana
ttcagcaataccaagaggtctttcaggataggtgagattcgttctcaactcttgtatcggctcgtgtatgatagcattaggatccggaacgtgcttccttagtttgcatttcttctggcatatacaaacgataggctacttccccaattctcttctcaattttgcatgggccaatatatcgtaccgcgagctttccaacttttacaaagcgatctttccctttcaacgcggttaccttgagataaaccatgttgccttcttggaattccatgttacgcctctttcggtcagcatactttttctgtcgatcttgagctttcttcatattatctcggataaactgaattttctccgtagtctcatcgattaaccaattactaaaactcgtactctctcctacttccgtccaacaaagaggagttcgacatggccttccatacattgcttgaaatggcgacataccgatgcttgagtgatagctgttatcgtaaaagactcaaccaaagacatgtag

SEQ ID NO: 12883 - DNA, 577 bp, Arabidopsis thaliana
ctccacatttgaatagtacaaatcgttacccatctaacgttgagtatatcatgtttgtattaatgtagaagctcgacacttgctgaaataaggatacgaacgaggtacggcaaaaacaggaggggcgataagggcgttccgatcgagtgtgattgcaatgctaaggttgtcgttgccacttctcctgatcctgttacaaccagattttttttttccagttgtccgtacgagatatcagatgtaagcatcttttcttgagttaatgttctttattttatttctttcattttgtatccctatgaatcaacctcctgttttttttataagggtcccggtcaaggatgcggtttcaagagatggtagactgttgcattgtgtgacgagtttgacatgataaaagaggagacgactgagatgaagaaggatgtggaagcaaccaataagcgcgtcgagtctcaggcagaaaagatctttcttatggaaaagaagtttgaaacgctagagaagatgtatgagagcttgaacaagtatctgtgatgttagcttaatctgtttttccaatttgaacttctttgta

SEQ ID NO: 12884 - DNA, 1569 bp, Arabidopsis thaliana
actgtctgttccttggtgacctcccaaaataagctaagcactttgtattcatcatgaaaaggatcatgtccaaaccaattccacacattagtcttagatctcattatgggcaattccacaatctgccttgtgctagggttacaaactttcactcttctcccagttctgtaacacaacaaaccacgagcagcgttcactaagtagcctcccattatcggtatagtcgaatgttggtcaatcacagagacagatgtgtccgagtgatcatgcctcgatgacgatgatgattggagcaacaggtatttgctctgattttccctgtccacaagatacgcgaacaaacaacttggtgatgagggcttaaagaaacggttggtgaagtatcgagaggtgataagggaaagccagagctttgagacgcacttgaatctcatcagagatttcgccggcaatctgattaggatatcgatcaacatttcttcagggatctctggtaagaacaccacggtcttcttctgcttctgcttttcctttttcctcacggcaacacataaagacgagcccatatttgttcgcagaagaatagagaaggagctatagagtacactaaggaaaaaaaaactcgaacatttcgtttcccttaaaaggttgcatctccaacttgttctctctgtttgtatgttgcggctctcacaagctaacgctgctgcatattgtgtaaacccttgctctctctttcctacgcggaaaatgatttccatttgtaattgggcttgttctcagattttggcccaactgaattcaatgggtttagatataggctaaaaaaactgcatgcaggtccaagagagatattgactggaacccaaatatagagatattggtaagtaattaatcaatccaatgttctctatgaattcctcaagaaaaggatcattgtttctaggactcgatgtggaaagcataaaatataagcacttaaccttcagctgagtggccaacagcgttacaaggtaaagagaaagttactaattttagaaacattaagatcataccctgatccaagaaaacattccagttgtttccactttcgagacattacatatccaagaaatagcagggcttgtagtcgatagcatggacagagatcgaatacaagaggccaaagattttcttgacatggtggttgatgaggtaacaaatttttcaacctgtcttttaatcattgatgagcaataagtcacataatttaacgttgtataacagatacaagtgattgaaattccatttaataatttggaatgtaaaaacaaaatgacaaactatacttaggtttccaagtacatgatgctctcagtatcatcccataaagtagccaacaaggaatcagtctgtttaaagctaccaagtaatgatggacttatttggatctttcgagttatctcattaccctccaaatcataactataaaagtgtaggggttgattcccgagagatttgcattctaagcaaaccttacactgcgacctgtgccaccatcataaagccatagtcgtgggggaaactgta

SEQ ID NO: 12885 - DNA, 487 bp, Arabidopsis thaliana
cctggaaacaaaacttgagttattggcttccaaagcagaggtcaatcttttctgcacggaaaaggcctccagtctgtttgaataacaccatggcgttgaagagcttcatgatggttaaggaaatggagccacgtttaaacttgtgcctctcctttgaggccatgcaggatgatgaaccctagaaacaacttgtttgtgagcttggggaaagttctaacaatggcaaagacgacgcaaccatccttgcaaatgtacttactgagttcagacttgttaaggataatgactgcaccaaccaactagaacttgatcttatgtaataggtcagctccacaaggccacttaatactagaactatcatagatgagcttaagtatttaagaagcgtacatgtaggctcatagaagggctcgagtttagatacttaggtgaaccaatcagacctgatattaatgcatgtttatgactagagatctgtgggctagcg

SEQ ID NO: 12886 - DNA, 526 bp, Arabidopsis thaliana
ataaaaaattaggaaaaacttgtgaattcttcattgtcggtgtggaattcctccaaataagttgaaaatgctggtcattcggttggaaaagacactatcttcaccaggtctgaacagtctgtacaaaatgctacttctttgttgtcgataccaatcatacacttcatcgcccagagtagagcttcgacttctgtatagaggagagaaagacttctacgcatattagcagctcccatggttggcgagtctccatttgatgatgtgtagaaccaccctaatctagaaaacttatcgcttcctttccaagatccgtccacaaaacaacgaaaaccagaataaatattatcatattatattttttcgacccgaatttgtttttccgatccatggaaccgtgatttttggtattgagctaactaccacgattgtgcctctttttctgctaaacataatacgtctaacggtttttaccatatttcaaatattttttcgttcttgcttccaaatatccaaattaccatggata

SEQ ID NO: 12887 - DNA, 465 bp, Arabidopsis thaliana columbia
gaggcatagaggttcatcaagtcttcaaaaaagggaggttatggaaatggaagctatgtgataaatgcccctggtttgaaatacttgaacatcaacggggttattgatattgagtcttgtttgattgacaaggcactagagttagaggaggcaaaaatcagtaacgtttctggtataaccaatgagaacattctggagtctctaacttcagccaaacgtcttatcttacacttatcaccccttgaggtaagcttaagattgaacattttcgcttggttattttctctgcaaattgggctaacactgtttttgtgtatctaaaatgtatgtaacaatgttacactgttttgtggaaatgtacttaggttaaagttcctactggtaaaatcttcgatcaactaggctgtctagagctacttacacacgaaagagagtggtggaactgctttcgatcatgcttgatag

SEQ ID NO: 12888 - DNA, 522 bp, Arabidopsis thaliana columbia
aagctttgacatggaaagacaaatcttcttcccttgagtccgacctccgttcttcacatgataccaggcaaaaacctagaggatcaactagacaatctctccttcgaactcatgaagtccaatggcgagttgcaggatcaataccagaggtatgacaagatcgaaagaactctcaacttctcgggatagactttcagaatccagtgcctacgacttgtccaaccagctgtccgaattgcagctcaagtacaaagcggtagcaactatcgggatgctgaattagggaggtcagcatcaaaggccaggaaagaagtgaaaggtcgcgggatggaattgatccaaggagcaatcgtcttcattcaaaccaagaaggctaggacggagctggagtcagacatcaaggagtacgagagcaatctcctccttttggaccaaacccatgaagatgacttctccgaggaacaagagaggaatgagttgaagaccgtcctggaggagaagcgaagtcgtttagctgccctt

SEQ ID NO: 12889 - DNA, 475 bp, Arabidopsis thaliana
tattaacacatctcctaaagctgatagacttcacctctagagtcaacaacagagacccttacaactcagcccacagatgagacgctgtagagaatcagtattgattgacactacacaccctgtcgatcgacaccatcgtgattcacagacatatgcttctgcacctccttcacagcccacacctatttcaattcccagtgataggtactccactatctcttctcctactgttccttcgattacttctttagaatcttcgaagtgtggttcaccggtaaacgagcatcgagtttcttgaaagcttgtttcttctgttgatcttgcaggacaaggagggagtatcgatttacacaccgccttgaaaagcgagattgcagcacaagtcctccacccctctatccaagtcctgaactccgccagtcaagctattgactctaaacaaacgctaagtgggagccaaccactggtatgattt

SEQ ID NO: 12890 - DNA, 535 bp, Arabidopsis thaliana columbia
cggtttaaattgttaaatggagaaatgaatgggtcattaatctataaatatgaagatataaagaggaaagaatacggtttaaattgttaaatggagaaatgaatgggtcattaatctataaatatgaagatataaagaggaaaactgtcaaggagcgggtaggggtcaatttgttaaaatataaagttaggggctgatttgtaaaacaatatgaatgaacttataatgagggccaatcccaatttatcttcttcactccaatcacatcactgctaagactcattgaattcaaatcgttatgtctacacattcatcaatctcgcaaccgccgcattcactcgccggaagagtcgccattgtcaccggctccttccgtggtattggccgagcgatagggtccacttagctgaactcggtgcgaggattgttatcaactacagctctaaagccgcagacgcagagcgtgtcgcgtcggagatcaatgatattcgagttagggaagaaatcgctggaaagggactaagagctattgtgg

SEQ ID NO: 12891 - DNA, 546 bp, Arabidopsis thaliana
ggacacaagcaaactttaaatgtccatctttcttggattagaagctaaagtcttcgatatcagtcaacccaagacctttcgaatagcagccaccagctcttctcttttcgacggctccacctgcatcacaaatatttacttaggcctttaaaaaccgagccatacagataagaatactagaggaccaaaacctctgtttttctggagggtttcgttttataccttgtttagaagattagcaagtccttgtggcagagcttgcaaatctgaggaattcccaatctctgcaagttggttcagtagtttctgcgctctcaactcgctcagcttcaactcgtagttactaacattgtccttccatgtaaagaacacttggtcgtctgtccaagcttcttctttcccctttgcaatatcagagttgcagaaccaatcctgaatcagacgcattgaagatttatatgctaagttgtctccagatgcttctcttacgtttttcacaagagagctctcagcgattctcctattgagctttttgtagaagaagga

SEQ ID NO: 12892 - DNA, 566 bp, Arabidopsis thaliana
tagcatgaaaagcaatgggaaatggtctttcttagaggcagcatttaacttcctatagtgaatacacatcctatgtccagttattgtcctagtgggtataagttcatctttagcgtttttaacaacttttatacctccctttttaggaacgcaatgaactagagatacccaagtgttatcagagatagggtagataaccccaacatctaataatttaagtatctcttttttcacaaccccttttaagtttgggtttaatctcctttgaagttcaatgctaaagtaggattcgttttcaagatggtttctatgggtgcataaggtgggtgaaatcccataatatcatctaacgaataccctattgctttcttatactttttaagctcagttatcagtaggtttacttgataagtagttagctcattattcattatgacaggataagtagagtttagtcaaagaaaaacgtaccttagccgttttggtagcggttttaaatcgactttgggcgctttgagttcagaccagtcgtcggatactaagttggcttcagaggaggggttgtg

SEQ ID NO: 12893 - DNA, 542 bp, Arabidopsis thaliana
tagtaacgtccgccagtgtgctctaaaggcgttctgaaaacgggtttactttcgcctggctgccacgtgcgtaacgctgatactctttagcgaatttatcccgcgtggcctttgcctgctgagtattcgccgccatctcatctaactctgcgcccaacgcccgctgtttatgttctgcggtaacgatatccgccatcagccgatccacccgcgcctgataacgcgtcgggtccagtcgaaatagcacctcaccttttttaatcagcgtatttttcttatccgtcacttcaatcaccacaccagtcacctgtgggacaacaggaatagaaataaccgctttttgcgctttaaaggtatacggatggttatagttcattaacagaattagaccgctgacaataaatattccacccagggccgctgtgggaatggtccatttatttacgggaattttgaagatcttaaacattgcccatgcaaaagccacataggtcaaaataatcagtaaatcataagtattactcggcagaagaggatttgat

SEQ ID NO: 12894 - DNA, 556 bp, Arabidopsis thaliana
tccccctgcagcccgcagaacttctcacctcggtgttcgcgccttatccgttcatgaaatggtctatggatatcgttggaccactccacgtttgaactcgaggagtgaggttcctactcgttctaactgattacttttcgaagtgggttgaagctgccgcctactccaatataactcaagttcaagtccgccagttcatttgaaaagaaatcatttgtaggcacggtttgccgtacgagatagtgaccaacaatgggcctcaattcatttctgaacagttcgaaactttttgcgcggaatggcaaatccgcctcagtcgatcaacacctcgctatccgcaagggagtggtcaggccgaggcaatgaataaaacgatcatctcaaacctcaagaaaaagctaagtgaatacaagggagcttggttcggagagttgcaaaatgtattgtgggcaatccgcacaactcccagaagagctaccggtgaaactccttttgctctcgttcacggaatggaagtagttacccagctgaaatcaaagtcccgagtacaagaagg

SEQ ID NO: 12895 - DNA, 475 bp, Arabidopsis thaliana columbia
gctctccacaggaaatgtttgattttggtgttgtcttcatcttccatatcgcttccttctgttttgtttctcctggaggggggtcaaattccggattgttattaggcagatgagtagctagccagtaacccgatttaactgtatagacaccatcatccatataattccaaccaagcaaatctggtgatggctgactagttagacggagttgaagtattagcctagcatcctcctcatgaaacaggttttcgacaagtgatctgttccatctctttggtcgtgactcaattaactgattcacatgcgatacgtttggagtgatatccttcaagacatcgtagggctctttggggatgcgttggtaaccaattatctatccagatgtttgtttccaatccttcacctattagaaccctcagtccctttttaagcaaatctcgtccttccaaaattgatctctagatataggatggtt

SEQ ID NO: 12896 - DNA, 486 bp, Arabidopsis thaliana columbia
ctgaaattttctcaagttgttgtttttattctaaaacatgaatttttgtgattttttggctattcatagtgtgatgaattgtaaactcttagttatgttttcatcattgttacaggaagagtttgatgaacaatgtcacgaaactcaggtacatcttatttgctttgtcatccacacacttgtgaagtaagagattttttcaaaattcttctgactgaaacgctttcccctttgcaggtcggaccaattcttgatacagtcgaggagctggtcgaagaacagagtttggatcccttgttttctgataagtatgtctcatgcatattggttaatccattttgtttactattgtccatttatggtattggcctcaattgtaagtcaagtcccacattttggaattctgatattactgtcaccatgactccatctcaggactgatgtaatgggaatagcatatgatcttacaacatctaagaaggacga

SEQ ID NO: 12897 - DNA, 517 bp, Arabidopsis thaliana columbia
agatttaacgaaaaggaggatttcattattgcctgagcttcatattcatcatctagaagaatatttgctgactttatatctctgtgaatgattttcggatgacctgtaaaataaaacaaggatatgatttttggcttctgtttaaactatgaagtgcataaccaaagcacacaactaagaaaatgtgaaggcattacttacagtcttcgtgaagatatgccaaccctttggctgatcctatagcgatccggactctcttagaccactctaaaactggcaaaccctttcctaaagcgtaaagcgagtcagtctaacacgtaaagctaaaaaaaagtcttatctataacgaaaatggtaacaagtcactcaccatgcaaatgatgctccaaggtttgattagaaacatactcatagataagcaatctatgctggtctgaaatgcagtaaccaaccagagagaccagatggcgatgatgaacgcggctgatgatctcaacctctgctttgaattcacggt

SEQ ID NO: 12898 - DNA, 740 bp, Arabidopsis thaliana
ttatgaaatcacgattaagaaactcgagtttgaagttacggagaagcaattgaagatcgatgaattgaagatgagttttgaagagagtttggttgtgaataaatcgttggagaagaaactctcagcgagtggatcggtctctgtgtttgataatattgaaattcgaaatttgaatttgagtagttttgttcaggttttaggttttacgttgagatctgtgagaagcttcgtgaaattgattgtgaaggagatggaatcagcgagctgggatctagacgccgccgcttccgccgctgtttcggtgaacgttaaaaacgcttccaccgttttcgcgaggccgagtcaccgttgtttcgcgtttgaatcgtttgtttgtgggaaaatgtttgagaattttggagctcctgatttctcgagacgtgaggaattcgaaaagttgagatccgttgacccgattcagtacttgacccggaacccgggttcgtcttttgccaggttcgtggttcataagtacttgagcgttgtacatgcgaagatggagtgttctttcttcgggaacttgaaccagaggaagctggttaactcgggtgggttccggactcgggtttcttcgcgacgttttgtgaaatggcaaaacggatctggcttttacactgcttagcgttttcattaagcggaaacgtcacggtgtttcagctcaaacgaggttgtagattcctcaagtatatatggagagtgtg

SEQ ID NO: 12899 - DNA, 534 bp, Arabidopsis thaliana columbia
tgttgatttgttctcctgcacataacgtttcttatgatatagttccaaagatttatcacctctctgattgattttatgtctacgaactctctccaggtacatccagagcacatgtgccacttcaggcgaggggctttacgaaggtcttgactggttgtccaacaacattgccggcaaggtaaattatcacaaacaacaattttgatttgtggatcagtattttgaagcaaatcgtgattcttgtttctgtgttcttgttactggttgtgcaggcgtagagggaaagttcgtggtggagttgatttgctgagcaaatctggatgcaggggcaaacattatctgaattttttttttggtttccgttttcgttattgttctgcttttttttttgggatatgtcgatggattttgtgattgtacgtagaacttagaaaaaaactaccttttatatagctttggtaaacctgtaaacgaagatttcacctactgctattcgtggttttggtcacattttacttgtgcactttgaatcat

SEQ ID NO: 12900 - DNA, 808 bp, Arabidopsis thaliana columbia
tctgaatttacggttagcttttggttacctgaatcaagatctggttcgatatgtggaggatctcacttaacttggtttaaatcagatagttcaaccggaccaaagaattctattgttgtcaaatattagatgatgggcctattatacatggaatgtgggtcattaaatgggcctaaatatttttggaaccagctccgatcttcaacttttttttgtctcgtctccataaaatccccaattcacaaccctaattgatcggagattgtccaaactctctgacatttttgccgaattcgaagcattccttctatcttctccgtcttcttcgcagaatcgcgttatgcatctcaatttttagattgtaacttagggttactgattgttgtaatgctctgaattcccctctaacgaggatttgttgtcactgcaatcgatttttgccgattaggtttaatttagggcattatttgcgtacctcttgtattgtatagttctttggaatggagaatcctcgtagaccgtttgatagatccagagatccaggtccgatgaagaaacccaggctcagcgaggaatcaatccggcctgttaattccaacgcgcggcagtttttgtcgcagagaacgcttggtacggctacggcggtgacagtgccacctgcttcgtcaaggtttcgagttagtggtagagaaactgagagtagtattgtcagtgatccgagccgagagcttaccagccacagccggttcatccacattatgagcttgtgaatcagtacaagtctgcactggctgagctcactttcaac

SEQ ID NO: 12901 - DNA, 1159 bp, Arabidopsis thaliana
tgatgatgacatggatctctttggtgacgagaccgaagaagaaaagaaagctgcagaggagagggaggctgctaagaaggacaccaagaagcctaaagagagtaagcctcttaattgaattcgatagtacatatacaagcatgtgaattagtaactgcatcttaaattttaataagggttctaactctcttttgaattttgaactctttgttaggtggaaagtcttctgtgctcatggatgttaagccatgggatgatgaaaccgacatgaagaaactggaagaggctgttcgtggtgttgagatgcctggtcttttctggggagcctgtacgtttaaactttcaatctttatatcagagtaagcttgttactctttgggtgagacagttttataattgatattttttttctccctgtcttgcagcaaaacttgtaccagttggttatgggatcaagaaactcacaattatgttcacgattgttgatgacctcgtgtccccggacaacctcattgaagacttcctcacctcagagcctaacaacgagtacatccagagttgtgacattgtcgctttcaacaagatttagagacttcaaatttctccttaccgaaacatatctgaatttcaagttttgttttcgtttgtgttgtttaccgaaatgtttctttcctagttgcaagaccgctttcatgttacaataacactaaattttcaatggttactattccgttgcatcattgttaagaaacatttagatactttgacaaattctctattacttcagaaataattacgtatcctgcagctcccataaccagagaaagggtgagttttcctccgggaacaagttgaggtaatcttgtcactgttgatgatgagactatgtacctatctgaccaagacattgctgctgggaggattccgaacaataccagaactacgaaagagaacatacagttgttaggttttcatgtttgaacttgttgattcaggtttctcaagaagagacttacctccatatgtcccggcaaaatctaaggccttgaagaaaatctctggatccagtagggactgaacaagcggtggaacgagagtaagcaagtaaagaagaggcttgttctggccactcgggagcttcaatactgaaagttttcga

SEQ ID NO: 12902 - DNA, 378 bp, Arabidopsis thaliana columbia
atcccccaacttgttagatgcagaattgtaagtgtcaacatagtttttgctctgtttttggtaatactagggaatggatgaacattcaggttcacaaatcagaaagctttattcagatgtaagttcctctccaacctttatattttgccattctatgtctatatgcttaccagatccattcagaaacattagactagaccttgcctaatattcaagattgtctaccaaaccttcctgattgagttgcttatagatctattcttggtccagttagctcaactgtggccccatagtttagttgacaatcacgagatcaggcgtgccatttgccgggaaaacgaaaggcggagagcattgggaggaaacattgggaaggag

SEQ ID NO: 12903 - DNA, 596 bp, Arabidopsis thaliana columbia
taacggccgccagtgtgcgcggggaagaagatcggcgagaccgtgtacggcaatatgttgaccatcgaacaaaccagggatgagaagttgaacgccgtcgagaaaaatggaatcgttggaggaagaatgcttagtgagaaggaggcgatgagatgggagaagcgtcgggagagaggaggagttggggagagatcggagaccagaaagtgagagtcggagaggtaccgagtggaggcggagagtagaaacgtagaacggaagagaatgagtcatgtcgagatcgaagagcatggaatcggtgggggcgaagagagtgagagactcgtcggagagtagatcgaagagaagatcggaggtgatgatggcattggcgaagagagcacgacctctgacgcggaggatggcgatggctctttctaactcttccaaaggaacgccggtggagggatgagggagacagaggatgatgagagctccgagaaagatggctctgaaacaagaagcgctcgagattttcccattgttgtgatttgtgaggtcgagagagtaaatggaagacgagaaagaaaaagcggtatgattgggtttatagggga

SEQ ID NO: 12904 - DNA, 579 bp, Arabidopsis thaliana columbia
agcctaaagacttaatgaagcagattagagctattctaacttggttagagagcagttagtaatagttttcttctaacgacatacctgtaaatactgatgatatattgcaaaaggagcagagtaggacagtagtgtcaatacatccttagctacgatccatgggtcttggtcttgcgcaccatgattagactgcaaatcagacaattatatttaagtgatgagccaaaccattttcattcacaggaacacttatattacttacttacctcgaaaaaccgttttcttgccacatctctattgtttcttttgaagctttggctccagcttttgcggctttgataattttgctctctggtacaacaatatctactactccagcctcagttgtcacagatatttcttcaaccataacatcagatgtagctgtttcctgcatttttcagttaaaaccttctgttacaatcacaatatatttctcaaataaagactcaagtgaaacagtataggttggcaacttgcattaatattgttctcagctttgcaaactccttcttgttgattgttccttcagtagacgca

SEQ ID NO: 12905 - DNA, 486 bp, Arabidopsis thaliana
tgtctaagtatttctttttttttggcaccggtgtcgaagccgttcttatctgctcataattgcacatcccatacaacatctttattggaacagaagctaaacctcatatagatatatcaacccaacaccttccgaatcgcgtccaccagctcttctcttcttgaaagatccacctgcatcacacataattcatttagggggcctccaaaagctcagttttctctagtgtttgagttcataccttgtttagaagattagcaagtccttgtggcagacctgcagatctgacgaattcccaatctctgcaagttgattcagcagtttctgtgttctcaactcgctcagcttctgctcgtagttactaacattgtctttccatgtaaagaacagttggtcgtccgtccaagcttcttctttcccctttgcaatctcggatttgcggaaccagtcctgaatcaaacccatagcagatttatatgataagat

SEQ ID NO: 12906 - DNA, 382 bp, Arabidopsis thaliana
  unsure (1)..(382): unsure at all n locations
nnnnnnnnnnnnnnnnnnnnnnnctaaagcatgacttcggtgcaattccacagccgacagtatagtctggatgacagatgatactagtatagatgtgctatcagcgtgctctggaatggttacttgtcagttcagagcagacgagttaagcgcataagttttctcttgtatgccttgagtagtccccgactcaaggtgaataccttcggacgtagtgcgatgcgcgattctagctatatgaaattagctatctgaccggcaccgcaaggggctggttacgtcaaccccaatccgatggtcggcgcagtgatcgttaaagaggatcgcatcatcggaccaggttatcgtgagtgtcctggtgggccacatgctgagcgttatg

SEQ ID NO: 12907 - DNA, 550 bp, Arabidopsis thaliana
gcagcggagtggagatatttccaagagttacatccctggtttgccgaagaaccatgtaacgtttatttcgggttatgtactgatgggttcaatcgatttggcatgtctcgtaatcattcgttgtggcatgtgatcctgactccatataatttaccccctggtatgtgcatgaatacagagtacttatttcttacaattctgaattctggaccaaatcatcctcgagctagtcttgatgtgttcctccaacctcttattgaggagttaaaagagttgtggtctactggagttgatgcgtacgatgtttcattaagctagaatattaatctaaaagcagtactattgttgacgattagcgactttccggcgtttagcatgttatcaggatggactactcatgataaattgtcttgtccagtttgcatggaaagtacaaagtctttttctctacccaatggacggaagacatgctggtttgattgcactgtagatttctcctcatggccatccacccgtagaacagaaaagactttgtgaaaggaagagaagt

SEQ ID NO: 12908 - DNA, 781 bp, Arabidopsis thaliana
cggcctgctctcgttctgattaccatgaagaggttatcgaacttttcaaacacatgcttcaatcaaacatccgccctgataagtacacattcgttagtatcttaagtttgtgttctaagctctgtgaccttactcttgggagttctattcatggtttgctcaccaaaacagatttcagctgcgctgacacatttgtatgtaacgtactaattgacatgtatgggaaatgcggaacattaggagtgtaatgaaagtctttgaagaaacaagagagaaaaacctcattacatggacggcattgatttcgtgtcttggcatccatggatatggacaggaggcacttgaaaagtttaaggaaacactgtctttgggttttaagccagatcgtgtctcgttcatctctattctaactgcttgcagacatggtggtatggtaaaagaaggaatgggtttgtttcagaaaatgaaggattacggtgttgaaccagaaatggatcattatcgttgcgccgttgatcttttggcaagaaatggttacctgaaggaagctgagcatctgattcgggaaatgcctttccctgcagatgcgcctgtatggcgtacatttcttgatggttgcaatagatttgcagaagaacagagaaacactctcaatgtcgtctcttttcagtagttgaagaaagtagaattggaagagatgtgcgaattttttgatatttatctgatgtttctccttgcaaagctcatatctgtatatggagaaatgaaaccctttagagtt

SEQ ID NO: 12909 - DNA, 605 bp, Arabidopsis thaliana
tacttcagctcctaagcaccctggacaacttcctggaaaatctgttcaaaatccaaaggagtatgcccatactatcaccatagttaatacttctgccactgcggacagtgggattcaagaaggggaggttttgagaccaaaatcaagacaggagattgaactcgacttctttgctcggcttgtcgaacgagcacatgacccgagcaacccaatccctattccacctcgctatgaacctaaaccatactttccagaaaggattgcacaggttaatgaaaggatcttccagaaacacaagatgatgttcatcaagtgtatcaaagagttagaagagaagatacccttggttgatactcccaaggaagtgatcatggaaagaccccaagaagctcagcaaatagttgaattgagttttgagtgcagtgctatcattcaaaggaaggtgatatcaaagaagctaggtgatctaggtttctgcactctaccttgttcgctaggacccttagtgtcaacaatagtctttgtgatttgggacctcggttagtttgatcctttgtctgttgcaaagagattcagactttgaggattcagcaaatgaggatgag

SEQ ID NO: 12910 - DNA, 565 bp, Arabidopsis thaliana
ctgatctttctaaatcttttccattaagaaattcttcacaaaatgctgagtgtccattagaggtatgtattccatagtccagatgactttcttataagcaggtgcaacattgtaacttgacccccccccttcttgaatcatattgtcttcagtgattcgtggaggcatacgatgagatggagactcatcgtcttgttgaatgatgatagcgtgggcagtagcataatctttgggattctgaactgcttatcttagaagttgttaagggtgtttctgaatagaggaagatgctatatgaccttccagacacttcacttttgaattgagagcatgaaacttgacgtttagatcattgtaatcttgttgtgtagttcagctacttttttcgaaagtcaaagcttcagtggcttgtcccttaatgatatgttgaatcaattgctttacttcaagatcttgtgctgttggggcttgttgtggttgttgtgtgaacctggtggtggattttgctgttgataacttcgttgaactacttcttaggggaaaatacttggttatagggacatat

SEQ ID NO: 12911 - DNA, 456 bp, Arabidopsis thaliana columbia
aaaccaatttaataaaattattttttttccaaatttcttaaatatacaagcaatgaaattgagaaaaagtaaactcgtcattttcccgccaaaaacgtaaacccgtgattttcccgccaaaaaacataaacctgtgatttttccgcaaaaaacaaaaactcgtaattttcccgtcaaaaaacgtaaacccgtaattttcccgccaaaaacgtaaacccgtgattttcctgccaaaaacgtaaacccgtgattttcccgtcaaaatgtatataagtcatatatatgtataatccttaatacaatctagcgcctctatatataagaagacaaagaaaagaaaccctaaaccttgattcactatttttcattctctttgatagctatggaagcggaaatatcctttggcggcgaaatagacctcaaaccgaaatcacaagatgctggatcattcaaaaa

SEQ ID NO: 12912 - DNA, 503 bp, Arabidopsis thaliana columbia
tgctatcatacttggtttgcatccaagtaatcttgcatcctccaacaagttctgagcatatttcctctgacagactgaagtcccttgtgaaaatcttgaaatttctaatccaaggaaaaatctagcaggaccaagatccttaatcttaaactcagaccttaacaaagctttaagttcttccacagccttatcatcattacttgcaatcatgatatcatcaacatagaccaaagctgccacaaaagatgcagaagtaaacttgatgaataaagtgttgtcagcaggaatttggatgaagtttgcaccaagaagaactgatgacaatcttttataccattgactgtgaagcttgtttaaggccatatcaggatttcagtaatcgacataccggattagggggaagagatacacctgcaggtggggtgtatccttgaggaatactcttgaagatctcaataagctctccatgctagaatgcattggacacatccatttgtgttaga

SEQ ID NO: 12913 - DNA, 504 bp, Arabidopsis thaliana columbia
caagaaacatttaaacagggttagggacctacattattcgaatagtagaacaagattgtatagaaaaatggtgtaaaaaacaatctctttacctctttgatccgtctttggataaatagaagcccatcgttgcttaagcttctgaaagtacctccaaatttcgcactctgcggtattacgttttgagcatgacctccttcaatatatccaactgtaaccacctgagaaacataacaaaacctgtctccgctgatttcagccacgattctgattcatcaaacaccaatgctttgaaagtggaaagcaaacttacagctgcttcgagtggatccagttcccgcgaaacaatatgttgcaaggcaactacagcggaagaagctgctagaaccgggtctttagagaagtgcggtgtagctgcgtggctaccttgaccgtgaaccgtgactgtaaacaatcctgcacctgcaagaacggtcccaggcctagaaccaatccacctgatgg

SEQ ID NO: 12914 - DNA, 519 bp, Arabidopsis thaliana columbia
tgaacctcgccgaacagtaataaacaaaaaaaaaaaaaaaaaaaaaaaaaaaaaaataaaaaaacaacaaaacaataagcaaacaaaattaataaataggtatttaaggatgataatatccacaatattaccgcgggtaaatctgtcgggcatcgcacaatcctggtaaataaaaataacatttcacatttatcaacaccctatttcgcgacaattgtatgtgtcagtttcacgttttccccctttggttaccaaacggtgggacgagcagaacagacgaaagatgcggattctgcggtggagacggttactgcgatagctacggcggtgccagacatttgggctacggcgacggcgacaggcggatttcgcgttggtggtgagaggctcagacggagcaagagtgagctggagggtatggcttcactagcagccgtcggtgcgtgacgtgctcgagtgggcggctcgtggccgttggataattttcacgtctagtggttgggattgtccaggtggcgt

SEQ ID NO: 12915 - DNA, 549 bp, Arabidopsis thaliana
atcctctagatccttcttgaatcttgaatcatacaatcctcagtattgggagtctgatgacttggtggaaactcatcttcttggtggatggtgatagcattagcagtagcatagtccttaggattctggactgctttttctggaagttgctaaggatgcttcggagcagaggttgatgcaaattgactctccacatacttgatttttgaatgcagagctttgaacttgacatttagatcgttgtaagaacaatcgatcttattgtgtaattcagctatcttcttgtcaaaagccatagctccagtagcttgtccttgaatgatttttgaatgacttgcttaatttcaggatcttgagttgctggcgcttgttgtggttgttgagtgaaccctggtggtggattctgttgttggtagcctccattaaactgttgtttagggacataaccttggttgtactgaacaaaaggctttagactgattctgttgtggtggatacacttgatcttgggggttagctacattagtgcttatgtaggagaggtttggg

SEQ ID NO: 12916 - DNA, 613 bp, Arabidopsis thaliana columbia
ctataccatatttcgttaccttttaccacgatttgatatgacgaaactggtttctcccaaaccctaacgattatgctccttctctttttcgctctttttctcctttataaaacaaaaagtggctaactaaagccctaatttcgagtttccttcttttataggcacactctagggtttccaattaacccaaccaattagaccggttgatttaaaaacaaaccctaaccgattttccggtttacgggcgttacactccctgtctgattcctctttcaggtttaaccaggcctttcgcttgcccatttaggaggaaggagaaggagacagtactgacacattgcataatccaatggacccactgttggctgaatcctaatcttacaaatactgccttgataaagtcccactccagcctatcatatgccttgctcatatcggtttttacagccatcaaacatctcttttgaggtccagaagatttcacgtaatgtaaggcttcatgaataatcataacattatctgaaatagctctttttgggataaagacatattggttttcagaaatgcattcttttaggcaaggttgcagtctctttgccaatagcttagagat

SEQ ID NO: 12917 - DNA, 440 bp, Arabidopsis thaliana
cgacccctggtcagtagatgcttcacgacttcaacagaccagtcaaccccgtggtcgagtagaaaacctcagcattccacattaccactcgacaacgtcatcgagtaccaccaggacaaccactcgatcacatcactcgaccaccttgtcgagtataatcatgcccaccacatcaccttcactcaatcactctaccaacaggtcgagtatcaccatcatcattcactcgaccaatcactctaccaacaggtcgagtatcaccatcatcattcactcgaccaatcactctaccaacaggtcgagtatcatcatcatcactcactcgaccaatcactctaccaacaggtcgtgaatcacatcatcattcactcgaccaatcactctaccaacatggccgagttccacattatcatcactcgacaaatcactctaccaacatg

SEQ ID NO: 12918 - DNA, 559 bp, Arabidopsis thaliana columbia
aacagagacgatggtaaactaccaaccttgcaatagtttccatcttcaacaaggtcttcaagatttgactgcattactcttgcatggcggaggtcagttagtataggaagcatatcctgcaagtaaaaagattaaactttcatgtcgctcttattacatggtatccagagaagcaaacaggcatgctaggaataataatctcaacagtatgtttagcaattaaaacaaaaaattaggctaggttacacttagattgtatctaagaaactacttgctagaaacatcctgttcgtaactttagagattaaaacaaaaaagatactcggccactttctgatagatgataatacagagtaattttgtacacaaagttctagagcacattgatggtgatttcagaaggaaactataacacatgaaatatttcaagaaagcagattaaagaaacaatcagtggagcctagatgtctgaaataaattgagaagcctaccagaagagcttgtttctttttggaatgagtgtgtcaataagatctcttgaagcctcattcatagaaga

SEQ ID NO: 12919 - DNA, 560 bp, Arabidopsis thaliana columbia
cgggctaccactaaactgatgctgaatggtctaacgggcttagtacggccttagagaagagatgaagatgtccaattcccaaggttaagatcctcacctaagcaaatgctcagtcagacatcctctgagctcactaccaagcggctcggtctgcttgcagtaccggtctgcataaccggagtcgtgatgaccagacaaaggaacatcttcttgaagataatccccacagtcgataatgatgttatgcaacaaacaacacaccagtattatactaggtagcttcctcctgtctggtctccacataactttgctcagaatcctccagcttcctttaagctgttgaaaggcagtagctgcgactgacctcaccttctcatgcctttcgttgaacgccaccatggaatcagagggatgatcgctgtcgtgaggagttataagccagggaagaagcgggtaactgatccctccaacaacgtattctctaatctgggctccttgggatagagttttaggattgccgtctaaaatctgagcgtttcacagagtttgaagaagcagag

SEQ ID NO: 12920 - DNA, 540 bp, Arabidopsis thaliana
caaaaccaaaccctgaatgatcataaatttctgatcgttgactaaacttacaatctttggtcagaattatttttgcttattgttgtatagtattcttttaactttttagttgttgttgtaactagagaaagagatagtagaaaatgagtgtattatttcaatgaataaagggtccgttatataggagtacatgggaaggattttacttggtgacaaagtaaaaccctagatacaagtaattctagaaacttctagaagattgaccttataatgggcatccatctattattcataacactcccccttgatgaccattatagtaccatagctcgtagtgcatctgaaatgatatctcattaaaaaccttaccaagaaatcccattgggaaaaccatgattaagggaaaaagagtgcaacacgccattactcccccgttatgagtatatacgtcgagatctttgagacggcgtaatccgatacgatagacgaaattgttgaaagtagcagtaggtagagccttggtgaataggtcagccagat

SEQ ID NO: 12921 - DNA, 579 bp, Arabidopsis thaliana columbia
gaatatgatattaatggagaagtgagagaagttgctagtaaggaagccacatacacagcagctgcttcaaaggaaactaaaaaagctgcaactgtaaacgctagtaaaaaaagaaagtcagtgatagaagcagctgctgaagaagaagttagtgatgatcaaaactcagacgcaagattatctgaatccccagactcagagcttgaggctgaaattgttgatgaagaggatgtgaatgttaaggcggatgagattcaagtgtttgacattcggaattatgaggaacaaattccatatgaagacgaagaatatcctacaactgatgatgaatctggcgacgaggaagtactagcagagaggttggttagaacgggtttagttgatggtgtgttgagtttgaatcaagtgttctgtagtgggattgattttaagaagattgtggtcggatatgtgttgaagaccagacgaaatgttgtctataataggtgggaataggaaagggtcggtgttagatgtaatggataaggctgtgaatggagattatactgtgcgatggagaatcatggttgaaggtggatg

SEQ ID NO: 12922 - DNA, 369 bp, Arabidopsis thaliana
gctgacaattcgttgaagttactgatcgaccctggttccagcttggtcaaacacattagcgcgtggtcgacaggaatttatgctaagtaggatgtaggagctgagttaagcttaggtttcaagcaagtcaaaccaacagtgcagagcattgaaaaggcggaatgtctacttttggatggtcggagtcccactcatggtgacctcgttgaattgggggaagctgtaggtattatcgcgggtcaatcgatcggcgaaccggggactcaactaacattaagaacttttcataccggcggagtatttacaggaggtactgccgaacatgtacgagccccttataatggaaaaatcaaattcaatgaggatttg

SEQ ID NO: 12923 - DNA, 636 bp, Arabidopsis thaliana columbia
gaaatactaaaatgtacgtattacgaaaataaagtttttattaaaaatttaaaatatgttacatagtaatgactaatgagaaaagttttgtcacatgtgtttttttcatcgtcgtgaagtttgttgataaagactagtcaacttttcaattttttttggtgttatttaagtgctaattatattgaccactgagtctttgtgggcgtcaatcgtaccatgaagatttcttaaaactcttttacttttagaacgttttacgtcaatatttttagaatagagatttctaaaaacattttacaaagtaatgaagaaaagctcgactactctatttttggttctcgtttggttctcgattttcctttttcttttaataattgcaggaaccaaaaaaactgttgtggaattgaaaccaatgcttatggacttgacattcaacaacataatgagaatgatgaccggaaaacgatactacggtgaagaaacaaccgatgaggaagaagcaaagcgtgtccgtaagttggtagcagatgttggggctacacgagttcaggcaacgcgttgactacgtcccatcctcagactgtgtcaagttataaaatagggttacaagttagagaggagcagatagtttttcaa

SEQ ID NO: 12924 - DNA, 535 bp, Arabidopsis thaliana
caatttgggccaatctagaaaatggtagtgaaacgcagatcacataaataaaaggcgaccgttggatgttgttatcttgtacaagagccttacaaaattcttctggttctctgaggatcaaaccaccacaagtcagaacagagtgaggtaatcattaccaacaaaaaatggcggctttatcatcctcctctctgtttttctcttccaagacaacttctccgatcagcaatctcctgatcccgccatctctccaccgcttctctctaccctcttcatcttcctccttttcctctctctcttcttcttcttcttcttcttcttctctcttgacattctctctgaggacttctcgaaggttatctcctcaaaaatttaccgttaaggccagctccgtcggtgagaagaagaatgtacttatagtcaacaccaacagtggcggtcacgcagtgatcgggttttacttcgccaaagagcttctctccgccggccacgcgtcaccatcttgaccgtcggcgatgaatcttccgaaaagatg

SEQ ID NO: 12925 - DNA, 738 bp, Arabidopsis thaliana
tgtaccctctatctcctatagtatcatgaaggtgtcccaacggactccaataatcaaaccaaaaagaagtagagtccccatttttcaccttaacccgatggaaagtttttgctttgtctctgtatttcaacagcttcttccaaatccatgatccatatgtcgaagttgttttctctgtccataaggagccactgcgaattaggtatttgttgacccaatctaccaatagagagccatgagctgacatgattctccatattaatttcagaatacacactttggttgcctcgtctatcgaacgcagacccaaaccaccctcatgttttggtgagcagacatctgaccaagcaaccttagctttctttgtattcaaggagggccccgaccactaaaaagcattgcaaagtttatcaatttctcggatacatgccttaggtagcctgaaagctgcgatccaaaaatttgtgaggctaaacaccacggaactgattagttgaagtctccctgcaaaagagagtgttctagctgtccacgaagaaatctgtgagcgtatcctctctagaagcggggagtagtcctcagatgtcattcgtcttgttaacaaaggtaaccccaagtatctaactggtaagtgaccgtattcaaatgggaattgctgtagtatctcctctgttgtcccgcagcactcctgccatatatagagttgattttcaagactgatttttacgctgtgtgtgt

SEQ ID NO: 12926 - DNA, 644 bp, Arabidopsis thaliana
tagtaccggtaacggccgccagtgtgctctaaagatatgcaaacgcaacccaacacatcaaagcttcaactttgattcttgtctctttgcctccacgcatttctccgtcagtgcttgcttgtgtccctcgccctctacgccgatccccatattactccatctcctccctccgggcttttctacttcacgtcaccgaactaaactcgactttccatttacctctttcctaaccgtctcccctgccccttccgctggtttggtagatgggcttttgcatttgaccttgctacgattcgtcccttgtctattatcctggcgttgcctcctcacaatttgacgcaataatgtcaagtcgccagcagatcgattccgtcattgatgatgacgatgagttctggtatgttgccatataagttggcttggatctgctcgtgattaggaactgacacctcggtctcttgtagccccctctgcatcgaagagttcgacttgtcggataagaatttcaaaccatgcccctgcggatatcaggtacgtctaatgacctcctaacgggttgcgacacgctccacggcaaattgattacagtctaattgcaaacagatttgcaattctgtacaataatacaagatcaaacgaggaag

SEQ ID NO: 12927 - DNA, 631 bp, Arabidopsis thaliana columbia
tgaagagatcaatccttttgcggtaaagagctctgtttcataatgactgaatactaatgtctgatctttctgtagtctttctccatttgatctcaatttattatgttgtagaatcatacaagtgttcctcctgcgagcaactcttatctcaagccacttccaccggaaccttatgatcgtggtgcaccgttgatatccctttggattctggcaatgtacgatattttcaataccttctgcattttgcctttcatgtttactcaaaatctggttagatgaaaacggaagttttcattttgctgattctgttcgcaggatcttcgagctaaagagatggaactccaggccaaggagaacgaattgaagcggaaagagcaggtgatttctagtaaccgagtctcttgggcgatattcaaatataatctttagacctactgattcaatgaggactgtatctaacagtcttcttcttctcattgcaatacaggagcttaaaagaagagaggacgcaatagcacgaagtagtgcaatcttctatatgtgtttttacacttccaatgacgttttacgggtttttgtagctaacttgatacggttgttttggcagctggagttgtcatgaagagaagaa

SEQ ID NO: 12928 - DNA, 544 bp, Arabidopsis thaliana
tgctgagatcttcacgggtgcccctggaaaatacgttgatcttaaggaaaacatcaacagtttccaggtatgtttgcattcatgagaagcttttctttcttagtgcgccatgattgtttgctaagagcgtatatgaattataattgttgcagggtctactcgacggtaagtacgatgatctttccgaacaatcgttttacatggttggaggtatcgatgaggtggttgcaaaggcagagaagatcgctaaagagtcagcagcttaaggaattgattcatctctttcatatgcataatacttctcttcttcttttgttgacaataacgaaaaaacaacaagaccaatgctttaggttgtctgctgaggcattgtgatcattgtgagtgtgagagatagtacggagaaaacagattcattcgttgaagttttgacttggaataatggagacaggtgttgatgttttcaatctctccacatttgtattcaagcttttgtattaaggaaagtatcgtgtttttacaggattcgatgttagacatgaat

SEQ ID NO: 12929 - DNA, 592 bp, Arabidopsis thaliana columbia
gaatggttgttacacaagtaagagtttcatgtttttcagatgttgttgtatgttgtgtttgcttatggaacatctcatatttggattttttgaatctttgatatgaacagtgtactattgcacatgctttggagaaaaccaagtatccagattcagacatttactggaaagacttcgacaacaagtatcatttctcttgtcaattcacagctgatcttatcgcaatgaacaacgcagatttcatcatcacaagcacttaccaagaaatcgcaggaacgtacgtgacttgttatatcaaaattttcaggttcttatacgcaatactaatattatttgctcaggaagaacaccgtcggtcaatatgaaagccacggggcttttacgctcccgggactatatagagtagtacacggcatcgatgtgtttgatcagaagttcaacatagtctcgcccggtgcagacatgaccatatatttcccgtattctgaagaaactaggagacttacagctttacatggttcaatagaggaaatgctctatagccctgccagactgatgagcatgtgtaagtattggcatctggtatcaatat

SEQ ID NO: 12930 - DNA, 463 bp, Arabidopsis thaliana columbia
gctagttccttttagaaaagaggagcaatgctgaataatagaatttgtgtgcttggtgactagaacggtctatataaagtataggtatgaatggaatttcgttgcagctcaggaggagttgtatttgttatcttaatccgttgcagcgtctcacggtgggaagattgtgtgtgacaacctacttgatgggcacttggatgtttcatactgtatgaagcttccagaggtaagaaaactattttaaaagcccatttcagagtctcacaagtcacaatcaataaaggaataatgtatcatatatatatagccctggcgtaatagtagatagatagttcgcttatggactcatttagtaaacagagttttggattcaaagcttcccagctaggactatagtacaagctttttctatactatattaagtgatgactacatacttttataaggagtaattttcaagttt

SEQ ID NO: 12931 - DNA, 961 bp, Arabidopsis thaliana
ggacacaagttagtagaacacgcttttgagggttttgacttggtttagtcaatttctccaaatcatattagtgtcaaaatcagctttgataaaaaaatgtttactaaccttaaaactcaaggtattgggccttaaaaaagtctatcttatggggtaaggttgaagcatatagggtaagccataattttactgatagagtcgcgtactttggtcacacaattagggattcgtccatcgcaatgacaaaacagaagcagtacgtctccgacgtaaacttaacagtatgtggatccaataaaccgtcttcaacacctggaaaagacatagaatactttggtctgatccctgttgatctcttcatcagtaatatcttatcgagattgccgctgaagtctaaagctaagtgtcgctgcgtatcgaagctctggtcgtccataattcgccgtccaaattacaaccagttgttcccgatcaagtccccagctccgcggatccttttcaccatcgaatatgcaggaatcttgttcttttactcttcacctcagcctcacaatccggatgagaactcgtctcttgtagccacccttcatcagaacactggtaacaccaagttctatgagatatgtggtcctgtctgcggacgggtactgtgtcgtcagtataattcagttggggtgatttataatcccatcacaggagagtcttcaaacttgccgaaactaagtttaaaggggattaataagtcagagtggttatgtgataaagcaagatattcttttgggtatgatccaatcgagaaacagctcaaagtgttgtgtatcacctggttgcgtactggctcagagcacttgtccaatgagtatcaagttctcacattagggactgaaaataaaaaaactcttttggagaaagattcaaggttgtgcaattcattttttttgggacaatacggggatcctct

SEQ ID NO: 12932 - DNA, 532 bp, Arabidopsis thaliana columbia
caaactcttttgcttcctttaacgaggaagcaagatgacgggagatagatactttcgttaaagcaaccaaatcttgccggattttcaatctaagatagaactacgtgtcgtttgttatacattaaaacggcagaacgtccaaactaagaaattttgtgagaaaattacgaagatagtctcaaatttctaacaaaattacgaaaatagtctgaattttctaatttaatacaagttagaactaaagtggtctcttttgcatctttgataacttctggggataaaatcgaaagaaggaaattgatagacgtttgtttattcgtgtaatggatagctttatcctagtttccaaacaaagccaattctgaaactcttcctgattccgtcgatagggtgagagaggaagagatccaaggaggattcgataaaatggctccaagatccgattcgcaaaccggctccagtgtatcagacggttcagatcaatcctcaatggatccaatattccaccttctccgaatcgtcccattctcat

SEQ ID NO: 12933 - DNA, 520 bp, Arabidopsis thaliana
tagtaacgtccgccagtgtgctctaaagtaacaacgtttgcaggcagcgataatagttggcgcgttccggactaaatactgatgagttaaactccatcgtccattcggtccagaccagagcctgttccagatcgccaccagccagcgccacattggcttttaattcaccgatacgcagggtgtaccaaccgttatccgacccggtcgccagaccaacagctcacgcacgcgggtaaagtcatcaaaaccttcttcatccagttgctcgatgaggttcaggtaatcttctttttcccactcgctgcctggtagcgaaagaatcgtttcacgtaaatggctgcccatactgttattcgcgagccacagatcttcagccggataaatatcggacatgccaggcacgataatacggcaagcataaacgcccagatgctcgtaatcggcaatataaacttctttatcttctttgttgaagatagccatcagtgtggcgaactcttcttccgtggtgccggagaaa

SEQ ID NO: 12934 - DNA, 530 bp, Arabidopsis thaliana
cttggaaagcaaattcagatgctgcacacagcagaggccgggggtgcccatccccaggctgggattcacgttgccctgcctaaggtgtcaggtccttgggagcctttatgaatctgaagctgaatataatcagaaggcatcaaggagtatatactggaggtatgtctcctaaatcagtactcttcacttgtaatgaatgtgtctctgaatctcccagggatctcgtaaaaatgcaaattctgcctccgtaggtctggagtgggtctgagattttgcatttctgtttttctttctttctttctttctttctttctttctttctttcttttttttttttttttttttttttttttttttgagacgtagtctcgctctgttgcccaggctggagtgcaatgggcgaattttggctcactgcaatctccacctcccaggttcaagcgattctcctgcttcagctcccgagtagctgggattacaggtgtccattccacacccagctgatttttgtaattttagtcagatggggt

SEQ ID NO: 12935 - DNA, 451 bp, Arabidopsis thaliana columbia
ttttgttagcttatattaacctaaatggttttttaaagcttatgttaacataaagggaccacccaatgcaagaaacaattttgctatcataattgtcacttgtccaattttgctatcataattgtcacttgtccaattttgctgccaccaacaaacagaccacataagaaagtttggaacatgtaagaaaaaacacaacataagatgatgttcataaatctagcaagggatagtatcataaaagatgatgttcaaataacgctggacaagggacttagtggctaatgcccttctttgctttcaatgactcgagtgctttgtttcgcaactcaatttcaagcctctttggatcagattcctcccccttttttaatcttaggacgggcctcaacttcaccttctgaagtatcagaaagctcttgtttcttatgcttctcctttccaccacgac

SEQ ID NO: 12936 - DNA, 472 bp, Arabidopsis thaliana
tatgaccaattgaagatattggtatacatagcgacccagtacaagacatatttacagtgtgccttgtcactcttcctgttagagaaaaaattttatttaaaaatatagagtctttatcctaagacttattttaagttcctatgcattttgataggccatagatcgtgaattgtatactccaagactcctccatgtcctcgattgagtcggtgcatctggaggccatacacctctggaatgctgtaggagcgttgcattcaccaaatggcaggctctaataggcataagtcccataaggacacgtgcaagtggttaatacttgctcagtagggtgaattggtagttggatgacacctctgtatgcctcaagtgagcaatgatatggatgatgagctaatcggtccagcattctggtcagtgacaggtatacggtaatgatcgttcctagaggcagcattcaacttcctataat

SEQ ID NO: 12937 - DNA, 924 bp, Arabidopsis thaliana
ctgatgagaaaaaacaagaatggtctaagatattcttttacgagatggcgggttttgagaaatggcacattgcccgtgccactcctagtggtgagatcgtttttgtcaataggttgttactaagttgccaaacattatatgtctactattatggtccgaagcgaaacagtatgagaagggttgaagtcgaaggtactaagtattagccgtaaacatcttgttcatatatgccctgtttccggatcacgtcgagaatacgatgcgtttgtaacttatacaccaacagaatttttccgtatccaagaaggcgaaaggtcccttcaggaattctaaaatttgtttgctttcataagtcaaattcttaatatatcttaatgctcattgcaaagagcccaaacaataataatacatcaaataagcttctctcctaagcctctctaaatatatccacattgcttcttctgctcttgtttatatcattgtatacaatatgtaatgtaatccgtatgataattattgcaggaagaaccataaccacatcatcatgttccaccataacgtcaaaccatataattataactaaagtcacccaatttcttcatacatagcttttaagggcaacttggtcatggtcatctcttgctctcacaacttaatacctgatgaacaagcttgtctggcagctccttattcgcctgcgaaacgtggatatagattcaagattttaaccacattactgcaaaactttataagagatgtttgattttttactcacttggaagtgcctcatgtgaagtatcggctcacacccgacatccgcgatgagttttccttgaggagtttgtcttttaaatcgctccgctatgaatcctccatatacattttccaagtcaggtagtttgtggcaaactttcaagagcgagc

SEQ ID NO: 12938 - DNA, 608 bp, Arabidopsis thaliana columbia
taaacataatgataccaatatgaaaaatactttttgctcgtagtaaaaaatatatatatgttctttgacaaatgttaaaattgatttagtttacaattattttcttaatgtccggctttcaagcccgtaacgtaaaacagaattgaacgtcggtgccgtcatagtgacaacaccagtgactgacttatgaaccttattgtttttggattttttttccctgaattcaagcgtcggttatatatagataattctattgtttgttaaaagaattttatatctttacgaaacggtggtcaaatgtttgtatataagaaaagacaagagctttgcttcatcatgtcacacacaaagtcgcaaccacaaacgtgaaacgtgtaaaatatgactgtgctttggtttgtatcacttatcttactcatctctatccttctcgttgccgtcaaacactctaagcggcgatgggtccggcaacaccgtctcctccaggcttaccaatcattggaaacttgcaccagcttggagaattccacatcaatctctatgtaaggtctcaaagaagtatggtcatgtaaatgtactgaaacttggaagagttccacagttatagt

SEQ ID NO: 12939 - DNA, 885 bp, Arabidopsis thaliana
tgttatcgttgttacaggaaatcctgttttagccaaggaagctacagcaattgctatctggtctgtgacccaaaactttgattgctgcaagcactgggacaatctctacaaggagaatctggaagctagtgttgctgttcttaaaaagcttgttgaagaatggaaagagcattcggtcaaactatcatcatcaccgaatgatgctctcactctcaaccgaactatgaaaagcttcaggctaaaggtaagagcctccacaatttctaagctttaatttcaccctccagtctcttgtaaatttaatctccgatatttccctgtgatgttttagaacgaggaggtcatcactgagggaggagccaatgcttctctttacaaagaagctgacaagtcttgcaaaacgatctcggggagactctcccgtggaagtggctgcctcaaaggaacagccattactttagtgtttctagctgctgcaggagccgctgctgcagctgttctatcttccaacccggaggttacaaacgagctgaagaacctggtggactcattggagctgcatgaatacatcaacaaatacactgaggttatctccacagctttgaagaagtaagagaaaagaaacaatcaaaaacctgaggatgatatagagaggtaactcttaatatcatcggtgtagagaattacttaaaagttaaagccttttactctccaagatacaaaattttgaacatcttgaccagaacttaggggttatggaggtgaagagaataatgagagttttcgtttttataatcacagagtctgttcaaagttgttgaaggttttttttagactgtttaatttgtttctgagataatttatatttcttcttttttccctgat

SEQ ID NO: 12940 - DNA, 523 bp, Arabidopsis thaliana columbia
attaccctgtccacggtgacatcatgttcaagcccaaacaacttgctgtaaactgggatcgtcttccccgccgtgcctttcttcttcttcaacttcaaactcggatacttcccacacggtaaatcagtaacgatcttaaactctcgcaaagaaaacgaataggggtacccgcgaatagaacccaaatctcgttaggcttcacgacatccaactgcctatccaatatgaatatcccaaaactcgcggacaaggagggtagtttaggaaactccaacaggcgaccgaaagaagtccgagctatgaactcccgttcaccatcgtcgagtgcattaaagataccacaaagggttttcatcttctgataaacattgaccctctcgccgtgtgattcttcccaaaggcaatcagacgttgaggtagaggaatcggcggcatcgttgctgtaaaaaatcttaaaccctaatgagactactaaaaatgtgaagccaaaatcataaacaagaaaaaaacattgtcattgcat

SEQ ID NO: 12941 - DNA, 637 bp, Arabidopsis thaliana
tagtaacgtccgccagtgtgctctaaagtagcaagctaattataaggagatgaaattggaatcgccactaggttctgatctggcacggttggtgcgcatatggcgtgctctgatagaccatcgcctgaaaccgctggagttaacacaaacccattgggttacgttacacaatatccatcagttacctccagaccagtcgcaaattcaactggcaaaagcgattggcatcgagcagccatcactggtccgtactctggaccaactggaagaaaaagggttaatttcgcgtcaaacttgtgccagcgatcgtcgggctaaacgtattaaactgacggaaaaggcagagcgcctgatcagcgaaatggaagctgttattaacaaaacccgcgcggaaatattacatggcatctccgcagaggaactggagcaactgattacgctcatcgcaaaacttgagcataatatcattgagttacaggccaaagggtgaaatgaagggggcgtgtggtcagtaacctgaccacacgcaaacgttatttagcgcggagaaacggtcacctgactgccattgctggccagtacgacacgttggcccggagagaacgagtgttccttgttctgtccacgatgatggtat

SEQ ID NO: 12942 - DNA, 602 bp, Arabidopsis thaliana columbia
ttatatgagatgcaaaaacattacacgatatgaactatactgccttgacaaaataaaggaagatacaaaagaaaactatgaatcgtggggcctatcacatttacatatctaccaaaagacatgttccttaaaatgtgatagatccacgcaaatcttttgtaagagaagataaaaaaccgatagagaatcgagacgtaaacctaaaacggttttagttcgataatgaaatccacatgatttcaattccgcaatatctggagtattagttaagcccatttggcgataatcgacattccaccgcacccgagaagagccgcgattaaacacttgaactgcattttgatgctaccttgaagcttaggtcccatgaactccgcagctagaagatccacgagtgccatgtaaatgagcaatccagcggacgatgcatttagaagtccaaccgtgatcaaagcttttgggctattatcttggtaaacagttgatagagcgatccctaacgctattccgaatggtgttgtaccgcgaaaaagacgccatacaaatttctcatatttgtatctcagcctgaattacttaacattagatgttcatatttgtat

SEQ ID NO: 12943 - DNA, 596 bp, Arabidopsis thaliana columbia
  unsure (1)..(596): unsure at all n locations
tcattactttcgccgccgttacatttctcatcaccgtcacgatgctgccggcgatactgtgaccgtttcttgacgacggcgtttgcgttacttttttcccggcggatctttcctcctccggcgcatttatcagatttagtagcaggcatgaggaaataaatcttaccacgttggagctcagcttcgggagggacgatgacgatctttgtggctgagatgacgtcacgctcgtcgtgatctgacgttggagaagatggtttcttgagtacgtgcttcgggtgagccttcatgatttcgctggccgtgatcgtgccactgatctcctccacgtgtccgtttgagtgaacgattctgatcacgtcaagcgctccacacggtagaatgcaagcgatgcaacacctgattgtctccttcattctttttcagtgaagaaaagcaaataatttaaagactttggttcttgtaaaaaatcatcagagaagattgaagatgaatatgagagagacgtaaggtagtgatcttgaagagagaagcttgaagangaactaaatttaaatttgtattcttttctttttttgaggaattagaccatgtgt

SEQ ID NO: 12944 - DNA, 964 bp, Arabidopsis thaliana columbia
tgagaggattgatatgcttcttacttccccatggaaaccgttggatctctctgctgcggtaaaatggcttcgcagtcggcagaaaatccaaaactctgagtttagtgagtttcacgctggagataatatggatgacggtgacgattgcttcaaggatgcacggaatgatacttcaccagagaaagaaagccttggagactcttgcaagggttgtgatgagaatgacccagaagaaggtaagctgtcaatcacatttcctcctcctgatggatggcctatatctgatgatcctgaacgtgcaaagctccttgaaaaaatccgtgcagcctttgagctactgatcagacacaaatatttagctgccagccatcatgataaggtgatacagtttacgctggatgaacttcagaatcttgcctcggtgtcacaattcttaaatcgtggcttgaacaagtcacccttatgcatctgctttttgggagcttcccatctcagcaaaatcctcaaattcctgcaggacttatctcaggcctgtggattgagtcgatattctgaacaaagtaacccccacgatgagattaattttggtgacctgggtcgtgaagtcacagaggagattcttcttgatagtgaagattcatgtcttcttatggatgaaaaattgcttggcactgagtgcatccaagaaaaatatatgggctcagcatttaataatgtaactatagcaagttctggagatattgctaatggaaatgatgtgtcttctggtgcggatggatttctttcatggatcttcacaggaccctctagcgaggaacaagttgtgtcatggatgcgcacaaaggaagataaaactaatcaaggactggagatcatgcagcatcttgagaaggagttctatcacttgcagaacctctgcgagagaaaatgcgagcacttaagctatgagggagcactgcagact

SEQ ID NO: 12945 - DNA, 399 bp, Arabidopsis thaliana columbia
tgtttttttttaataaaaatattggattgtgcaattttagacagttcttagattgtgtgggggcagaaggatcctctttgataacaggacaacggacgaaggcaagaaggtcaaacaagttcaggaacttctcgcccatgttgcagccattgacaagagcactagtgggattccgtttacggacgaaatgcaccgtaaaatacaggtggatatgcttaccatctacatccatttttagtgtgctttgcgatacgtagaataattgttatatgattaaatctacggggtctcagaaagaggcggagacgcttagggagcagcagaaagaggtcgaatctaaggaccttgcagctgccgagattgcgcaatggtagaagcgattatcaaacagagcatgac

SEQ ID NO: 12946 - DNA, 567 bp, Arabidopsis thaliana columbia
ggcaaggccattggttacgatggtagtagacccgaaaagagttacaagattatcggaaggagtagttgttcttggcagggtaaagttactgatacatattcagtcttcgaatttgcaaccaatgcgtggaaggttactgatcatacccgttttcacgaaaagccagaattaatggacgactccggtagggtctccctgaatggaaatttgtactggacagcttataattctccccacactggtcagtatttcatcgcaatgctcgatttttcgaaagagatagaaaagagtcgaaagaccttttgtgttttaccgtgtaagggggaaaaaagtactacacatactcgtatcctctcgatttacaagggagatcggttttcagtgttagaacaatccaaaaaaacaagggagattgagatttgggtgacaaaggatcaaattggtaacggggatgatggagacgatgtggtgtggattaagttcatgacagtctcaagacctgacttccccatattacttagttacatctctacaagttactttgtcgataatgatatcgatgggaaa

SEQ ID NO: 12947 - DNA, 515 bp, Arabidopsis thaliana columbia
  unsure (1)..(515): unsure at all n locations
nnnnnnnnnnnnnnnnnnnnnnctaaagtgaccaccgatgtggaaagctacgacaagctgtcgcttgatcaacgtagccagatgcgccgcattatgctgtgcgtttctgacactatcgacaaagtggtgaagatgcctggcgtgagtgctgacgatcagcgcctgttgaagaaactgaagtccgacatgcttagcaccatcgagtatgcaccggtgtggatcatcatggcggtcgcgctggcgttaggtatcggtacgatgattggctggcgccgtgtggcaacgactatcggtgagaaaatcggtaagaaaggcatgacctacgctcaggggatgtctgcccagatgacggcggcagtgtctatcggcctggcgagttataccgggatgccggtttccactactcacgtactctcctcttctgtcgcggggacgatggtggtagatggtggcggcttacagcgtaaaaccgtgaccagcattctgatggcctgggtgtttaccttccggctgcg

SEQ ID NO: 12948 - DNA, 1046 bp, Arabidopsis thaliana
agaagaaaaaagctcccgcgccgttggattcggctctgatcaagctcgaatgcgagaaggcactgaagtcattcggtcgtgggagctacaacaaagcgattcgtctcattaaggattcatgctctcgccatcaagactctgccctaatccaccgtgttcagggaactatctgcgtgaaggttgctgctgtctacgaagatctagctacgaaacagaagtatctccggaatgcaattgaatctgctagaaaagctgtggagttgtctcctgattcgattgagtttgggcatttttatgccaacttgctttacgaggctgctaatgatggaaagagagagtacgacgaagttgtgcaagagtgtcatcgtgctctctctatcgaaaatccgattgatcctgctaaagagagtttgcaggatgaaactcagcttaagatattgacacctgaggctcgtattgttcatgtgcaggatgagctcaggtcactaatacagaatccaacattagttcattgtccacttggatgaataatctgggaaaaggtgaagagaagtttcggttgatacctattaggagaatggctgaggatcctattgagagtaacttggttcagaccaggaggcctaatgagattaaaaaggctaacaagagtattgaagagataaggaaggaggttgaagttagggtagctgcagctaggttgttgcagcagaagtcagagtgtgagaatgtaggcgctgttgacaacaagggatcagatgcaacattaggttcggggaagagaagcggtgagaggagaaagcatgggaatgcaaggagaaacggctccacagcggatagaagggatcgggttaagtcatactgggattctatgagcaaagaaatgaagaaacaattgcttagagttaagcttagcgatcttaagagtcattttagtgcttcaaaggatgggaatgaaaatgagattattagtgaagctctttccttttgtgaggccaataagacttggaggttctgggtttgctgccagtgtagcgaaaagttca

SEQ ID NO: 12949 - DNA, 931 bp, Arabidopsis thaliana
tgttaggaaagcaaccaatctccagcatctcttcaagtaccctgactccttctttaacattcccattcttggacaacccttcaatcaaaacgttatacgtgaaagcattcggcttacatttcctctcatacatatcgtcccataatctacccgcctctgtcaactctcccttctcgcacattccagcaatcaacgtgttatacgtcaagagactagggatcgagcctttctcaaactcatcaaacaatttcctcgcttcagtaactctcccttctttacaaagccaatggatgagagtgctcagaagggcattatcaggcatacaattgttcttcaacatttttctccacagaccacatgcttcatctaccttatggtcttcacacaacgcatcaataactttacaacaaagagaagaatctggcataaaacttctctcaagcatttcatcgaacatgttacgtgcttccccagatttcttctccttacataaagctctgatcataacaccataagttacttcattaggctcaatctcattcttttccatatcatccatcaccgtagctgcctcagagaatctccctaacttacagtaaccatccatgagaacagtgtaagtcgtcgcatccggataccacccacgatccaacatctcttccaaaaccctcttagccgattccatatcacctctagcaacatacccacctagaatcgtagtgtaagtcaccaaatttggcactaatcccatcgaaggaatttcgtcgagcactttatatgcactttcaatatcatttttcttgcagagagctttgactagtagattacaagtgaagatgttcggcgtaattccagaagactccttactgttcttaaacatggcatgaacaaatcaaatctctgattctggattaaaacgtttaagagtgtg

SEQ ID NO: 12950 - DNA, 513 bp, Arabidopsis thaliana columbia
ctgagatgtggaagcaacctgcagcagaagaaaaataaggaacagatagattttcaattacatggtccagagacaagaagctttgaacaaacaaaacagaaacttattcaggttaaatcatcaaaacctattattccaaaactacacagccaggatcgattaaataactaacagaatcactaaaaccgattatttgaaatagcaagaatttttcaattagattgtatcactggttggagcaaaaaacttacatcatctttacccgcagagagactgcgctgatgagtaggtatgtcacccgaatatccaggaatagaattcttggtagagactagtatgagcttggtaagcttttggattctgctcattagagctgctttggcttcttcttcttcctccaatcttgattgcattttcacttgcccttcttctaactgttgtgataaatggatagttagttaattcactgcctttagaacacagtaagaatttttaagataaaggtcttgggga

SEQ ID NO: 12951 - DNA, 573 bp, Arabidopsis thaliana columbia
gaacaatatatagaggaggctgacctctagagtgtggctagataagtgaaggattctaacatttctgattccattgatgagatttctcatatcagcgggaatggaaccgagagatccatttcttactcccaccattcttgtttcatccatccgaagattgagtctagcttcgatgagggaatccaacttaacattaggatacttacccaaaacataaccagagtgtttgtagtagataagattaggagcatctaatgaaatactagtaaacttgcgatcaaatcggatgtgtagtctctttagagatggagaagacacggaacaagtccaatctacacatcgccgctcctcaacaaccagttcttcgagaacaggacagcgagatataagagttccaacaacattatgacctccaacaaaattaactgagtcaagacataatgtcctaagcaaaggaagagaaacatcttgagaaagcttgattgtaaaccacgtcctactctcagcttaaccaatgtcttgctcttaaagatcattgcaggcactggtggagatttccttttaaagtaatga

SEQ ID NO: 12952 - DNA, 528 bp, Arabidopsis thaliana columbia
caaaggtattcaaaggaagatattttcggaaatccaatgcactggataatataaaatcatattctccatcttatggatggagaaatatgatctcaactagatctctacttagtaaagggcttcttaaaatagtcggttatggggcttccatttcagtttgggaggacccatggataccagctcaattcccgagactagcaaaaagtaatggttcaatttttgaccaatctttaaaagtcagtagtctattagacagtaggtcaaaattttggaatgtggatctcttaaagaagctctttgatccgaaagatgtaccgttgctttgtgctttgcctgttggtacaccaactaaggaagataccttaggctggcactttacgaaatctggaatatatacaattagatctggatatattcgacaaggcttggatttaatgaggctagttcttttatagggccagagattacaatcctcagagctcacaattggaaagtgcaatgtccacctaagttacgatattttttgtg

SEQ ID NO: 12953 - DNA, 707 bp, Arabidopsis thaliana
tgcataggccatggatctttctctcttgatgattgcgtcagtctttctttgtgatcttgaatccctttcctcttttgtcagcacactgtcatcccaattatcattaccagcttcagacgcagcccatttggcttcatctttctctacctgggcttggttttccaacattttgatgcgacgtgactggatttgggattgaacacggaccacttgctgcatgtacttcattgcatttatcgtctgccgcttcacgctgtatcctctcaccacaccttgaagtctgactagacctttgagagctctgaaactcttccttgcctgtttcattcaggtcaatataacttccttgtcttggaaatggaagtgtaatggacaaatcttgatagagaaacaaagaatgtgtatacgtaccatgtaacctctgaaagctccttgaatctttgttgcagaagcatgttggaccggaagcgttggctctggtctataaacaatctcccgccgctgcacagccctaggagaaaccgatcttggagaagggggcttaggcgtagtgggtcttggagcatccaatcttggcgggtctgatcttggagaaggcggcttaggcgtagtgggtcgtggagcatccaatcttggtgcgtctgctagtggagaaggaggcctaggcgtggtgggtcgtgcagcatccaatctttggtggggctgct

SEQ ID NO: 12954 - DNA, 1104 bp, Arabidopsis thaliana columbia
caaggagctttgcacgttcaggatcatcagatataggccatccatcaggaggaggaaacgcgatcgatagcttaacctcctcttcagattcattctcattccaaccgttgcaagtatctccatctggtgtagtatcattccatgcatccttgaagcaatcgtcaccaccatccatattatctccagagtgaaattcatcaaactcagaattttgtattttctgctgacttcgaagcaatttcagtgtagcagagagatccaatggtttccatggggacttaaaaagcatatcaatcctctcagtgtcgacaatttgtggcaaaaccatttgcatcttaggtaagacgttacccatgtgcgcctgcacaatatgatgcatatgagcctcagactctatgaagttttgactacaccggcagcaagcccagaacctccaagtcttattggcctcacaaaaggacagtgcctcgctaacaatctcatatgcttgcccatcctttgaaccactaaagtgactcttaagatcactaaacttaactcttaggaattctttcttcatttctttgctcaaagaatcccagtatgacctaacccgatcccttctatccgctgtggagccatttttccttgcattcccatgctttcttctctccccgcttcttggccccgcggctaatgctgaatctgatcccttgttgttaacagcttctacattctccgacggggaagactctgacttctgctgcaacaacctatgcgcagctaccctcacttcaatctccttcctcctctcttcattagtcttggtagattttttaatctcattaggcctcctggactgaatcaagttactctcaataggatcctcggccattctcctaagagggatcaacctaaatttctcttcaccatttcccaaggtctgcatccaagtggacaatgaataaatgttagacttctgtatcagtgacctgagctcatcctggaaatgagcaatacgagcctcaggtgtcaatatcttcagctgagtctcatcctgaagactctctctagcaggatcaatcggatattcgatggagagagcacggtggcactcttgcacaa

SEQ ID NO: 12955 - DNA, 575 bp, Arabidopsis thaliana columbia
gaaaggcgatatgatttggggaattgtgaactgggaggagtttagtactatcaacccggctgctatattcaaaatcgacgtcaatatcaatgttcctctcagctactatactggaatcctcggttagtcacagaaactaaaaaaagtgtaatagtgttatggacctatacctatttctcttaaaagctctgttttttcataacaggtatgataggtttaactgcttacgccgggtttttcgagatatgttcacctaagaaaggagacacagtgttcgtgtctgctgcttctggcgcggttggacagctcgtgggtcagtttgcaaagttgatgggctgctatgttgttggaagtgccggaagtaaacaaaaggttaggccatagttttgaaactcatcaatcaaatgagttaaactatctctatataagttttctctaattacataatttggttccacaaaaggtcgatctcctgctgaacaaattcggttacgatgatgcattcaattataaggaagagcctgaccttgactccgccttgaagaggttcatatttggcttcttataaatcagtt

SEQ ID NO: 12956 - DNA, 582 bp, Arabidopsis thaliana
tagtaacgtccgccagtgtgctctaaagatggttgttaaatactgtcgatttagcaatagaacagatatcgcgattgcccagatacacggcggcctctgggacgatattgaacaaggttttcacttcgcctgcaccaatccggtgttgatgacggatggtctcaccgacgttagtgtcccagacgccaaagtcgctggcataggcaccggtaaatatctcgcggataaacttagcgccggtagccatcgccaggtcgaatgaggcgaccggatcccacagaacattcacgccaaacgggatgcggatatcgctcattaattgcccgatgattcgtgccattgccgcagtggtttccggacgcaccttcgtgagatagggaagactaaactcgttggagaacatgactgcatccaccccaccattttggagcgccatcagatcgtcccaggctttgtcgataacccagttcatccccaactgcgcatcaaaactcgggtcgccgggcaatgcacgtagatggcacatggcgatgaccggtttttccgtcccaataacctctttcaagcaactcattgaaagta

SEQ ID NO: 12957 - DNA, 591 bp, Arabidopsis thaliana
cccataaaatcatgcaaaagaaaatgaaattaaatggttagttaaaaagcaaacactagctagttgagaaatacgattttctgacatgatgttattataggtaggaccaaggcctaaggctgacagagagagattcccaccgaacaatgttcttctaatgcttgctggagctggacttttatggatgggatggtccggttttaacggtggtgctccttacgcggccaacttaacctcctctatcgccgtgttaaacaccaacctctcggccgccacaagcctccttgtatggactacacttgatgtcatcttctttggcaaaccttctgtcatcggagcaattcaaggcatggttactggcttagccggcgtcactcccggagcaggtttcagtcatcttcttttcaagttttttgtttactctaagtctctaagtttatttatgattaaggttgaattatgtggaaacttattaatattgcattgttaatttattatactgacaaataagatatctattgcaggtttgatcaaacatgggcagctataataattggagtagctcaggacagctcatggcctctatgatga

SEQ ID NO: 12958 - DNA, 511 bp, Arabidopsis thaliana
tagtaacgtgcgccagtgtgctctaaagatctatgacggctatcagtcagtatccccgctacctgccgatttccttgaacgtcaaccggtttaccaactctacacgctgttaaatcgtgcaaggttatttggcggtcacatttggttattgctcagcagtcattggatagattattagcagcatgatatgggttgaggataatggccgctccgtgcgatcttttgattaaataaacccaagcagagaaaagaacacataacctgcagcaatacaaataaccggcagggtatacagtgagaaaaactgcaggaaaatagtatggtgcggaacaacaatacgggactcaatttgttcacgcgttagccctcttcccctttggctttttccagaatgagttgatcttcaacagcttcccgcaagaagcgcgcctggcgactcatccgggcaccggaatcctgcaacgtcagtccgacaaaaatcaggatgaaaacacccagaacataacgttca

SEQ ID NO: 12959 - DNA, 540 bp, Arabidopsis thaliana columbia
cgactcaaccctgccatgcccttcaagtatttttagaaaaaatatttaaatggagtattttttttcctacaaaaaaattgaggcattgaaagtccaaaaataaacagatcaagtatttctcgactattttactgttataatttaaacgttgtttacagataccgtaacgtctgttaatgaccgttaaatcataggtttgaatcaaccaataattttaaaataaggtatttttgaccgaatataattaagagataagttggaaaaacatacgtttttcaaacttaattataaaaccagtaccgttactatttataatttgagactccctccgggaccaccgcagcgtctaatacacgagccgtgaatacataaaaagtgggacatgtttgatgttgtggaaattacgtataagggtttcctttgtttttatcagaaaaagaaatcctctgtccgagttcgagtgtttggtatgggctcaacagttggtaaatgggccttaattgtacattcttattacattagaatcaaattaaatgttga

SEQ ID NO: 12960 - DNA, 583 bp, Arabidopsis thaliana
tagtaacgtccgccagtgtgctttaaagtacaggtaatgttttcatactgaagattttcctgatatgcagatataaaaatggaaaagtggcgtggtgaaaacaccaggccgtagcagaaggctattctggagagttaatttttcatttcgggcgtcggataaacagccagataaacgtaatcacaactgctgagggtatcggctttgcaggtcagcccttttgcatacagcgtgacggtatgctgatggcggggattcagttcaccgctggtgagcatgagttccagttgtttcatcagcagcggaaaggcctggtccaggtggtacgcatctgcatcgctgaacaggcctctgataccggcgcggtcggcaaggtaatgcaaccggttaccctcctgcaccagacgtgccccgaaacagggcgtcacggtgcagggcagccccaccagggtcggtcgtgattgtcgtcgggaagtgttgtccggggagtgtgtctgcacgataaaatcttacagaaaatcggctaagaatggtccggtagtggcgataattctgctcatcagaattccactcagttcagggt

SEQ ID NO: 12961 - DNA, 442 bp, Arabidopsis thaliana columbia
atgtagtcaacacttcgtgaatatagaaccgagttgaaagcttgattttcttcactctcttcttcctcattcttgtcagacttcccttcttccattgcctctaaaaccggactgatggtcgggattgttcttcaactcctcctccctcaattttggattttgctccgtcgatgatggctcctctgtcgttgtcggctcctccatcgttcccccatcgattggctttgttgtcggctcctccgtcgttcctactcctctcctcctctttaacctaattttcttctttagaggcggcattagaattctctatgggtacagttagggttagggtgagactcggaatgttgagaagagagattagggttcttgttgagaatgttgagaagaaaacggagaagattgagagagaggcgtttggaaaagaaatcaaaaagtttacagt

SEQ ID NO: 12962 - DNA, 526 bp, Arabidopsis thaliana
tagtaacgtccgccagtgtgctctaaagcccagggttgccacttcttcactgtcgtgtgatttccggtttgtacagcacgtaggaaagccacggcgcaatgataagcaagataaccccaaccggcaggaagcagaggaaccactgcaaccagctaatctggataccggcaattttgctgacgaactccagacccagcacgtttggtgccgcaccggtgacaaacatggacgaactcagactggtactaatgaccatcatccacatcaaatagccgccaatacgacgcgcggacggatcgttcgggaatgatttaaacaacggcggcaggtttttaatgaccggaaaaaccgtacccccggtacgcgcggtgttggaaggtgtaaacggtgccagcagaatgtcgataatgacaatcgcataacccaacgtcagcgtgcgtttgcccatgaatttcaccaggaaaagggcaatgcgacgacctaacccggaaacttcataccctaatgcaaaaatacatgcgccaaa

SEQ ID NO: 12963 - DNA, 386 bp, Arabidopsis thaliana columbia
ggaaccgcttcttcttacttcgggggtgggagacggtggccttggcttgccctggaattccttgatttgagaaaccctactctgcggtgactactgcattgaacttaacttcttcttgcacgctacgtaactggaattcgacttgctgctcatagtcagcgtgagtacactagtcacgtagcgcatagtcgacttgagtctagtccagctcatcttctctggctcatcctaagtcgatgttcagagcagagtgacatggcattgaattgatgtcgcgccttgacttcagtgaggtccggtaccgcatggtaggcagtacaaagagagtccaagctccggatggctgaacttgatgagatagcgatccgctggagttatcttgtcaa

SEQ ID NO: 12964 - DNA, 423 bp, Arabidopsis thaliana
ggccagctgataagtgtaaacttctagacacagacatccaaattgaagacattgcacctttggtaattaaaatttgttgcactgtgttatcaatgtatttcccctgtgtatcatctgattatttgtattggatttgtttactgattgtgtttgatagggtctaaaaggaaacaaatgtaaactattggatttgaagaatgctgaagtcattgttgcagaggggcgttgggagactcaagaaccaagtgcattggttaatggacttcctcttggaccaaaagcagttaaagtatttgtggattcagtaaagcagcctgatacatcactatggagcacctacagctgaaatatcatatcttgaagactgtttgatggctaatgtagcctggcccctgagcaaagttgattttgaaaatcctcatc

SEQ ID NO: 12965 - DNA, 464 bp, Arabidopsis thaliana
tggacttgaaggtgttggttgaagctgctaatacaccagatgcatttctatggcgacctgcacctaacatgtatactatcacggaagctgttggacagatgattgcatggcctgcatctaaatgtgttcttgtagagaaggatatcgaaatagaggacattgtgcctttggtaaactgcagatttcagcacattcttagtcagctttatgatgagttcatgtgtgatctagtagagacagagtcttaatttgattttttaactgaatgtgtttgacagggacttagaggaaattctcagaacaaatgtaagctattggatttgtctacagatgaagtcattgttgctgagggtcgatggcagacacaagagcaaaatgcattggttaatggacttcctcttggaccgagcgcagttaaagtttttgtggataaagtgctcatgccagaaacatttgtatggagg

SEQ ID NO: 12966 - DNA, 548 bp, Arabidopsis thaliana columbia
atttcttttgaatcttagtgaacaaagtacctagaaaatgtgagagattatctttcatttttgttaatcgtctctaacctttatgtacataagcaatccattaagttgatcaaaatcttaccgtcttaatcagtacaatttgctgagaccagaagtgactccggattcacccaaccgcggaaacaaaacctctttgtcaatcataatctgaagatgcgatgtgatcttcacaaaggagacccatagaaacggtgcacaacaaaatgcatacccaaaaccgacaatgctctaacaacgccatcaggataagaaggaaaagccatcacgaggagtgtcccgaaaatgccaagccacggtgttatgacagggagaatgggaagcaagaaggcgttgatgggtatggtagagagagcaaaggagccggttaagtagagagaccaaccaatgagcgggtggatcgtctgtgggatgatgaagaatggtataatgtaggctgagaggataaagaggagtgcacaaacttgaaagctgtctggatcatgcttaga

SEQ ID NO: 12967 - DNA, 934 bp, Arabidopsis thaliana columbia
ccaacgtactgtttcatcatccatcatcatcatcatcatcaaaccatcatacatacgtatgtttatgtttgtaacggataataaatacgtacctataagggtcgagtccagtggctgaaactgcttcgacggctcgagctattatgttcttgatcacttgatgaaggtttctcgacaagtaccttccttgcgaggcaaagatcatcacgaactccatgtccaggtaaaactgttgaagaccaagtggacctaatggtttatctcctgtctccatctcttcccagaaactctgatcatcagatatccaaagaatcactgtctccgtcagtctcatcagcaatatcgtcgcgaatctctctctccccacaaacatatcgctcacaatcatggctatcctcgtcaatttcgcaaacagttcctggaaaattggtgaagggaaccattcaggctcttcagtggtttcgtccatgaggatataaatctcagagctgagacggacttctccttcttcagtgaagatgagttcaagtgcatgttgtctgcagaagctatctcttagtcgatccactgatctttgaagcttcttcttccattctctttgctctggtcggttctgcctatctgaggaacctcttcttggagtggattggctcgtaccttgtggcaaaatccttgaagcagaacgtggaattagctcgtctgctaaaagaagcgcattgactaacaaagccgtttgttgggactcagtttcagctactttaactattctatgaactggattctcttcgttttcagctgaaccgggcaatgcgttgatcaagagatcaacgtatgagttaaacacttgcaaaacaccgtctagtgcaatcccgtctaactgtaatgcttcatccagcggtccagcatcctctagaaattcctaaagttccacaga

SEQ ID NO: 12968 - DNA, 1401 bp, Arabidopsis thaliana
tgtgtgcaggctttataggatccccaagagtctcgatatagtacccagcatcacgtaacatgttgtacatgatgtgaaagtttgtatgcaggtgatcaccatgccaatcaagtatgtcattgcggacatccaaagagtctcttggaatataaccaggaggatatttaatgctgtgaaattgatcccacaaaatacgtttcgctcgtggtggagtgggaatcactttcagtttcaactgaagagaacaagtactccttctaggcccactttctccagaggctggtgggctatagactttcacagttacattaccctctatttcacctgtgaactgtgcaccttcttccttgatctgcatgtgtagagctagataaccagtccacggccatataacatccgggtacttaaagtgaatgctcagaagatttccttcctcgtttgcagggtgccatgttggtggactttcaatatagccaatgacacccataccattaagaattgtcgtgttgaaaatgatgggcatagcccggcatatagcggctgacgacaaaagggccaggaatatggacaatcattataatcaagaatgctcgggaaaatgcttgcccgggggtggtagctctttagaatttcatatgattctaatctgacaaagagtcgaaaaattagagactacaaaaataaaggaactaggattaaaataaaaataaagagtacaatggtgataaccaatatggataagtaacttacagatcaactcttccagcaccctgttcatacatattaggacctgaaagcttagcagcaccttcgaccaatgcctgcttcatgcttgctggattgagcagatccttccttctagcttcaggaataacacttacaagtaggcaaacaataccagcaacaacaggactagccacacttgttccagacaggcttttacaaccagtgctgatcttggaccccataatgtcgcggccatatgcaaccacatctggtttcacacggccatatctgtaagcaaaactttgaagttaggaattgcaagaagacaagctattttgtatctttacgattgtagggtttgtaaaagggaatgtagaagcagcaaggaaatacagtacccatgaggaagttcccaggtgctcatgccacgagatgagaatgaagctatgtgatcatcattgtcaatacctccgacacctattacatcactctggtcagctggattatttaacgttccgtaaagtggcccatcatttccaattgcagacaccataatgatattgctggctgttatttcccaaacctgttagaagaaaatcagtgcctctggaacacacgactgttcatatatgctagagagaaacatccccaccactcgactcaacaggataagta

SEQ ID NO: 12969 - DNA, 600 bp, Arabidopsis thaliana columbia
gtacttactccaccgcttgttgtgctaagtggtctactgtaattcatgtatgcgtctctctgaagtaagagtgtctcgagttgccataactgagacaacacaaaaaagttaagaaacataaaagaatcgttgattgtgtgttcgaatatattatgtttttttgaacctcaatgtatccaaaattctcaggatcaagctcttccatgatcagagatgcgtactcttcagcttgttccttgagttttgctaacttgtttgctgatgcacttagcattagaagctgcgtttcaaaagtacaagagttgttaaagagattgattgttttaaacgtaatctctatgttgaagaataaagaaagttacttgtttgatttcttctctagtgatcttcccgtcttcgttactatcagccctgtaacaaaaaaccggtaccagttagaatctttttttttctttcagtaacactacaaattataacagaattgtagaatcattaaacaacaaaatatatttagttatgtcataaaaatcgcagaataacaaaacggagttgagtgtaaaccataatgttactgaattaaatgtttggccataaaaagag

SEQ ID NO: 12970 - DNA, 930 bp, Arabidopsis thaliana
tatcatggtgcgtcatatgattgttcgatatggtatagccgggaaccatgtatagcgtctatgagtccatcatcgcagttcgacaacgagcaatggtcaatccacacgtgtttccctccaaatatcgccaccgcgtctccatcggactgcatccaccacccggtgtgatgtggaccatctttaatcatgccacctataaaacataacatatagtagcatattttatgttttatgacattttgcctctattatattaagcacatctactaaaagtttgaagtctttgaatatggctcacctgatcctggtttacagtcatggatgttaatgccatgaattatgatgttagttgcatagtggatctttaagcatggtccatcggtaatgtgaacactcgagcctctaccatcaatggtcttgaaagatgtgatgataagttcttttttgagcctaatgaccatatctctcttgaaaatgatccataatggttcttcttgtgtcactgcatatcttagagtcccaggtctagggtttacgggatcgtcgttggcaggatccgtaactacatagattcgacctttgcgccctccgatagcatttttgccaaatccaatggcacaatctgctaaccgttggcggtttgtttcccaattagggtcacaccgccaacaatcgtcaataggatttccggttctacaagataggtaggccaagctcctccttgacgcattgaatacacttctacaaatgagagagaacaaaattcttataaataatgaaaaaactgattctgttataaatttgaacattaaatgtgaggataaaaagtgtacggttgaaaaagaaaaagaattaaatgtgaacatattatgttagttggagaaacaatattggacacaattggcatatatatccactagctagttgacg

SEQ ID NO: 12971 - DNA, 508 bp, Arabidopsis thaliana columbia
gttgggtttgatggacttatgggaccagttcatatgggaactgggtgtttcttcaatcgacgggcgttttatgggcctccgactactttgattttgcctgagatagaaacatttgggccaaatcggattgccgataagcccattaaagcccaagatattttggcgttggcacacgatgtagcaggatgtaactacgagtgcaacaccaattggggatccaaggtaagattaaaatgaactttagctttcttttatgtatgttgattttttggttatgtttacagattttgtttcttttacatcaactagtcttctcaaaatccatatttataaacatattaacaaaatttttgtgtaattaacataaacacaaaacacacataaaaatgaaaaacatgaaacacaagtatgtttgcattcacatgtaaaacaatcgactctccaatcttgatttctgtgacattgttttgttattacttactagccatttgtcaaactttacagatag

SEQ ID NO: 12972 - DNA, 816 bp, Arabidopsis thaliana
gataatgagtaacatttgactaacgctcctctaagctaaggctagctaacctacgcggagaggtatatcaggaacacgttagcattcacgcgaccgatcggctccggcgcatgttagatgcaatcagtaatttaacaaaaactgaatgattttgtatccaaaattcaaaactttcatgtacttgaagcgtagagaacaaaactaagatccggattcgagagacaaaccttgcggtaagtagttccatcaggttcgacgatccaaccagcttcgttacagagtgctttaagcacttcgttgttgtcgcaatgcttcggaagctcgtaattaccgtacattcttaatccggtgaagatcttagctgcgattgctctccgtcgtctttctcttctcttgttgttctctctttccctccatgtcggcattctcgtccctgatgtcatcactactctctgtttcttcttcctctgaaaactctctgtttcttcttcctctgaaaactctctgtttctttagctagatcaaagataaaattcgaagctaaactcaagctaattcaacctaagaaagagttcctgaatcttcggtgaagtaatatatcagatctggcatcaaaaacaaacgaatcgatactgcgtgaaccaacactttttcaatctccgatcagatatgcaacttgaattttccgtcggagcgaaatgatctcaccgagaaaactcccgacggcgagaatcttgaaaaaagcaaaaatcgtggaaacagttgcagtaacttgttggctgcttcaccttcttcaattgagaaaaagagaagaaa

SEQ ID NO: 12973 - DNA, 542 bp, Arabidopsis thaliana columbia
acccctatatatatatatatatatatatcactcttttcaattaaatcagctgttaaaagtggaaaaaatcaaagagatatcaaaatattgattagaagaatatgtccatattcaattattttatattatctttattaaatgctttaccttacaacaataacttaaataaatttttgggattcccgttacattacttaagtaggacgacgtgcgtctgcttcgtctcattacaaagcagaagaaacacaaacagaggcagagatcttaagagttaaagactaatcccaacaatggcgtctctcaaagtcccaagcaatgttcctcttcccgaagatgacgccgagcaactccacaaggctttttcaggtctctctctttttttttcatcacttgatcgggatttagtttcttcttatacgatctctaatctgtaatcggtttcgttaatcacaagattaatcatttttgatatcttaagtactctcctatactcatcgttgagtattatttagtttgttgatttaacacaactacattggtga

SEQ ID NO: 12974 - DNA, 616 bp, Arabidopsis thaliana columbia
ccatataaccgatcaagttagttaagtagtagaccactaatttgtaaaatgataactcatgaactttctcaaaaccaactatatttgctatgcgttgtgttaaatacctgtcgtttggccaagcgacggagagaatccggctggaacttgagactaccacagtggagttgttgagaggatttggagaggttgttgagaggatttggagaggtaattggcgtaagtgagaaggagaaaagacaatgcgacggtgttttggagctggctgcttccgggtttgtaaagaagaccaccgggagagtaactcatatgtgcaccaggagtttccagaaaaaacgaacacatcaatttttccgctgtatccttatacggtgcaatcgcagcaacattcttctcaaatacttcctatatcaacaacaagcagctcaaacggtttagaattaaacgagtttgttctcgaccggtataccagaatatatacatttttctatttaagaagaataatatatgcatggtcaagttatactacttgtatgttcagtataaaatgagttacgatcatgagttttattgtattatgaatataatttccgcattttaaaaatctaagagaatt

SEQ ID NO: 12975 - DNA, 561 bp, Arabidopsis thaliana columbia
gaggatcggatccctatatggtttaatttacatgtggcaaatacctaggacatgctcattacaggaagctttttcaacaataaaataaaataaaactcaatcatggagaatttaaattcattttctttatgtttcaattaagtagacattgcaatccaggtgtcatcaccttctttttttttaagatgtcactacaattcatcggttcatcattatctaccatatgttttttcttaaaacatatattcgtattcgattttttcctacactaaaatcataattcgtaactttgaattttacttttctaattatatgaaatttaaaacaaaaagaaataccaattattacctgtaaaagaggcaattaggaaaggattggtaataaattccaaatgtgaaaccgctctcttcaagtgattcgaacactgtcctctgaggaaagccacgaacaagcgtgttagtgtcattactaaacgcaccgtttgatgtcgccgcgtggacgtagagtcggttaggctgcgtggacgagggcaacgacgagaaccaccgatcgcagacagcg

SEQ ID NO: 12976 - DNA, 1157 bp, Arabidopsis thaliana
ttgcccgcccggatctcgatagtatgtctaccatacaaccatagtgttgcaatcttggttctatcttgtgttttctcctcatgagctcaaagcagagaaggccttcctttactaacccagagtggctgcaagcatttaaaacgccaacaaaggtgatatcgtctggttttaaagagagtctctcaatctgcaagagcatatcgaatgcagattcccctagaccatgaatagcgagcccaccaatcatagcattccagtgatccctgcttttggtttcgattccctcgaaaaccaacatggcgtgttgtatgcttccgcatttcgaatacatatcaatgagagcaacaccgagttttccacctagatagaattgtttctccacgatgtacaaatgcatatctatggctttggataatcggccaagctgagcaattgcaggcagaactattaccaaagtcgtatcatcgggtaacaagtgactctccttttccatgtcactaaatatttcaagagcttccatgtgatacttgttttgaacataaccagccatcatagaattatatgccacaacatctctatgaggcatttggtcaaacagagtcttagcgtgatgaacaaaacctaactttgcatacccatcaatcatggtagcccaagtaactacatctcttctcggcatcacatcgaataaacccttagcatcttcgattcttccgtgttttacatatccatctatcattgagttccacgaaatcaagtccttctcaggcatatcagcaaacagtttagacgctatgtcaactccatctgatgtctgagcataaccacttatcatagagttccaagatatcaaattcttcatctccataggcatcaaatcgaacaattcacgcgcggatacaatcaatccacatttgacatacccatcaatcatggaattataagaaacagagtctctcttcggcattctatcaaacatctggcgtgataaacctaaacaaccacatttcagatacaagccaatcaaacaattctgtagaaacaaatccgaccaaagtccagtttttttcaaaaacccatgaatctgcattcctccttttacaaaacctaacctcgaacacgctttaagaacaagtgacagtgagaatttgtcacgg

SEQ ID NO: 12977 - DNA, 551 bp, Arabidopsis thaliana columbia
ctagtacgtaggccccttaccattgttcaaaggcaagcgattcatacttatattatggactattttactaattgggtggatgccgaggcatataacaaaatccaagacgagacgttcaacgattcgtatggaagaacatcatctaccgccatggtcttccttacgaaattattatggataatggtttacaatttatttttctgcagtttgaagaattttgtgcccgatggcgaatacgcctcaacaagccaaccccgcgttaccctgcgtgtaacggacatgtagaggcgaccaacaaaactatactagacgagcttaaaaaagggctcgaatctaagaagggagcttgggcagtagaagttgatgaagtcctttgtagtcactgcacaactcctcgacgagcatccggtgaaacatatttctcccttacttatgggatcgaggccatggcacccgcagaggtgagcgtcggtagtctccgaagatcaatgttcatcaacaagccaaacctcaacgaccatatgcttgtggatagctcgatgatgctgaag

SEQ ID NO: 12978 - DNA, 1126 bp, Arabidopsis thaliana
caaaagatttattgattactaaatgccttgtgcaccgtctatttggtatgcatttaaacagatacatggctccagaatacgcgtccagtggtaaagtaactgataaatcagatgtatattcctttggggtcgtgcttctagaactcatcactggacgtccatcaattttcgccaaagattcttccacaaaccagagtttagtagactgggtaagtcaaagtacatgatgatgatgatgataccattaggttttctttttcccactagttattagatgaaaatgaaactccagtataactgcaagcttgaaacttcattagactgtaaattttgattattcctcaggcgaggccattgcttacgaaagcaatctctggagaaagttttgactttcttgtagactcaaggttggagaagaattacgatacaactcagatggcaaacatggctgcttgtgctgctgcttgcatacgccaatcagcttggcttcggcctagaatgagccaggtctgagatttagtttaaatacatgtattcgtccatatatccgaaaggaacaagcctaatccatgaatacatttatatcttgaaaaaaacttgaataggtagtacgtgctcttgaaggcgaggtggccctgagaaaggtcgaagagactgggaatagcgtgacctatagctcttctgaaaacccgaatgacatcacaccacggtatggaacaaataagaggagattcgacacaggttcaagcgatggttacacttcagaatatggagttaacccttctcagtcgagcagtgaacatcaacaggtgaatacttagttcacaggttcaatagggcaagtttcaccacaattattgggttttcggatacagtcatcttgggttaacataaaatgttgtaagaaattagactacttcattcatttgtagttaaggggtccgaagaacactgcttgtgttttgttaaatgtataaattggttgtaatattggggcacaagtttaattatgttgcaaatactttgtttgcttctgatctaacttctattgctctgatttccagtttttagctttatgacattactatggcaatttatactcttatgtttcataatatagttttat

SEQ ID NO: 12979 - DNA, 437 bp, Arabidopsis thaliana columbia
ttgaatttacgaatttagtttagtatataattttattaatattattgtgttattattaagatattcacatgaatttcttaaactgatgatggagatagagatgctctaacactaaccgttactatgtaagctgacataattaacatccgtttcaaagttttcaaacccaccggttcttgctcttgctccagaaccggaataaacccaaaaatgtacaaaagcaacacatctatttctctaaaccatcaccggtttataaaaaaaccttcttttttttttttgtctataaaaaaaccttcttaaagagacaaaacacacatttcgtctttcattatttctatttttgttttgtcggacaaaaaataaaatgaagagcaacacaaacactaatctgattctcttccaccaccactctccactaacttcaaaatcaccct

SEQ ID NO: 12980 - DNA, 508 bp, Arabidopsis thaliana columbia
gtttttatgtcctcccaatattgttgaaaaaacgcaccagtgaatccgtcagccccggcgccttcgtggatccaatggagaacacagcttgttttatttcctcttctgacacaggttttatcaaattggcgttcatctccggagttactctagtctggaactcgtgtaggacatgatagtgattattctgtgggtttaagtcactttcaaaaagcttcgtgaaaaactgttccgccaccactcctatatgcgtatcaccccgatgctctgtgccgtgatcatcgataagggagatcagtctgtttttagctgcgcgagttttagcagaggcaaagaaatactgagtattgcgttcgccactcgatagccaagtttttcgacttttgattcgccaaaattcttcctcattttcataagcccgagttagctgaagacgcagatctcttaattgttgagtagatgaaccaacagagtgagccttatccagacgatgtttaagcaagacaat

SEQ ID NO: 12981 - DNA, 591 bp, Arabidopsis thaliana columbia
gccagtttgctctaaagaaagtccgcatgaagaaatttacctgcgcgaatacaaagtgccgacggaccagctgcatcacctgtcaaaagccgtggcgtgacccgcacgtctgccatgaacctttgcttctggacctccgagccaccgtcgaggccgcccgcactgccgcagtgaagcgcacctgtccccgctgcggcctttccttcgtcaagtcctccggctgtaacaaactgacctgtacctgcggctattcaatgtgctacctctgccggaaagctcttgggccaccactaaaaacccgcgaccgccgacgacctctacgccaagaaaacatcaaccccatgggcatcggcgaacgtcacgagcccaacctcgatccccaaccagaccaggatgaggacgaagacgaagaagaaaacgaaggctaccgccatttctgcgaacacttccgcgctaacccgggctcccgctgcacagcgtgcaacaaatgcgagctctaccaagatgaagacgaagaagccgttgcgcgacgagcaggcgagaaagccgagtacgagtggcgcattcgacaccaaatggctgctgctggtg

SEQ ID NO: 12982 - DNA, 526 bp, Arabidopsis thaliana columbia
cttgcaccaacctcgccttatcttcctcctacaaaccaatatttggttatggctcaatgaatgaacttgaagaagttataaagagatgttagatgagtgaactcacagtagggtaaggccatttggaatgagattgccaccaagctttgagaacagaggtggtatctcctggtaacttcccagctcttctcttccttaatatctcctctcttatgtctactatcttctccttgtaacccttttcatcaacaagacaaagccctctacattgttagttcatgaactagttcaaagaacaagtttgttgattattacctgtttgagttcatgtttaagttcttgtctaactctttccatcaacgacctctcactctcagtaggaatcaaaggaccaaaacccaacacatctaatcccccatcgaacatattagcatcactctctacttgttcatcttcatcgtcagacattgttgctcccatccttctccaggagacactcctaatctcaccaatataacgcaaaact

SEQ ID NO: 12983 - DNA, 1023 bp, Arabidopsis thaliana
atcacatccttcctctctacgcttttagggggttttagggagcgtcgatcaggtgcgacgagcgtacgtttagctcgctcgttgtctctcaagtctaataagttgactaggtttgactagtcaaaatgtgtgcggtgtatacacacactggagagcttgccgcgaattacctagggtcccactaaggaaaggacatatatatatcatgggcaaaaaagtgccgccaatcaaaacacttgaaaaaaagcaggaaaaaaacttacaaatagaaccggcccactcatagcccagtaataaaaaagtccattaatggatatctcgggtcatccaaaaacccgaacccgaaccattttcgatgaagttgacgaacctgtctggttttgttgcgttcttccgatttgggttggagaggaaatggcgtcgggatggggaataacgggaaacaaagggagatgctacgatttctggatggatttcagtgaatgtatgtctcactgcagagagcccaaagattgtacccttcttcgtgaagattacctcgagtgtctccaccattccaaagaggtaggtacccacttcttttttccggtgatattgtttgaagaatttcattgatttgatggttctgatgttcgccactgtttccggctagatcagtgtgattgtgatgtctagatcacttagttgtcgaaattccaaaaatcctagatcaggtcgagcaattgggatatgagccccacgcctttgatgagtcaccatcggcgacctcagctgcagcatcatgatgccactgtaagatcatgttctcctgttaagataggatgtatcgattaagcggttctgggaccaaatcaaccctgtatatggttgtaacggctgtttctgcagcaaacagacggctctctaagaacatgacgatacacaccggtggtttccttactttgaatgaagatgctgtaagtttaagtttttatgtgttgtgtcctgttgttgcagttcaaagaaggacaggatatcaaggag

SEQ ID NO: 12984 - DNA, 436 bp, Arabidopsis thaliana columbia
ttctagaaggcgcgcaacactaagtattgatacaagacttaggcgttaatagttattacttaatgttctttcgataatgcaatttccatggaatccatattgctcagacagttatttctggagacttttgttgactagtgtactcagactttgctcattccattctgacagatatgcatgatttacggctgatccacacggatttgaagccggagaacattcttttggtatcgtctgaatatatcaaaatacctgattataaggtgagcaatcaatcatctccaagctggactcatttattttcatggctaatatgatatccatccatgaaggaacttgtataactcttgacccttttcctatgtgtggtcatgaaaatctagtttctatcccgacctacaaaagatgggtcatacttcaagaatctgcccaagtc

SEQ ID NO: 12985 - DNA, 571 bp, Arabidopsis thaliana
agtagcttttctctttttcggtattccgtggcatagctaactaactaagtggcattctaaaagctgttatacctcaggtttgtatttggggtgacagctttactacccttgataacttcagcagttgctgttctcgtgaatgaacaacgtgtggtcagaccagcatcagggcagaaagagaatataacgctgctcagtcctggttttcttcagacctcaaagcagaacatgattcagctatggggtgccattaagcaaccgaatgtttttctccccaccttatttatattcttatggcaagccacaccacactcagattctgcaatgttttacttcacgtatgtcctcttccacttggttcatgccttcatggttattggcttatttcatattctctggaatgtattaactagtctctaactaattttatttggtacaaatttcacctcagaacgaacaaactcggttttaccccggagtttctgggacgagttaaacttgtgacctcaattgcctcattgcttggagtaggactgtacaatggattcctgaagactgtccattgagaaaa

SEQ ID NO: 12986 - DNA, 629 bp, Arabidopsis thaliana
tggcgggttgtttctttgctattgaaactgttttaagacctttacgtgccgagaactcgcctccatttaccactgcaatgataatattggcctctgttatatcatcgactgtgtcaaatgctctgcttgggactcaatcagctttcacagttccctcatacgacctgaagtctgctgcaggtatgtttctttcactgttaatctatattgcaaaccttccagttagtcttgtggtttgcgtttttttgtagcttatgatttagtgtcctgatggataggtgataatgtgatatatcataaaaaatcttggtatctttagataatgaatgccaatatttatttgcttcatcgagtatttgtgtataagtttccaaacatattttttacttgtctccagagctccctctgtacctgatactaggcatgctttgcggtgctgtcagtgttgttttttctcggctcgtcacgtggtttaccaagtcattcgatttcatcaaagacaaatttggtcttcctgctatcgtgtgccctgcactaggtggtttaggagctggaattattgctctcaagtaccctggaattttgtattgggggtttcaaatgttgaggaaacctgcatactggaaaaa

SEQ ID NO: 12987 - DNA, 523 bp, Arabidopsis thaliana columbia
cgtcttgtcccaaccatcatcttcaaccagtccactagattcacctacaataatctcgtgttggtccgcgaaccgcgatgaaactaattaaactaaatgaaaatagttgattacctcatgagcaggacgtccgtaatccacagggtctcgtcctgtgattgcttctaagagaacaacaccaaagctgtagacatcactcttttcatttaacaaccctgagtttgcatattcaggagcaacgtacctacaaaacgtccacaaaagcatttagatttaatactaaagacttcttgattatttttcagtttataagcctctgacccaaatgttcccatcactcgagttgtcacatggctttttccagcaccaagcaacttagcaaggccaaaatctgaaacctttgcgttgaattcgtcattgatcagaatgtctgcttgacttgatgtctctatgcactacttttggctcaattgcttcatgcagatatgcaagactacacagaggaataatgatcagtatgtga

SEQ ID NO: 12988 - DNA, 489 bp, Arabidopsis thaliana columbia
tgaaacatataaaacattatgcaaagtcaatgtggatgaaatatgcactgtgcctgtgtgactaatgggtactctagtgccatttggaagtgagactgtaataccagtaacaggaaaagtctcactaaacattgccaaatcagaacaaacatgactactagctccactgtcaactatccaagcatcatgaggcaaaatggaatataatgatgaaagacaatgatgttgaaatgtgaaagaatgattttcatatcgtaaacttgttgagggaaattcaatagaaacattaccagctgtagaagtagttgccatagctccatgatcagtgatggtagctgatggaaagggagttgactgctccggaacatgaagatgagtattgagttgttgtattacagaatggacttgatccgtcgtaaaagactgagatcgagacttgatgcagtcattgcaggaggtggaatataaggagtagatccatgactgcat

SEQ ID NO: 12989 - DNA, 341 bp, Arabidopsis thaliana columbia
tgtgcagattgattgtaccatgtttagatctgcccctaatagcaagcctcatgtccttccatgtctgttgccctagtaccggctccacgatattgagtggcaggcatagggagactcggagattgtattggggttccttaagtcgggaatcacaagctcacatccattctccttcttgctacgactgttctaatacattttgtcgcgtggcttcatagtccgcgatttctcacgtgcatagacaaactaaccgcctaacgtttgtgttaactaacgatgctttttctcttcccttacactagtatttgttcgaaggtagaccggatgtggttgtctctatt

SEQ ID NO: 12990 - DNA, 536 bp, Arabidopsis thaliana columbia
tcccctgcacttagattctctatctcttgtataaatatgaaagcgtaaagtcgatcataattattcagttcataatatatagttatatactaataggtaacatataggtttttcgctctaaaacttttgtttgtcggatggttttgttgacatgaacaaagctcgttgctttgttgtattcatttagcggaaaactgaaaatcccttttgcgtctagatcacacaatgtgacgtgatgtttttcagattttattcaactaaaaattaagttaattaacgaataaggaatggatacaaatattcacagtaaaactgatatcaaacaaagaaaaaacaaattagccatctgatttagaagcattgtctttttgggcaacactacggaggaaagaagcactttttgtgagttctcgtagtggcttatccgtaaatctcatgaagttgtaaacaaaaccgccggcaaaaattccgacaaagggaccaacaatgtaaaccgaaattcctttatatcttccatcactattgctggccaagac

SEQ ID NO: 12991 - DNA, 567 bp, Arabidopsis thaliana columbia
cttcagacaatgccatctctagtttccaatcccatctttaatcatttctttcctaactcgccgtcgcatggcaatctcccagctcactccggcggcgatctgcaactttgttgctgccttaacttttggtgttgaagagggttatcgggtgaatgttcgttgttttgaagaaatgacgacgttaaaatccgttaggttgcttagatacagggtggtaaacaatcgccctaagtataacttccttcctggcctgaaggtcagcaatttcaagaactgggaggagtactatttctacgttatggttgatcttgaatcccacgagcgtccgttctcgggaaggaacaggatgggggcacaggatcccggcagacttctcttaaatagattggactaaaaaagtttcgactttgatcacattctcataatttttctgtatattgcagctcggtacaagtctagcccagaatgttctgttgagtttgtaggagttcgagaggcgatcttccgagctcgacgtcgtacgtggaaagacatcacgaggtcgcgagtcaacaacatcatgggaaa

SEQ ID NO: 12992 - DNA, 513 bp, Arabidopsis thaliana columbia
tgagacgctcctaaaaccttctatattttaaattgttctatgtaaagctatatcttttgttaaactcttaaaagaccctcatatttacttttaacttaacaatttaggataggattcgaaacatgtatacaattaggtttaaccgatggtgatttgaaaattgttcaagactctttaaatctgtgtagacaacatcagagtctatgaaaaaaacaatttaaagaacaactaaaacagtcatctaacaaatacaacagagatgtagaaaatcttcctacaaatgttcccaaactaaacaaacagaccaaacccccgtaccaacaaaaccagacaataacaacaagtagaaaaagacggaaatacccttaaaagccataaaatatttcacatgagggatttcaaagacctttcctttacgggcttccttcctttcttcatcgtcttcttcatcattatcatcttctcattctttttcttcctcccatgatcacttccttgatcttgttccattac

SEQ ID NO: 12993 - DNA, 572 bp, Arabidopsis thaliana columbia
ctaaaactaattccgtaattcgattactgtagcatttggtttcggtgagacttttgtggaaaaaataacttaataatgtcattttaagtcgggatcagttttatacgcattcatgattagtttaacaatatccaaacaaacgaacaacaaaatatctaaaatatattcttcttttttttccttacatagtcaaaagcaatctttatgtggattttttttgtttggtttacttccaaaggtatctaatataaagctaaaaagaagagagagtaccgagtcttgctagtgaaaaggataaacgatgacaaatgatgcattggaaaaaatggaggccggtggagtggtgatggcaaaagtggattggtgtaacgaacgtagaaaattttggaaaataacattgtttttatccatagcggttatggcaatatctctgttggtattttgcaagagaggaaaacccaacaatatggaagactcaactgaatatgcaataatattcactgctaagtatcttataatacagtatgcagtgttcggtgcatcgatcaaagtagaggagatgtggggttgga

SEQ ID NO: 12994 - DNA, 601 bp, Arabidopsis thaliana
catctttctcggtagctgtcttgaaaaccataaaagcccgctcaatgataccacatttgcagtacatatctatcagagccgaactcagaaaggcatcacctttcagttgcagacggatcactaatccgtgcacccatcttccatggctcagttctccgttgtttgctgcaccacttatcaaactaaccatagtgacgcggtctggcttgaccttctccacgatcgtcatttcatagaacaattctctgacggttctttggtcacatcccttcttcgaataaccaaaaagaagagagttccaagaaacaagatcccttttgggcatctgatcaaaaacagcctgagcagcttccatgtccccaagcctaacaaacccaacaaccatggtgttccaagagcgcatgtctttcttcttcatcgcatcaaaagctcttttagcaagaccagattctttgcatttgaaatacatgtccaaaagagcattgctcagaatcaaattagatgaataaacaggtcctctcctctcaatccaaccatgaactcccttcccaagtctaatatctgataaatgccacaacaaacaagaagactcagcacagtg

SEQ ID NO: 12995 - DNA, 438 bp, Arabidopsis thaliana columbia
tacaaagaggtacttttcgctaaaattagagttctttagttatgctactggttctcatttgtgatccgagcttttctatgctctgcagctcttgagtatggtgtttgataggcttcgtgaggaagatgtcgaggtttctacagagaggccaagaacagtgatgatgcctcctcagctccttgcagaagggacgataactgtttgtttaaactttgctgatctctgcagaacgtacgaattctaactcatcttccctttaactacttgtagttattgagccatttatcacttttaaatatacatttttcaggatgcataggaagccagatcatgtcatgaaattcttacttgcccaaatggagacaaaagtatcgctgaacaaacagcagcggctagagattaagggtttagtgtcttctaaggattttcaagctgtgt

SEQ ID NO: 12996 - DNA, 737 bp, Arabidopsis thaliana
cacctggctcaccgatgagcacggggttgttcttggttctccttgagagaacctcaattactcttctaatctccctgtgtcggccaatgacaggatcaagcttacctgcttgctcaaccaaatctgtcccataagtcttcaaagcccgaaggattacctccccacgaagcttctccacctcagacttaaccttctcaggcacaacaccagcttctttcaacacatcactgatttgagaatcttcaagaagactaattaccaataccgctactcccactttggtatccccgagattcttttgtgcacgattcaaaaccgtaacaagacttggactatcttgaggaaagtttccagttactgagggaaaatgcagtctttggagtatgtgaagatatagattctgaggaatggtcccatttgataagggagtagtactcgatcttggaagattattgtttggacttggattttgaggaatgaccccatttgtactcggtcttggaagattcttgttaggacttggattttgaggaacggtcccatttgataagggagtagaagtctgtcttggaaggtttggattttgaggaatggtcccacttaataagggaggagtctgttttggaagattcttgttagggcttggtttttgaggaggaatggctccagttgttgttggagtaacccgtttagtgagcttgtataaggattggttgataaggttgacaaatgactga

SEQ ID NO: 12997 - DNA, 532 bp, Arabidopsis thaliana columbia
taaatttattcgtgttcttgttaaagcatatggtcgagcaggaaaaaaatgtagggaaacaagagaaattagtttagtggtctagctcaagttacaaaaattcaccttccagtccaagtttagtgcccttaggtaaactgcaccaccaacgagtgcaacatcccgtaacaacacaattccaaccagtccagctttagagcacaaatgtcccatgcatccaccaaaattgagtatagtatcaaagatttttaagaagtttaaaaggtagtagtgcaatctaggactaacacacacagccgagtttagcaactagttaattaacttagtacggtttcctcttgatacatccatgcaatcttgtaaggaggtttgttcaaggagatcaaataactgtgcttatgaaattatgaatacgacaattctgatacatttttcccaggcgatcactcaattggagtgtaaatcaaagcacatgttccttataagagaaaattccgcccttcaactttgtgaactctagctatttcaaagt

SEQ ID NO: 12998 - DNA, 482 bp, Arabidopsis thaliana columbia
gaggatccccaagtttatgttttcatgtgttccctatagaagttgacttttttttttttgtctaaactctatagttgattggcgagttcgtggggacattctctatgatatttgccggctgctcagccatcgtggtaaatgagacgtacggtaaaccggtgacacttcccggtatagctttggtatggggactagtcgtaacggtcatgatctactcaattggtcatgtctccggtgcacatttcaaccctgctgtttctattgcctttgcctcttctaagaagttcccttttaatcaggtgaaccaaagatatctacaattgtaaaaaaatacctcatactatctttataaggttatttcatgatttcgaccatattcataactataagcagacaaaatatgtttttccactagttatttgttaaatcaagtttttctcgaccactttggttaaaacataagctaacaatgttttattttc

SEQ ID NO: 12999 - DNA, 674 bp, Arabidopsis thaliana columbia
  unsure (1)..(674): unsure at all n locations
gtactcgtgcacggcgaaaaacccagcatgatgattcttaaggaaaagataacctcagagcttgacatcccctgtttcgtccctgccaatggcgaaacagtttcattcgcttcaaccacttatataaaagcaaacgcttctgatatgttcctaaaaagctgctccaacccgaatttcaaattctcaaactctactcagctccgtgttacagaccatagaaccgcagacggggttttggtaatagagaagagcaaaaaggcaaagatagttcaccaagatgaaatctctgaggtgttacatgagaaaaaccatgtggtctctttagctcattgttgtccagtgaaagttaaaggagaatcagaagatgatgatgttgatctaatcaaacaattgtctgcaaagatcttgaagacagtgtctggtgctcagatccatgaatctgaaaactgtttgcaggttgcatctttcaagggctctttgtgtctaaaagacaagtgtatgcatcgaagcagtagtagtagtagtgaagctgtgttcttgtgttgcaactggtctatcgcagatttagagcttggctgggaaatcatcaatgctatcaaactaaatcactgattcttgtacactgagaagtgtttcagtntttgtcgtttttctgcggcatatgtaaaagtttg

SEQ ID NO: 13000 - DNA, 593 bp, Arabidopsis thaliana columbia
ttcattgagtgaaaactactaaatgtcagttgcaaaaggttagagacgatggatgggatgcttttatggctgaagttagttcttttagcgagaaaactaacattggaatgcttaaaatggaggaagaatttgttgattctagaagaccaaggaaaaagaccggtataaccaacttgcatcactataaggtggattgtttctacactgtcttagatatgcaacttcaagagtttaatgaccgctttgatgagttgaattctgaactacttatttgcatgtcatctttgagtccgatagattcttttcgtcagtttgataagtccatgctcgtgagattgacctagttttatccagatgactttagttttgtggagcgtagatctcttgatcatcaacttgagatctaccttgataatgtgaaaaacgatgaaaggtttacagatttaaagcgtcttggtgatcttgctcgtgtgatggtagagacaagaaagcatctttcacatcctttggtatatcatcttctaaagctatctttgattcttcctgttgcaacggcaactgtcgaaagatgttttccgcgatgaattttgtga

SEQ ID NO: 13001 - DNA, 671 bp, Arabidopsis thaliana
tcacatcaggcaaaatggtaagacaaaatggtaaattggattcttggtcgaagatagttcttcttgtcaatcatatgttaatgtcacagggagttattatcaactcataactggtgatgtttttttttttggaaggaaatgagatggctgacatattggttgacaaggtgggaagtggagaggccacacttatcggtgcagacgaaatacaagctgcgagtaatctacaagttgctggtatggcgagcaccccacatgcctttgtccaggaatcgaaaacgctggaccacataggtaaagttacggatactgaacataaagttcctcaggaaagagttgaaatagatgctgatcaggctaaatctgtgaagtctactaagaagaaaagttcaagaaaagccaagaccccagctaaagaagatactctggtagattttggtgcacagaatgttgaacctatcaaagttgtagatggagaaggacatgttaatgatatcagaaatgtattagattctttgcagcaaaggaccgaagttgaggagaatatggagaaaagtgggaagaaatcaagcaagagatcgaagaagaaagactctttgaacattgtggaggaggcccaagtagtagattctttgcagcaaaagaaagaagctgaggaaaatctggaaaaa

SEQ ID NO: 13002 - DNA, 546 bp, Arabidopsis thaliana columbia
gttctgtaaacgtttatgtcttcatctagtggataaattggccgaccaataaaaacaaacaaaaatctattattgtctgataaaaaatatattaaaaagggacattaaataaagatcaccaagtgacgaggaatggtcaaaagagatgggagacctcctttagagttgcatcgatcatcttgttggaggtttttatagcatcatgtattctcccagccttcacataagcatcgatcattgttttataagtgttaacatcaatatatccaaaatcatcagcaagtgaatcaacaaaaacagactctgcttctgacaacatcctgttttcgcaaaaccttgtaataatgtatttgtcactgaggtagtcgttcttgggtctcgcctttttgtaggtctccatagcctcactaaaccaacccatatcaaagcactcgtccaccattatcttaatggtatcagagtccaagcaacccttaccggttccatttttatctaagagttcatggtacaatgcccaagcattttttttttcaccgtatttgagca

SEQ ID NO: 13003 - DNA, 669 bp, Arabidopsis thaliana columbia
tgaacttccaatatgattatagattgagatacatactcactttggataatgggatcaagtaaaaaatgtaaaatcaagatgaatgtagtaatatgcagatttggtcacaagatttacataattaaatctaaagacatacacatctaaccatatatgatacaaaatgaagacaagtctccgttacataattatatcaactttcttacttttcatcgttgtgaccacggaaagacttgtaacgtcttacagactccaacctttgcaacttcatctcatccttgaattttgtaatgaaggcttccactcgtgaattgagctcctctcttcccattgataactcttttttcaacttcacccacgacggaatcctctccatcaacttctttcccggccgcgcgggagatgaaggaggcctccttgctcgcgacgatgacggtgatagcgaagacaacgaaggagtagagctcctcgctcgtgacggtgaacgtgacggcaacggccatgaagatgttgacatttttgtgtctccctggatatgacgtggtcttgcaacgagttaggtttctttggttgcttttcggctttgactctctccacatctcctcatggtctcgtctcgtcccccgatgtatgctgatgatatagtatatatatacgaagtggagtttt

SEQ ID NO: 13004 - DNA, 531 bp, Arabidopsis thaliana columbia
caaaatcacagtttgaacatatgtcttggttcttgattacgtataggtagattagagatatcatacctgtgaatccttttgtgatagcattagtaatccaagcagttttctcctcagcatttatcttgtcctcgagatacctctgttaaaaaaaatgacaaaatgtaactatgtttgctttgttatagaacctccattagtagaatccattacatgaatctcatcttctcacaaaaagagccatattttgatgaggctgtataccagacatgacaatactcgtcgcctgaaatatacaaaataagaacaacgatcacactcgcaatctaaagctgataatgttcactacatttggacttaactacatggttttgcagatgatggcaacacatcatcatctgaagacaaaggatcgaagatacctggtaatttaccgcccgtttatggtagtcacttggtaacagcggtggctccggatacttatcatccaggtactgtccatttgaaaaacaacaagacgaatatacgaat

SEQ ID NO: 13005 - DNA, 518 bp, Arabidopsis thaliana columbia
  unsure (1)..(518): unsure at all n locations
aaagaacttccagcgtgtcggcctgggctaacgccgatgagagccagcgttttgcctcctgtacggtgtcagcccagtttgtatggcgcgggcgtagtgcagccaacgccgcagagagtgtacaaccagtgccgtgggtgtttttggtcataatgcgcggtgcggtaaaccgttgttcaccctcgcgggtaaacagccagtccgggctttgctcatcatccagatgaccacctttcattagcactgcgccacagcccatcgccaacagcgatcgcccttgttccagcatttcctgttcggtgcgcgcgtgtggccgtcgagcaaggcggcacttcgggcaagtttggcgttattaatgagacctgtggcaataatcgactgcgcacgtagcaaccgccgatagtgaaagcagcgggtcgcgctttttgccagcataccggtgtcgagtaccacgttttggatctgatctttagagnnnnnnnnnnnnnnnnnnnnnnnnnnnnnnnnnnnnnnnnnnn

SEQ ID NO: 13006 - DNA, 453 bp, Arabidopsis thaliana columbia
  unsure (1)..(453): unsure at all n locations
nnnnnnnnnnnnnnnnnnnnnnctaaagagagcaagaaaagtgaggagcaaataacgtcaagtcactgtatgaagcctgtcaaagaagaaactgtttgtgattcttctgatccaaacgtttcagcttgccaaccatctgaaggaggcataatctgtatgacagctgttaagtccgcaagtggtaaaaagaattcacagagtctacccaatgatgtgatactcctcagcgatgatgagtatgacatacctaggaaacgaggttctgtgagaagagatgcaatttcttctggcaagaaattagaaatacgagagagaccgacccacgttttggcgttagaagcttctgccaaaattgctgctccaatttgccgaagggaaggagattcgctgcgtgatacacgagacactatatcattgcctactaatgagcaaaacataatgagaagggatgta

SEQ ID NO: 13007 - DNA, 626 bp, Arabidopsis thaliana
gtaaagcttggtgatgtccaggctacaatcagcggagtgttaacagctgcgtttttcctcttcatttctcatgcccgaccgcttcaaaccctctctgcagaacggccccacccgagtgtcttctccgtgtacctcttcctctctctgataggacagtttgctgttcacttgaccttcttggtctactctgtgaaggaagctgagaaacacatgcccgaggaatgcatcgaaccagacgcaagtttccatcctaacctggtgaacacagtgtcgtacatggtgagcatgatgcttcaggttgctacatttgctgtgaactacatgggacatccctttaaccagagtatcagagaaaacaaaccgttcttctacgcactcattgctggagcagggttcttcaccgtcatcgcctctgatctcttcagagacctgaacgattcgctgaagctagttccattacctcaaggtctgagagataagcttctcatctgggcatcacttatgttcatcatctgctactcatgggagcggttactcaggtgggctttcctggtaagatttcttcttggaaacataagcaaagagctgtcactgcaaatctggagaagaagaagaagggtacgagc

SEQ ID NO: 13008 - DNA, 497 bp, Arabidopsis thaliana columbia
cgctgactcgagggcacaacgaaaccctctccgtacataccaatcaattcaatcatcttttgaaagtacagagaatttgctgcttctgtgggaactcctacatggtgtaagaatttggaaatggaggatgtgacgtcttttcgtgatacaactctgtttgaacagctactgtatagtttcctttgcttgctcgaagaaggtgactgaaacggtatcatcctcgctctctttgtttttgcttcagagacagatctcatgttcgttgaatcaaagctttttcttttgtctttactaaaccttccatttcccagcatcaacctatcttggctggttggatagaagtcatgatcttctctgtcttcttcttggtcaggatcctgagagaccgttctgaaagttaaagctcccatttcatcatcaggtctgttctgcctctatccagctcgatgccatttcatattctctttaatcttgacataaagctcctcgggagcagt

SEQ ID NO: 13009 - DNA, 499 bp, Arabidopsis thaliana columbia
tagtatcactttcctctactctgaaaattgattgcccatcagaaaggctgacagctcttatttgaacctttttgcagccaccagattaccagccacctttcttcagaggctgttcagaagaagaagaagctcagtatgtatggccaaagattcctctgagaatggaaattggtaatgttaacagccaacatcacgtgttaactgtaaaggtaatctgattggaagaataggctgctactctttatacagacatgtttctctcgtctttatgatgtccatccattgtggatgatctatgcaggtcaagagcgtgcttgatccttatgatccttgtgaggatgaaaatgataacatgcaagatgatgagaggagtaaaggacctgattctctccatgatgaccagccttgtaacgttttactccgccgccctgtcgcggcttggcagagaacaaagacgctgaccatggagaggctaatgaagctatattattagacaaat

SEQ ID NO: 13010 - DNA, 614 bp, Arabidopsis thaliana columbia
ttcttctagcttaggttcctcaatttcctcctaagaaaccaaaaccagaatcagaatcaaaatcgaaccaatttcaatttcgattaccaaatcaaatccctagaatcgaagtctaatgaagtcgaagatcggatttatgaataaacaccaaatatatagaaacaatgtggaagaagaagaatactcaccggagacagagacggagatggagacggagacgaagaagaatcgttgacagaggggaaaatgcgagagagggtggaggaagagtcagagacgattcggagataaccagaagttctgtagagggagaagcagaagcagatgaagaagagcaagagaacggctcggagtacattgccggagcacggtgggattacgacggaagttacggcggcggcggcggaggaagaatgattctcgtcggagtaagaatcgttgagtatcgccgtcttggaattggagccaaaacggttcgatagattcatcttcgccgacgttgacgacgttggtcatcgtctgggcggttataaggtagtttcaagttttttgaatgtaaaacgcggcgtttaatgagtttaccctccacgatgaacgcagcgtttaatgggttt

SEQ ID NO: 13011 - DNA, 646 bp, Arabidopsis thaliana
tgcttctgcttcgcatacacttttgatctcttatctttgttcttaatcatcgaaggaagtatcacattcctcttctcacccccactgaaagtagactttccacgaacatcagattccatttcctcaccatcaccatcatctttcttcctcttgaaccccatttttacgacggacggcgaacgaagcctctctctctttaatcgatgaaaacggcaaagctgagaatgaagacgacggagactaacttagggtttatcgactcaaaattgaaaaacctatacaaatgggcctatgcttgggcccatctttaagcataggcctatctatctttataatattcgttaaaccgtcgccgtatcagtctattaacgggcttaattctgggccttgaagaaacattatactatggcgtttcattataacgatattaaacgacgccgtgtatgttagctatcaatttcgtttctcagtggtcactatgcgatgcgccatggaagaggaagcgccgtatcagctgcaatttccggtctatcaccggcgaagaattcaccgtttccacagctctgcaatgtccttctcgtcgcgtctttgtccaagaccttgtctcagtccggtacacgaagcctcgacgcgaattcgataccga

SEQ ID NO: 13012 - DNA, 546 bp, Arabidopsis thaliana columbia
cctctagtaacgtcctcttgtagaaacaagtggtgagctttgtttatatttgcttccaaaaatctctctgacgtcttatatatttgaattttcaggtaccttcctggaccagatgacatgttggttctagatatttcctacatgatttacatgaagtttgaagagtatccaaacgctctgcagattgcactatttcttgataacacgcaggtaggactttaatctttctatagaacgtagtttcatttcattctttctgcgtgtgaagcatttggaaaaatcaatcctctatgttttatttcgagtatttgcgtagacatttttgatatttaatgtgctgtatggtgtattttctgtattgcagtatgttaaacaagtatttacctcatgtacggatctgctgaagaagaaacagttctgctacatgattgctcgtcatgtaagtcctaactatctctactttactacaattctatctcattctttcttttcggtatgtatgttttgatttggatctttactcctatatgctttgatagttggttg

SEQ ID NO: 13013 - DNA, 514 bp, Arabidopsis thaliana columbia
tgtctccctctctcgtatcgactacgcaccaggaggcttaaacccacctcacacccacccacgtgccactgaggtcgttttcgtcctcgaaggaacacttgacgttgggtttctcactactgccaataagctaatctctcaatctctcaagaaaggagatgtctttgctttccccaaaggacttgtccatttccagaagaacaatggtgatgtccctgcttctgttattgcagctttcaatagtcagcttcctggaactcaatctcttggtgctactttgtttggttctactcctcctgttcctgacaacatcttggctcaagcctttcagacttctccaggaactgttaaacacatcaaatccaagttccaacccaagaaatgatcatcacccttcctttatattcattactacagttctgtttttttctaaagggaagatctttttatcttctttgatttgtcttctgtaataaaaaaggaacaataactgatgatcttcagtgtgcatttg

SEQ ID NO: 13014 - DNA, 488 bp, Arabidopsis thaliana columbia
aatttctaacaggtaattgtggattatgaaggaaaaacattatacgtagttatgatatatatttcgttcgagtgaaagtatttttagttttttacaaagactaataaccatacttttatttggaataataatatgcgtaatttaagtaaagtaattttctcttttcaaaaatataatttcgatgccttttttccctctcactcgttaacacttttgtgccgaccgatgaatcaaaattagagtaacagtgaaacgcattcttccctcaatcgttcaaatgcaagatttcttcggctccgttcgtcgatcgcatgttttccgccttcttccgacgacgataaccaggagaaccagcctccgtttcccggtgttctcgccgataagatcacctcttgcatccgcaaatctgaagatttttatcaaaccctccttctcgcctcctcctcctgctaacactgtagacatggcacctccgatttcgtggagga

SEQ ID NO: 13015 - DNA, 584 bp, Arabidopsis thaliana columbia
aatgtaattacgagaatttagaagtgttctcggcgagtttagccagcgattgcaagttgcaccgtactatagtatcagcaaagctacaagtctcttccttatcgttacccgccggtacgtcaacgacgtatgactcaacgacacgtgtcctcttcttgccgtcggagtcctcctccgactcatgcaccgtcgtcaccgacttgtagttcatgagtctgtggtccccaccaacgacgctgaaactgatgacgtggcgatcatcgtccatgatctcaagccgctctaagctaaacgccgcggggagaccagagacgactctgacctctctcaccgacccaacctctcgaccgtctccgataaccacgtggcagcttttcacgaagtgtttgtacgcttgagggtgttcgaagcggcttaggattgaccagactgtggaaaccggagcctccacgtcttgtaccacgacggagaagcactgagaaggatcaacacgtgcgtgtgggaaagctccacgtgctccggcacatcagccatcccgcgcgtgaggctcactttttgaacatgttctgatggtggtggggata

SEQ ID NO: 13016 - DNA, 404 bp, Arabidopsis thaliana columbia
cgcaacaatttcattttcttgaggatgaagaaaagtgtccccatggtcgcacttacccaacccgtgatcacaatgatctgaatcagctgagctccaagtagttttcctccaccgcccataaacaaaccgtgtggccttccgggtttgttgccgtaaatctggttcaagtacttttcttgagcgaagagagccgtgaatattagtccccacgcaccgcaaccaccgtgtagttgtgctgcctcaagatggtcgtcgtatttgagcttctcagcgagcttgttgcatccgaggaggactagggccgccacgaacccgcagatgatcgcagcccatggctcaacgacaaagcagccaccagttatggctgcaaacctccgaggaggccgttgcatacatcagtgacg

SEQ ID NO: 13017 - DNA, 1182 bp, Arabidopsis thaliana
cataccaatgtgtgaaggatcttctagcaacattttcgccactaagtaacctgcgattgaccaagtctggtatttccttgcctgttttccaacgtaccttccgagcttaccgtcgtaatactctggccaacagtctcggtgaagacgcgattctatgaggtcaaccgcgcgtcttgcgatctgcggtctccctgtcttaatgcacgctgctgttagctgccacagcaaaactgtacattgagcagagaaacaaaaaggcggtcagattctgtattcaattttattgacaaatttaacactacacaacatgatgttcattattcaatctatcaaaacatttcaaaacaaaatatatcaaaggttgccacaaatgtatatatttaagaaagaaatgcgatcataagatacaaaagttgaaccaaactaaaatgtatctatacgttcatatgaataatccaaaccacaaccaaactgtagctaaactaagtactgagtttttataactaaaatctagctaaactatcttaaatgaatatttctgttcttatgccagtctacaaaaaaaaattgaaacccaaatcaaaccgaaaaaaaccctaatggctaggtctagcgaaaatctcagttaagcgagataagaaatgtctcatgcaatcagtctccagggaaagaaaaaagacctggccaagatccaccattgtggtagctccaccgtgtgttcttggggtcacagccagtaacgatgcgccactcatggccctcgaggcatggataacaaatcttgagaggcatctcacctacaagctctgcccaccggtgctcaaggaggtccataatggccatggattgatctggagtggccaatgaagaaagtatggagacacaattaccgagtgcgaaccaccggaaatccatatgggcaggtcctacgtttcccacaaagtagcctccacggagaggcatgaagtcgaaaacccactcgggtatagaatcaggcatcacattgaacttgttcaccgccgtgtgagagtattcctcagtcttgaacctttttaaacaaatgtactataagttatagtgatcttttgtgactctacatatcatctaaagcaaatgaaataactatacctgtaaatgtcattgaggttctgatgatcaagccagaagtaattgcgcatatgg

SEQ ID NO: 13018 - DNA, 1696 bp, Arabidopsis thaliana
tgatggctgaaaagcattattttaaaaactgtaatgaaatagtacatattttagacactacaacatttcacagttgtatggtctctgtcacgaaggcaaatttatcaaagtcaactatgagacacattattgaagtgctagacaacaaaaggtagattctaaatttccaaatcttttcaaaataaattttcttagtaaaagaaaaaaaaaactatctttctcataaacaaaataggaaataaaattacagtggtcaagctaagattatattcaagcattggatacataacttaacttaaaagtacaagtccatctattgtattacataatttatactatacaccttcactgaaaaaacactacaaagcaaagcttactttaatccacaataaaaacacaacatttcaagtataaacccctaataaaaaaaaaagaacaacattttaaatcaattaaaggtttcagaaaaaggtctttagggaattattatgatggatgtatgaagttgtgaagacgacacatcatgtcgtggattcgatcacgtgacaccgacgagttgtcgagaatatgaaaagcgtgaccaacacctccatgaactataccttcaactctcttcccatggcttctcatcactttacacatctccaagtttcgttcttttagtatatcaaactccgccatgaacaccatcgtcgtcggtaacttcgctcccgccgagctcatcagagggttacaccatggatggtctctactcgctccacgtggcagagctagacgccaatatgcgtcggaagctgaaagagtaagcgccgatgacttggtgtgatgttgttgtttctccgaagacgttcttgattcgccgccgaagaaagggtggatgagaataatgcccttgaggtgtagagtgtttgcgtatttgccactggccatgattcttacggcgacttggtaagctatgttggctccggcgctatctccggccaagaaaacgtttgagaggttacatttactcaaccaagaaggatatccaccaccggtagatatttgttgcttgactagccacgagacgacattaacgccgtcgtcgtacgccgccgggagacggtgttcaggggctaaacggtagtttacggaaacgatgacgcaacgggctttaacggcaaggctggtcaagaagtcatggtagcaactccaagcggcggagccaacgcagaaaccaccgccgtggaagtaaacgaggagagggagagtaacggacggcgaggctgctgcggcatcggggatgtagacacgtgtccatgtgtcgttggatagtttgatgtcaaaggctgtggctttagaagatgggtgaatggttggtgagacgatgggaactatgggaggtctttcgacgcagccgtcgttgaaaactttgatgagtccttcgatctcttccacgacggggccgtgacggtggtgatgggatccaccacggcggttgtcggaggattggtggttgtgagagaaggaaatggttgccataggttttttattttttaatgtgtagcgttgtgggttgagtttggattgagtgagatgagagattcattgaacttctttatatagagaagtttgtatatatatttatctaagatactttcaaataggaatatatagggggaaaaaataaaaattttaagaaatatagtataaggaa

SEQ ID NO: 13019 - DNA, 704 bp, Arabidopsis thaliana
tgttttttgtgtccagatattcctgacacaatcttataatattatcatatgtagtttctatgtgtatatattagttttataaaatttaaagcgaaagaaacttcaaagatcacgagtcacagtacttcttgaagactcgtcaattgcttataaaacccattaggtattgaaacaagctctctatgacttcctttctctacaacccttcccttatgcaacacagcgaccgtatctgcttttcttatggtcgacagcctatgagccaccaataccgtcgttcgtcccttcattagcttgtctagcgcctcttggactagtttctccgagctcgtgtccagagcacttgttgcctcatcaaggagaagcactgaagggtcctttaaaaccgccctcgcgatagccactctctgtttctgcccacctgataattgtactcccttatcacccgcgtgcgttttgtacccttcttccatcttgataatgaactcgtgcgcattcgccgctttcgcagcttccatgatctctgcctccgatgcgttttcattgccatacttaatgttttcgtatatggttgttgaaaagagagccggttcttgttgaactagcgctagcttcttgcgcaagctacgtaagtttagggtttttatgtcttgcccatcgatgcaaagattgccgttgctcggatcgtagaatctcatgatcag

SEQ ID NO: 13020 - DNA, 472 bp, Arabidopsis thaliana columbia
gacgagtacgctgagattgataggaaggttaatattgacaattccaagaatgctagccttgactgcagtgcaaaggcagaccgcggcctcaaggtcagccaagccttggatgagcgagcaacatggctttacaggtgggtttccaatgttaggtccactagattgagcacagtgacacaagtaccgatctctatggaatttttaggacaagtccctgtggttgcagaggtgtaagtgaagaagaggaggttgagagaaacgaagagtgcaaggggggttcttggagccatttgtttgtgtagtttaaaagctcaagaagtagtagtgtatttaatttgctttgagattggtgggagaaatgtaagtttttagtgggtatttatagggtattcattaggaggaaatgagaatgttttaattgttgatttttcttaataggggattagttgactaattatttttatatggatat

SEQ ID NO: 13021 - DNA, 1046 bp, Arabidopsis thaliana
tcgactctagatctagaggatccacgaatgttgtctgtgcttacttggatgagtcaactcctcaactgtatcttcctattctctgatacaagaagtcaaaagtttcttcagactttgccttcatcaatgtttctttaattataaacccatgccgaaatgcagcttggatcgtgatctgtttccatttgatagcttgctggagtttctaatctcttcttcttcttccagcttctttctccttgcagcctcctccttctgtctctgcaggagctccaattctcgatacctttcctcttctttacgttgaagttccattgcttctcgcctttgagattcttcaaccctcctactattttcttctaacatcttatccagctcttctctttctctcctagcttgttccttttaattaatttccaaactttttagtttcagcaagtattccaaagccagaaaaccaaacaaatagagcggcaaaattgaacaaacaactagctagacttacttcttttcttcttgcctcgtttagagcagcttctttttctttcttcagctgtatttccacgtcaagaaacatcttctcataagcttcctttgtccgtctttcaatttcttctttaacttcttcggttttcatcctttcctctacatttttccttactgcttcctcaatccgctgtgcagtctcttcttctagtcgcttgagctccgcctcatgctgcaatctacatttagtaagggaaaaaagatttagaaagaagatcagactgataacactagccactaagaacttttcaagatcatatatacgcacaaattgatcagttattcttctattcatgtccaaacagtattcaatttagataaggaaacaaagaggttgatcaacaatcacagaggcgataattcaagaaatgtacttttgccctttcgtgcatgtcaacttgctcactagcaatatacattccccctaatgtggaaaactatattgcttcatacacaaaataattaagtataatacaatctgaaagacaaagacaatgttt

SEQ ID NO: 13022 - DNA, 588 bp, Arabidopsis thaliana columbia
tgcttcgatccaagaggcacgatcctcgctcgttgctgctcgtaaatgcagactcttcgtgcccgtgaatacagtgaatctcttgccatctgatatgctttgtccaatcgatgaaacctgaaaaacatcaaaaaatccgaaaattacatatgtaatttgggtatgtattttgtaaatcgaaaaggttggagtacatttgaataatcttggaaacaaatggagcacttataaatatggatgaagtctcaaatcatatatgcaattgtgcgttttagatcattttaagtgttttggggtacatttgaaaacattgtaaactacagagggtatacttttagattaatttacccaaattaaggttgtactaatatttttaaaatgtatgcgttgtatttgaaacgtatgtaaaatacaggggcgttctgaaataaatcaaaaccttgaggtgaatttggccgagaggtttcctggggctatgaacatcaccgcgtttgctatgtcggcaaataaaccgtaaagattcgtcgccgatcagtttagatctccgatccatctcaacggagagagatattttatcgggaccatgga

SEQ ID NO: 13023 - DNA, 461 bp, Arabidopsis thaliana columbia
gctctacagggtcttactttcgccattaaagacatgtaagatatccaactacttacagagtttcttctatactttcttgtcaatcaatttttgagcttattgcttggtttgatcagttttgatgtggaaggacgcgttaccggttttggtaacccggattggttaaggacacactcggcagctacttctacagctccagtagtttcatctctcttagaagctggtgccacagctttgggtattaccattatggatgaaatggcttacaggttcaatttcacatcttttctggtttaggagttcatgttttaagaaacaggatatgtcataacagaggctagaactaaaatatgactaggtttgttacgttttttctgagcatgttcttacttaatatgcagtataaacggagaaaatgcgcattatgggactccgagaaacccgattgctttcgatagagt

SEQ ID NO: 13024 - DNA, 573 bp, Arabidopsis thaliana columbia
  unsure (1)..(573): unsure at all n locations
nnnnnnnnnnnnnnnnnnnnnnctaaagttatcggtgcaaaaattttcgtcacgcttaacaccattttgcatgatgatgagctggaacccgcgcaacggctgattactgacctctaccagaccggtgtcgatgcgctgattgttcaggatatggggattctggaacttgatattccgccgattgaactgcacgccagtacgcagtgcgacattcgtacagttgaaaaagcgaagttcctctctgatgttggcttcacgcagattgtgctggcgcgagagctgaatcttgatcagatccgcgcgattcaccaggctacggacgcgaccattgaattctttattcatggggcactgtgcgtggcctattcgggtcagtgctacatttctcatgcgcaaacagggcgtacgccaacacgtggcgattgctcgcaggcgtgccgtttgccatacacattgaaagacgatcaggggcgggtggtttctatgaaaaacatctgctgtcgatgatagataacgatcagactgccaacctcggcgcgctgattgatgctggtgtacgctctcaagattgaa

SEQ ID NO: 13025 - DNA, 513 bp, Arabidopsis thaliana columbia
cagcttctcaccagaaggcctgtatctggcatactgagagatgtcaaatgcgctctggagaacgataacatcagtgcggttctggataattcagcaggagactggccagtcgcacgagttaaaaagctagctaatgtagccatccgttgctgtaagaaaaacccgatgaatcgaccagacttagcagtggttctacggtttatagatcgaatgaaagcaccagaagttccttcatcagagacatcatcatacgccaaccaaaacgttccacgccggcctccttctcattacctctgccccattttccaggtgagtttctatgcttaaacagagtttgatgatcatgattaaaacaaaactcaaaacatgttttgtttgttatcatcacaggaagtgatgaaagatcctctgatagcagcagacggattcacttacgaagcagaagcgattagagagtggttagcgaatggacacgatacgtcgccaatgacaaacctgaaaatggaagattgc

SEQ ID NO: 13026 - DNA, 3131 bp, Arabidopsis thaliana
catgtcaggtttcgaaatctccaacagaaaacaaaaggcgccttaattcaacttgaagacattcagaggatgcttttctcaaacccctcggttctctcttcagacaagagcatgttgccaggaaaaattgggacttcttttcattggccttggagtctttttacaggcaaaaatccagaattcgttggctgcttgagggtgatgcgaatacgagattctttcatagagcggtgattgctcatcaggctattaatctcatcaagtacctcagaggtgatgacaactctaagattgaaaatgtgaaccagataaaagacatgattgttgcttactactcttagctcttcgggagaacatcaatacggttcctttttctgttgacactatcatggctattcatccctttcgctgtgacactttactggcagccaagctttcggctatcccgtctgatgaggagattactctttccgtcttcttgatgcctaagaataaggctccggtcctgatgggttcctggctgaattcttttgggactcttggcctgtgattaagaaagaggttatttctgcggtgaaagagtttttttccacaggttatcttcgtaagaagttcaatatcacagcgattactcttactccaaaggtgataggggctgataagttatctcagttccgtcccatagcttgctgcaacaccatctacaaggtcattacccgaatcatatccacacggctcaagcttttcatctctcaggcagttcaaaataatcaggttgggtttattaaaggtagattgctctgtgagaatgttctgttagcttcggaattggttgaagggtttcacttggagggggaggttactaggggctgtcttcagatagatctctccaaagcttatgataatgtgaattgggattttcttctcaatattctagtggcaatggaccttcctcatattttcgtcaattggatcaaagtttgtatctctactccgtcttatagtgtggccttcaatggggagctcatcgggttcttctcgggaaagaagggtattcgtcagggagatcccatgtcttcccatctttttgtcctcgtgatggatattctggctaagttcttagaccggggcgcggtaaattctgtgtttcagctccatccaaagtgcttggttcctatggtatctcacctcagtttcgctaatgatgtccttgtgttctgcaatggttctgaatcttctatagctggtattctttcgatcttggctgactttgaaacttgttctggtctaggagtcaacaagcagaaaacggcgcttctcattgatggtggtgacatgactggtttgagaaatctttctgaaagatttggcatctcgcatgggtctctaccggttaagtatcttggagtcccgttaatgactcagaaaatgatccgcatgattatcaacctcttattgatagaataaacctgaaattctcttcttggactgtgaggcatatgtcttttgcaggtagactgcaactcctgaaatctgtaatttattcgacgatcaacttctggacctctatgtttattcttcccaatcaatgtctccacaagttagagcaaatgtgcaactccttcctttggaaaggagccccgaactcggcccgcgacgttaagattgcatgggatgtcgtttgtacttctaaggaaagtggagggctcggtctcaagcggttggtttgttggaataaagtgtttgctttgaagttaatttggctgctctttactaaggctgggtcactgtgggtgtcttgggttagaatgaacctaattggtactaggaaattttgggatttaaatccttcaaactctggcagctggatctggaagaagttatgcaagttgagaagcgtggctagacccttcatagtctgtgaaattggttctggtgatacagctagcttttggatggacaattggaccgaacttggtcctttgctgaatctaacgggccaaactgggcctcaagtggttggccttcctctttattctgtagtgagggatgctcttcgtggtaactgttggtggatttcctcaagtcagagtaggaatcccattatcaccctcctcaaaagtgttttacctgatgtgagtagtgtgtttgagtgtgtggaggatgatgtttatttgtggaagccagatcatcaacctccagcaaactctttctcttctcctaagacttggctggctcttaatccgccttctccacctgtcttttggcataagtcagtgtggttcaaggatcatatcccaaagcatgcattcatttgttgggttatggcttggaacaggcaacattctcgtgacagacttcgactctggggtctttcgatctctccgatgtgtttgctttgcaacgcccaccatgagtcaagagaccatctcttctttaactgtgcattcagccgtgaagtttggtcttcctttactacaagagtgaacttgtctcctcctctgctcttcatggattgccttggttgggttaattctgctactagggatccaaatctttccttgattatcaaacttattttccaggcctcggtttacctcctttggaaggagaggaacgaccgtattcactctctccagcacaggtcgccggcggctatcattaggagtatcagcttgatcctgcggtctcgtctagaccccctgtctaggaagcagctgaatgcccctccaggtttttctctgctctcctcgtgattcaggttcttcagttagtgggccggttgtttttggttagggcctgctttctctctttctagctttctgtctttttctttttcggtttagggcatgtgtgccttttggaccattggtcttgtaagtttaagaacagaggcctgcgtgccgtttgggctttagggccttgtaatgtttatttggaaatttatgaattaaaaaaaaaaaaaaaaaaaaagaagttatttttgttgtttagtgaatagatggtaaatttatatgaattttactcttaataaaattataagttaaaacattattaaacaaaattttggaaattgactagagaaaaatatgtttagacaacaaagttttaaccaaaatcataattttggg

SEQ ID NO: 13027 - DNA, 556 bp, Arabidopsis thaliana columbia
cagaccgttccacattatttcgcaacattacttatactagatgaatttccattacgcttggatttgttttaaaaattgttaataaaaatatgttaattgtttttatcgctaatttatatttattttttatttattattgtataactaatagaattagactcataatagtatttatgtttcgacagttgttccaaataccaccacctcagtgataatttaagtgagtgtatattcaatgttatatatatcgatattgtgaacttcagttgtatctaatgttttcattttttaatttccgtataggttatacatgatgatggttttgtatcctatttatggtacttgtcccttggtaaacatttactgatgttgtttgaaacacatataaaaataaattggttatgatgttgtcccgtggtaagcaatgtctgtttgaatatttatagagcttatagtagtgaaagcttgtaatcccataagctgggagtgtgaatatgttttagtgaaataaattgtgcatctatttaaaagacagttacggctgcttgttccttga

SEQ ID NO: 13028 - DNA, 597 bp, Arabidopsis thaliana columbia
ggtatttttatgatatataaaaagaaatcctaattaaaaaatggtaattcaagaaatatttattccaacaaaaaaaaaacagataaatactttcttatagggcctaaaacggtttttgtgacccggcccatttaatgtgagtcacaaatggagttatcttatagtttacctgtaaaaaagaaacttttgtcgtcacttaaccgagaaagcaaaagagaagaagaagaaggaatcgaaaaatgaagactccgatccacgcggtttcgacatgggtgaggaggcagcctccaaaggtgaaagctttccttgccgtcgtatctggcatggcggctcttgttctcctcaaactcatcgttcacgatcacgacaatctcttcgttgccgccgaagctgttcattctattggaatctctgttcttatctataaactcatgaaggagaagacttgtgctggtataactcatttcctgctttgacttcgttatctgtagggttcttagctttaactagagaatttcgatctgtgttgagatataaaaatgtaaactttattcaacttttgagtaccaaatctcccaaaggagttgatttagttga

SEQ ID NO: 13029 - DNA, 525 bp, Arabidopsis thaliana columbia
tagctgcatatgtaactgttgttatttatgttgattttacaggaggatatgaagatataccaagatgaaatctttggaccagtcatgtcactgatgaaattcaagtaaaccctaaacaaaaactaacttctcttctcaaatcattgactcgttccattacactaagaatatcgtaaattgctttcacaggacggtagaggaagggatcaaatgcgcaaacaacacgaaatacggtcttgcagcaggaatactaagccaagacatagacttgatcaacacggtttcgaggtcaatcaaagctggaatcatttgggttaattgctacttcgggtttgatcttgactgtccttatggtggctacaagatgagtggtaattgtcgtgaaagtggcatggacgctctcgacaactatctacaaaccaaatccgtcgttatgcctcttcacaattccccttggatgtaataaaattgtccataacacatagaaaaaaacttaatccaatgataataaggcggcttgaattt

SEQ ID NO: 13030 - DNA, 565 bp, Arabidopsis thaliana columbia
gaattataattaccaccgatggtcacatgagatctcacatgcttactctttctgcagaacgttgtgtaataactggtgaagcagaagaagaagtagaggaacggccgagtcaactctgtgacgacgacgacgataccgagtccgatgcttcttcttcttctggtgagtttgataatcaaaagatgaatcgtcttgatgatgaattggagtttgatttcgctgaagacgacgacgttgaaagtgaaaccgagtcgtccaggattaacccaactcggcgacgatctaaacgaactcggaaacttggatcgtttgatttcgactttgagaagctaacaacgagccaacccagtgagttagtggccgagccagagcatcacagctcagcttctgatacaacaacggaggaagatctcgccttttgtctcattatgctgtccagagacaaatggaagcaacagaagaagaagaagcaacgtgtagaagaagatgagacagatcatgacagtgaagattcaaatcaagcaagagcagagggagattcaagtgtgagacttgtggtaaagtg

SEQ ID NO: 13031 - DNA, 513 bp, Arabidopsis thaliana
tgatgagcaaaatggtccaaagtattgaaccagaccatgtagactccttatacacaatccaaacctgaattcagataataaacaagtcaaagattaaaactttaaaagagaacaagtaaactattcataatatatctcaatttaaacattaccgctataggtacaagattaatgtagaaatccaaaattgtcgtaacgaaccatctgaaaaaaagcgtaacgaaactaacatgaataaacacatatctgtgtgtctctgtctctgtgtgaaaatgaagaaagagagaaatagagaaatgggttttacggtgtgaagacatcttgacgatcaggtaaaggaaggccatcggtgatgatggtgtagacaagagtcgctagcatcagacagaacataaccggtaataccacttttagtccggtcactaaactagtcgtcgccattgttaacagagagagagacgagaggaagagaaatcgaaaagattgacgacgacgattcgagagattcaactg

SEQ ID NO: 13032 - DNA, 533 bp, Arabidopsis thaliana columbia
tgagtaacgctaatgtagcaggagatattggtccacacaagtcagcatgaagtagctctaatggtcgtgaagatcgataggttgttgcttttgggaaaacatggcgtgtttgcttaccaactaaacatgactcgcatagttgattttctctctcgatctttggtaaaccatgaaccatctcacgcattgacatggtcttgagagctttgaagctgatatgaccaagtctcgcaagccatctcaatgtttcatcttcaattcttaagcttagacaagctggtttcccaatttggagattaatcttgtaaagtctgttaggagatctcaatactcttatcaagagtcttccatttgggtcatgtagcgttagatagttctctctcatcctaatgtcgcagccatgttcggttgcttgtcttaagctaagaatgttacttctaagctcaaggataaaatagatgtcgggtaagagtgtttgtccccattctttccttcgaagataattgccccttacctccagtgccacacatgat

SEQ ID NO: 13033 - DNA, 577 bp, Arabidopsis thaliana
cgtctcaaaggtcgataaaatgatcggtaggatcatcatgggattggagaagaggaaggtttttagtgatgttcatgtgatattgcttggtgatcacggaatggttactaactgtgacaagaaagtgatttacattgatgatttagccgattggatcaagatacccgcggattggatccaagattatagtccggtgctagcgatgaatccgcgctggggcaaagatgtcaagaatccaggacagaagaatgcagaactcgtaaggaagatgaacgaagctttgagctcagggaaagtagccaacggagagtttttgcaggtttacttgaaggagaatttaccgcaaaggctgcattattccgatagttctcggattccaccgatcatcggaatggtgggagaaggtctaatggttaaacagaacagaacatacgttcaagaatgttttggaactcatggatacgataatatgttcttttctatgagatcaatctttgttggatatggccaaggtttaggagaggaataaaagtgccatcgttcgagaatgttcaggtctataatgctgttgcagaga

SEQ ID NO: 13034 - DNA, 456 bp, Arabidopsis thaliana columbia
agtcacttattgtcagaggtcttttccccatgcttgctgatcctcgtcaccctgtaagtctctattgcatagaatttgattcattgcaaaaagattcttgcttgcaaatttagtgctatagttgcaattgtaactttagtggggtttgaaaccgtattttctctaatgtattgtgaatcctcttgttcaggcggaatcaacaagtgcaacaaatgagtcggttcttaaagtggctctagaccatgggaagcaagccggagtgatcaagtcacatgacagagttgtggtctgtcagaaagtgggagatgcgtccgtggtcaaaatcatcgagctagatgattagatgaagcagagtgagtagtcgtctcggtcttttttgtactgttactaatcaatgtcagttccttcactaaaactcttggtgccgtccaagataaatccttgcaatcattgttt

SEQ ID NO: 13035 - DNA, 658 bp, Arabidopsis thaliana
gatgtagggaacacaaaacacaccaaaatcttaaaaataaattataaaccaaaaacaatgaatctcgccataaagtttcatgtgatggtacttttgctcattgtaattggagatgtttgtgccaatgtaggcgcaaggccgctagaagaagtttccaaagaacttatggataagaaggccgtttcgattcctaagacaccgttaccgttaccaccaccattaccaacattaccgccagcgcagttaccaggtttacccactccgccaaagatgtctaatggtgacactggaggagttgatgcgaacgcagatggtagactacccaaagatgctccagcgggttcccatggtgccacagccagaggatatcgttccggaggtggcaggagtgatgcgtcgggcagcactgacccttggccttgagcgtgaggtgatgatgttcaattgttcattgctcaaacctatataataagataataatactctacaaacgcacggtctcttttctgttcataaataaaactagagattgtccctttaataataagaaatcctaataatatcatgaaatgctactttctatgtgtaatatataaaataaatgtaataatttactacggctttatcttattgaataatatatgtatgagtgattatg

SEQ ID NO: 13036 - DNA, 1097 bp, Arabidopsis thaliana
agcctttgggatgatgaacattcttggttccttctcctcttgctatctcactaccggtaattttatactccttctgttccttattacttgatctttaaaatcttttagaagaaaaaaaattgtgtatatagctttgaatggttgtagttttgagatgatctcttcttggttttcgtttatagagacttatttggtatcaaatgatgattatattctcttaaaacataatgattagtattaaactcttaaaggtttgacaaaaacacgtaactatgttgataaatggtatttaagccagaacattatgttgaagggccattttcacgttcggcggtgaactacaacgcgggttgcaaaacggcgttatcaaacgtggtgatggcggttgcagtggcggtgacgttactgttcttaacgccgttattcttctacacgccattagtagttctgtcgtcgatcataatcgctgccatgctaggcctagtcgactacgaagcagccattcatctttggaaactcgacaagttcgatttcttcgtttgtctctctgcttacttgggcgttgtttttggtaccatcgaaattggtctcatcctctccgtacgtatatctatcctaactttttcattacttactcttctgtgccactcccaacaaaaaactagaatcatgcaataggtgggaatatcagtgatgaggttagtgttgttcgtgggaagaccaaagatttatgtaatgggaaacattcaaaactcagaaatatataggaacattgagcattacctcaagccatcactcgctcttctcttctcattctccacatcgatggtcctatttacttcgccaactctacctacttgcgagacaggttatttatacattgatacatctttataggctatgattgttgaatcttagttatttgtatgtgacttattaatctttttcttatgtataatatttttatagaattggaaggtggatcgatgaagaggaagataaattgagaactagcggagatatcagtctacaatatattgtactcgacatgagtggtaagaaactttatcttagccaatgctaatgctcagctagag

SEQ ID NO: 13037 - DNA, 521 bp, Arabidopsis thaliana columbia
cgccagtgtgctctaaagatatagaataccaagctattcaattagaatctctaaacagttgatcctagtagcaatctttgtgatttcaactcattgaaatgtgaaagatttaaaattacacagctgaaacaaggaagagagtaagtaacctgggaagcccttcaagggtcttctcttccgagagttgttccaactgttccctcaaagtagcaacatactgcagatggttcacacatcaacatcaaaatcaaaattgtaacagttagagaggttataataagcacaaattctaatagtttatacatgaaaatatccaaaagaaggttacatgcataagcttagactggttttgctgattaggtgcagctgaaagtaatctcatgaaattgatttccgttttgccgattcccattttaagatatctgatcataggaatgccacattcagatggaaccagacaccagaacagaaacaaagttgatgtaatcaaagaagcgatcttgagagcaaagtggttttga

SEQ ID NO: 13038 - DNA, 874 bp, Arabidopsis thaliana
agaggataaaaggtgatgtcctttgaatttcaaaagaaaaaaaggggaagctggtggagcttgtactggtgttttggatccaagaagaacaataaaaggataggccacgcggtgcttgtacccgaaccagctgcatcaggagctgcggtggctccagtccaaaactcttcgagcaattctacttcaatattcatgccctttatagctcctccttcatctcctgcttcctttctgccatcaggtcctccctctgcgtcacatactcctgatcctggtctactttgttccctaaccgtcaatgaaccgccttcagcctttactattggaccatacgctcatgagactcaacctgttactcctccagtgttctctgctttcacaacggaaccctccaccgcgccattcacgccacctcctgaatcaccttcttcccctgaagtgccttttgctcagttacttacatcttcattggaaagggctaggaggaacagtggtggtggaatgaatcagaagttttcagctgcacactacgagtttaagtcttgtcaagtgtatcctggaagtccaggtggtaatctaatctctcctggttcaggtacatcttctccttacccagggaaatgctccatcatcgagtttcgtatcggcgaacctccaaagtttcttggttttgagcacttcacagcgcgtaaatggggatcaagattcggttctggatccatcacacctgctggacaaggttcaaggttgggttcaggtgctttgactcctgatggctcgaagctaacgtctggagtattgacactcaatggtgcagagactgttgtaagaatgagttatgggccttccagagttggggatcagagtcgagtcg

SEQ ID NO: 13039 - DNA, 590 bp, Arabidopsis thaliana columbia
  unsure (1)..(590): unsure at all n locations
cacgctgcgaaatatcatcgaggaaagacacgaaacccatggcgctacgaaaaccattaccgtccacatcttgttcttctataagatagttctcaaagacagtagcatcgtctcgtcctcctcggataaacactagttttggtgtgatgctcctttcttgcttcactttatttatggtctgcctcaataaacctgtaagatataagttttcgaatcaacatagtctcaaagatctaaaggtggttgaactggatttcatttggtgagaaaacttacagtcttgaggtggagggaaaggtattgacgggtctgctgttgatgagtagaagactatcaaagtggtatatgcatctaggaaaaatatcggactaccacttgttatcaatgctgcacggctcaacgaatgacgcggatatgccagtgtatccggtgttgaatatgacattagtgctgggtaaatgccgcaatgaagagagctcgggtccaacacactgcagttttaaggaaaacaaaacagaagaacacaaacacgaaatttagagactaaagccttgcttgtggtctgtntacatgagatactaaggtatttt

SEQ ID NO: 13040 - DNA, 1126 bp, Arabidopsis thaliana
agaggatcccctgaaaaaaaaaaaaaaatcattttttcctaattgtataagggacgcatttagtaagagaaaactttactataatcgatttgttccaatattattcttttcttcgatgcttcccaacttcatcaaattcaccataaccgatctcttgcataaatgagaacaatgaccgcataataggacacatatatctatcatacaaaatgaccgtaacacaattatttgctgctaatagctacttcggtcaatcttttatattagggtttcttgattaatgaataatggttttcctacaccaacaatattttatacggttatatatgaaactgaaaatgttggttttcctacaccaacactattttatacggttatatatgaaacttaaaatgtataaatagatagctatggaaacgttcttactactcattttgtagtaagatttctctactactatcttaaaagggagatttcttttcaactcccaaaaaaaactttttgaccatgactattatcacgaatccatccagtttcactcttgttttaatttccattacgctggtcctggctcttgctagacgtttttcaagattcatgaaaccaaaaggtcagcttcctcccggaccacggggatggccaatcgttgggaacatgctccaaatgatcatcaaccggccggctcacttgtggatccaccgcgtcatggaagaactgcagacggatatagcttgctaccgctttgcccgtttccatgtcatcaccgtgacctcaagcaagattgcccgtgaagtgcttagggaaaaggatgaggttctcgcagataggtcagagtcatacgcgagccatctcataagccatggctataagaacatttctttctcttcctacggagagaactggaagctggtaaagaaagtgatgaccaccaaacttatgtccccgacaacattgagcaaaaccctcggttatagaaacatagaagcggataatatcgtcacatatgtctacaatctatgccaactagggtcagtgaggaagcttattaacgtgagagatacgatattatcttattgcacgctgtgatgatgacgatgatgtctggtcagatgcattttgatgaagt

SEQ ID NO: 13041 - DNA, 631 bp, Arabidopsis thaliana columbia
gcaatgccatgaactgagtggcagtgacgaaaaacaatgacaaaagaatgaatcgtctgaaccggtgactgacaatcttcagttcacgacggattttgagatgctcggcgagtatggaactgaaatctttgatctcagaggcgacagcgtgcgaattcatcaagacggaggacctggaggtggcagatgttttggtagaggatacaagcaatgatgaagagtgatgtacggtagagccaagaagagagctggagtgtgcaggctaagacatggctcagcgttgggtttataatgtaagggatttggttaaagcctgaagcataccaccaaatgcgatagatagcttgaagcgttgtcgatggaaggacaaagatagctagtagcttcattgatctctgcaacaataaaacagaggagactttcaaaaacatcaggattcgagcctaagatgcaatggcacggtcaagacttaaagttctaggcctgcgagttcggtcaatgtctcggttatctcggtatttcggttaatgaaattctccgaatcgaaccgatttccccggttaaaatcgggtaaaatcggttaaattggttgggattaaaaacatcaagatttgagctaagatcaatggca

SEQ ID NO: 13042 - DNA, 489 bp, Arabidopsis thaliana columbia
gagctcggattcgtgatcatgttttaacttaaaattatgtcctgatagacatcccgtgtttttatccttcatgtgtttcagtattctctccttttcgaatgtgcctctcggctggcgcttgtgatcagttggctggatctgctattcccagagtggcggtctcctcggggtcgacgccagtgagctaggtgctaatagtggcacctgcggttagtcagagcgtaggttctgtcaaatgtacctggaccgagcatacctcgcctgatggatttaaatattattacaatggtctaactgggtgaaagcaaggtgagaaacgtggttcctctttaatatatttccttgtgagtgtcaggagtatcctcctggtttattgtgctattgataatccttacacatgtatattttatatgtgaagtccttcagtacgtgccatattatgtatataattcacttgtgcagtgggaaaaacctgaggaaatgatagtg

SEQ ID NO: 13043 - DNA, 515 bp, Arabidopsis thaliana columbia
aggtagtcgcttatgagtagacaataactcgagccagatcgataccgtagataccggtagaaggatcatacctaagaaagaaatgcagaacaatgagaacattaccctcagtaatcatttaatttaataaatcagcccatattattatcacaacacttacttgattccaagatcaatgtgctcctggataccgaatccgaagcagccagtgtcactgaagttcctcctcaacagctcgtattccttcactttcaagccactctcaagaagctgcattgccttctcacctctcacggtgacatagcacgcaatcttttcattacgcctgataccgaaagacctcacagtgtacctcgctgtttacaatcaagaccacactaaaattgaactctacaatccttaactcatagctataacatataagagaatctacataaacatattcacacacccgttagagaagacaggagtctgaccactgagctgtccaacagctacaataaccaaaactctcg

SEQ ID NO: 13044 - DNA, 587 bp, Arabidopsis thaliana columbia
cgaaccagaccgactcattctactggacaggcgacaacgccgacaagacgctctgtttcgttcgttactctaacaactcgtttttcaacaagatggctctagagccaactcacgcagtttacaatactatgaggttccaagggaacctcacagcttatacaagaacatgggacgcgttcatgaactttatgttcacccgagtcggtcaaactcgatacctggctgatatatcccctcggataaatcaggaacctttgtctcctgatcttatatacgcgctgatgcagtgtattccggggatatcttctgaagactgtgaaacctgtcttggaaaatgtgtcgatgactaccagagttgctgcaatgggttcataggtggagtcgttaacaagccggtctgctatttccggtgggatggttataaatattatggtgccttcggtgatgaagcgccatctcaaccccccacgccgcttcctcttcctcctcctcctcctcgtgatccagatggaaaaaagatctctacaggagttattgtggctattgttgtatagcagttacttcgtggtctagcgctttaggattag

SEQ ID NO: 13045 - DNA, 607 bp, Arabidopsis thaliana
gctgtacttgtcgcatattctttgatttcgaatacaatacaccgttacttccccaaatctttctcgacaagtcaaaacaattttggtcggaagctttcgaaaacaccatcacttcttcattctttccttttttaagacccttcgaaactctgccattgaattttttcttcaagtttccaattttggttaccagttgaggtttggtaacatcaaaactgatggagttcttgatagactcataaaaatcatcgatatgatcactagggttttctttcttagtagcgaaatcaaggaagccttggagcaaaatagcttcgtcttcttcggtgaataacctaacaaacagattcttctttagcgtttcatccttcttcttcacatcctcctcacccattgagttcttcgatttcttcttactcatttcgtctgttttctcaaacgatctcttggcagcagtagagctttccggtttggtagtagtcttggaaccagaaggcttgctcacaaccaacggcttcttggaagactctttgacgggtgaatcggcggaagagtcagactcttcacctgaagtagcagactcgccagaagaagcagacatcttctt

SEQ ID NO: 13046 - DNA, 529 bp, Arabidopsis thaliana columbia
caacaccattgtttgcaacgtgtgcatcacatcatatcctgggtcaagtttccgttgccaaccctgtaatcaaaccaattacttagttcgaaagtaaacttaatatctctggagttataaacagtttttgaatcaaacaaggctatagaaaccattctctaagctaaaaacagttttaatggctacagctttaagctctggttctataataagcttagctttctttagttctttttaaaccttccatcaaacttagcatgatctaaaatctacactaaaatttgaaagtggggacgattttggctcacctcgagaactaatgttgtcaccataacagtgcacacattcccatcaatatttactctatgacgtcttactttctcaagtaattcgtgcatacaatctgctggatgtactaaatctccctcaggggttccccagaatttgaatgcttcctctacttcctgtcagagtatagattattagccatcacaaataaaagaactttgaaagatatcttcatatattt

SEQ ID NO: 13047 - DNA, 542 bp, Arabidopsis thaliana columbia
ggatcaggatcccctcgggatattgacccccagggagagcaagtaatgaagtcaaacccaagcagcaaacctttttatcatgttccctggtaccaagagagtaacaacccctttatcagctatcaaagcgaacaatagaatttccaaccattacgcttataagttaacatgaacaagatgtgacataacaaaaatcatcaacagtaccttttgaagtttgctggcaggccactttttctcttttgctgcaacatctggaaccaaaggtcaaagactttggaagcaagtcctgtgttatgcaatacaccaagcgtcaaacctggattgtagtaaagcatatttgccacctgcgaacagaaatcaagatattatgttgagaacttcatggtatataacgctggtgctgttgctattaaaaaaacttggaaatttcaacccatcattgtggtcatcacacaacagaatcagttcaataggacccacttgattcatacagtgacattgacatacatatctcctctaatgtaagagcataaaccggt

SEQ ID NO: 13048 - DNA, 556 bp, Arabidopsis thaliana columbia
gttcttgtagtgattttggtggtgaattgattggtacttcgtgtggtgtgttgagaaatctcgttggtgttgaagagatcaagaggtttatgattgaagaagatcatactgttgctactttcatcaagcttattggatcaaaggaggagattgttcaggtaaattctattgatttactgttgagtatgtgttgtaaagacgaacaaacccgggacatcttggttagagaaggaggaattcaggagctagtgagtgtgttatcagatcccaattcgttgtcttcttcgaaatctaaggagatagcattaagggcgattgataacttatgtttcgggtctgcgggttgtttgaatgcattgatgggttgcaaattcttggatcatttgctgaatctgctaagaaatggggagatttctgttcaagaatcagccttgaaggtcacatctaggctatgtagtttacaagaagaggttaagaggataatgggagaggcgggttttatgccgagctagttaaatttctcgacgccaaatcgatagatgtacgagaaatggcg

SEQ ID NO: 13049 - DNA, 547 bp, Arabidopsis thaliana columbia
ttataatttctctacttatatatactaactctatcctaaggttaggaaaccatagagccaaacaagccaatacctctttttcatcgataaaccaagatggaaattccgaggcaagaaattcatatcgaaatcgataactcaataccgagtagtaaagagtttaaaactggcctagctgatgctaaacccgttgtcttgatgtccgctttgcgtagtctccacgcgggctatttcaggataagcctctctctttgcagccaagctcttctgtggaagataatgatcgcgcctgagtcaccgagcatgtctcatatgcacagcaaactcccatctatggcgttccatctcttgtggtacttagcacttgtaacacaagtgtcactctgttttttgtatgccttgaagtgcattttcttctttgacaaggtgaaggaagagttcttgcactatatcggagtgaactatctctacgctccatctatttcatggcttctcatgcttcaatcagctccaatgatggaccaaatagcgttttgtatcagacact

SEQ ID NO: 13050 - DNA, 945 bp, Arabidopsis thaliana
cattatgatgttcgccgaggtccacacagtgttggatctcatgtgcgtgatgcagctgcctatgtttgttgggcatttgggcgcgcctattcccacaaagatatgaaaaacgtgctggatcagcttgctccagatttattgatagtgggttcctttgatagagaggtactaatccctcttttgactataattttttcgccgtttcttgctttattttgaagttctctttattgcgtataatttatttatttcttttgtcaggtgaactgtagaagggctgctgccgctgctttccaagagaatgttggaagacaaggaaattaccctcatgggattgacatagtgagcatagctgattatttttccctatcttctcgggtgaactcttaccttcaggttgctgtttccattgctcaatatgaaggatatctatatccttttgtggatgaattgctatacaacaagatctgccactgggtatgcttatcttaaacactgtttgatatttggtttatctctgatttatctgcaaatctaatatctctttaatgccctgcttgtatttactgtgggaacggtttaagtgttcaacaactaatttcaaaattcaacaacccatgaactagagccaatagcttgattgggaactgtatcatataacttttataatatgttaattattcaatattgtgatatcaggataaaagcttgagagaacttgctgcagaagctcttgctcctcttgttaagtacgagcctaagcactttgccaactatgtgctggagaaactaattccttgtaccctttcaactgatttgtcatgcgccatggtgcaacattggcagctggagaggttgtgttagctctgcaccagtgtggctatgtcctttctgctggttagtaccatctattttttcagctttggcttttgtggcacctttgca

SEQ ID NO: 13051 - DNA, 613 bp, Arabidopsis thaliana
caattggaattcaattccccaaaaagccaacttctatatccattttcaacataccaatccttcaaacaatctttttttcacttaccaagacagcaaaatagacttgaataaacaacatatatggatcaatgcagcttaaagcttcctagtcctacaattttgcaaccaatccctccaaacaaatccaacttctatatccattatcaacaagcaaattctcgaaacaatcatcaaacactatcatttcccccacttacctattagcgtgtagcaaagcagctggaccaaggtaagactcaggattccaccagtaactaggacaagatgtgctacaacaagcacaaagaatacattcatacatcccatcaagcttagctctatccttcttactctgcaaaatctccttagcaggaacagacgctggagtcttcctcttcaaccacggctcaatactcttatactgattataaaaattagtcatatcaacaaccaaatccttaatcacaaacatatgaggcaacggtgtaatcgtcgtctccgatgcttcatcttgaatctttgtcaaacaagcaagtccgttacatccatcaatgttcatagcacatgaacacag

SEQ ID NO: 13052 - DNA, 647 bp, Arabidopsis thaliana
tggggttttctacagacaggtgaagaagcacaaagatcccttagcacctttcctcagtgaacaaagagctaaacccacagtaccacactaacactaaaggagtaaaaacaaccctattgacaatgcataatgaatgtaaaacaagtaaaacaacccaagccatacataatccgtctaccaactcttactgctcaaaccaacaaaattctcaagcaaatctcaaaacagaaccttccttcagctctaaactacaactacagaaacttaagcaatctaagtgaccccatataacgtactaatgtaaactaccaacaagccctacaatatcttcaaaaaactactttgattagtgaatccattatgagaaaacaagattaagtttacctgttggcatgaagcaaagcagctggaccaagataagactcagggttccaccaatagctagggcaagacgtgctacaacaagcacagagaatacattcatacattccatcaagcttagctctatctttcttactctgtaaaatctctttcccaggaacagatgctggattcttcctcttcaaccacggctcaatactcttatactgattataaaaattcgtcatatccacaaccaaatccttaatcacaaacatatgcggcaa

SEQ ID NO: 13053 - DNA, 689 bp, Arabidopsis thaliana
gggcaaacacgtggtggaccggtccggttaaacgttgacggggaaaatgcaacggacatagacggagttacacgatatcaacggaaaaaaaaaggaattaaagtcactcacccaattcatcatcatcaccaacaaacagagaataaaaagcttttgggatgatttcattaatggcgatggttagatcacgtacacccttctattataatctctcgctcttttttacattagaaaaaaaaaacgaagattctttttttttttaatcgtatattcgaagattcttcacgttattgccagtgattgccgttgtgaacaaggtagatatttctggaattacggtgaacataacaaccataacacggattcttcgtaaccgtcgttattctcggtggagacggaggtagcggtggttttgatagagacggagatctaggacttgatgaagtagaggaagttgtggaagatgatgacgtggtggttgatgacggtaacgctaacggaggaggagattttttagatccggcggcggattttggtggatttaagaagactctgattttcatcggagatgaagaggaaacgagatcgtactcttcgattagattcactagatcttcatcggaagtaattgaaacgagcgcgtcgagatcttccgtcggaagctgacatcggatcgttacggttataga

SEQ ID NO: 13054 - DNA, 865 bp, Arabidopsis thaliana
tgtaaacagtttggttttattattctcccccaaagagataaaattaaaatcactctttttccagcccagtgaatcaaatgaaccggccctttattcccatcatctaacacctaaaacgtccatctataaactcaagctgaaaactcaaacagcatcgtgtgattgtacttctcaccagccttaaccacaacagacgggaaattcgactggttaatcgcgttcgggaatccctgcgtctcaaggcacacacccgcatgtttcccgtaaaccgcattccctttcccaaccactccattcacatagttcccggtataaaactgcattcccggcacattggtccacaagttcagtacccttgagctagcagcatcactgagcttcgctgcgtgtttcagcccctccttctcttgatcaggacagtccaacacgtagttatgatcgtatccgataccaacctctccaatagactcgcctatccgcttctcctcagtgaaatcgaaaggagttccctttacaggcaagatctctcctgtaggaactgtgtattcgtcaaccggcgtgatatgagacccccatatctgaatcttatggtctagaatgtttcctgagtcatgacctgctaagttccagtatgtatgttgagctaagttgatgggagtatctttgttctctggaacagcttccatgtcaagtctcattgtcgtggctgacgtgagagtgtatgtcgccgtgacagaaaccgcaccagggtaacctgtggaggggaaccgcaaaacattatatagctaatctaatcccacagaaatcaaatgctagagaaaggatatgtcattaccttcttctccatcggcactgtgatagggga

SEQ ID NO: 13055 - DNA, 459 bp, Arabidopsis thaliana columbia
taacggccgctctaaagagccatgctgaaatatgtcttcaaagcggttctcgaagaacgcgctgacgacatgaaattcttcgctgaacgcgtagataaagatgccgtttcacgtctggaacgcttcattgaagccgattttgcgcaggtggattataccgacgcagtgaccattctcgaaaactgcggcaggaagtttgaaaacccggtttactggggagtcgatctctcttctgagcatgagcgttatctggcggaagaacactttaaagcaccggtagtggttaaaaactatccgaaagatattaaagcgttctatatgcgccttaacgaagacggtaaaaccgttgcggctatggacgttctggctccgggcatcggtgagatcattggtggctcccagcgtgaagaacgtctggacgtgctggacgagcgtatctggaaatggcctgaataaaga

SEQ ID NO: 13056 - DNA, 617 bp, Arabidopsis thaliana columbia
tctaagtttttgagtggagtcttgtctttttctttcttccagaatgtcttcaagggagaggataggttcaaatcatcatagccgagttagccaaggtatgtcaactagtggatcatcatcgtcgaggcaccacgataccatttcttcgacttcggatcctcgtcatcttcgagaccaccagatttcactttctgatattctagaaaacaagattgcagttcaagctgctgagatagaccggctctctaatgacaaccgaaaactagcttcaagctacgtagctctcaaggaagacttaaccgtggctgaccgcgaagtccaggggctaagagctcacatcagaaagacggaaacagaccacgagattcagatccgatcgactcttgagaaaatagcgaaaatggagggtatggtcaagaatcgagagaatataaggagggaagtgcaatcagctcacattgaggctcatagattggcgagagaacgtgaggagcttgcttcaaaggtgaagttgggaatgacagatttgaagaaggtttgtcttgaggcagagagtttagaggcgtcgagtcaagagcttgagcggttgaaagaggacatcagagattacggtaaag

SEQ ID NO: 13057 - DNA, 514 bp, Arabidopsis thaliana columbia
cttactgtatatgcattcctgtatggacggatgtacatggttatgagcggattggagaaagagattttgagactcgcaagcccgaatcagcttgaggctcttgagcaggctctggctacacagtcaatatttcagcttggtttcttgatggtgttaccgatggtaatggagattggcttggaacacggttttcgctctgctattgtcgattttttcataatgcagctgcagctagcctcggtattctttacattccagcttgggacaaagtcacattattacgggagaacaattttacatggtggttccaaatatagaccgacgggccgtgggtttgttgttttcatgccaagtttgcggagaactacaggttgtattcgagaagtcactttgtgaagggactagagctgcttttattgctagttgtttatcgaatctatgggcattcataccggagttcaaacctttatctgtatatcacagtctcgatgtggtttatggttggttcttggtt

SEQ ID NO: 13058 - DNA, 471 bp, Arabidopsis thaliana columbia
tcgaaattcctcaaactgaaatcgatataacaatctgtggtttgtttgcaggtgacaatctgtatcttaattatgacagtaggagcagtatgttcagtcattggcacatattcagcccttgcaaagatcattgagaagttgaacacctaaaactgatcaatcttgagattcttattttgtttctcttgagattttgtttctgtcttaaatcaatggaacatctcaacctatatggaacattccaaacacataattgtattaaacatcttctgcatttaaatgttaccaaacagtgaactacaagaaacaattataatactggaacataaggtgaagttctgttccataatggttaagtagcaaaagcaaagaagatcactccttattcagtagaaatctttcctccagctaaatcttcaggagttaggttaagagaatccatggatcctttcttgaattcttccccttgag

SEQ ID NO: 13059 - DNA, 563 bp, Arabidopsis thaliana
ccttggtttgcatgtttcaggggataagaccttacatcttgattggtcaacccgttatgagatatgcctgggagtagccagaggtctagtttatctccacgaggaggcgagtgttcgcatagtacacagggatgtgaaggccagtaacattttgctcgactctagactggtcccacaaatttctgattttggacttgcaaaactgtacgatgacaagaaaacccacataagtacccgagtggcagggacgatgtaagtaatccacaaactctgacctttggtttgcatcacaattacaaattagtgagacatgttagtgatgttgctgtatcaatgcagtgggtatcttgcgccagagtatgccatgcgtggacatctaacagagaaaacggatgtgtatgcctttggtgttgtggctcttgagctagtgagtggaaggccaaactctgatgagaatctggaggaggaaaaaaatatcttcttgaatgggtacgttcttgcttattatgattgattgtaaatggatggagtttagaatggcaaaagcaataatacttgtgtat

SEQ ID NO: 13060 - DNA, 556 bp, Arabidopsis thaliana columbia
tgcccctgtaaattcagcatgacatgttaagtttgctttccattttgaaaaagaccaacaagaagtttaggtagaatagagttacctgatctcttccccatggtgatcccccagagtcatcaatcccaccagcagaaagcgtagcacagagacgggtccgattttctcgttgagaccatattcagctactgccttataggccatgtcggttgctctcctgatatcatcaagtgcacctgttgatatacgccccgagtaaacaacctcttcagctgcacgacctccaagaagagttaccaagcggccatgtagttcatcaataaagagcaaatatctgtcttcatgcgttgggggaatgtatgtaaagcccaatgctcctgcctgatcatggtaatatgcttaatttctaaaaatacaatatgtattagcagagcattaacacatgtaaaaaatgagtatcaagcaacatgcggttctcactgctttacctcaacacgggactgtccagaaagaagacttgcaacagctgtaccaacaacagcatgcccagcttcat

SEQ ID NO: 13061 - DNA, 564 bp, Arabidopsis thaliana
acaaaaggattatcggcttttgtcatttatcacaccatcttcaacttcgcctatatgacaaatatagacgtacccattcaagaagatatttttttccctcttccaggttctcatcagagtttttccttccactcactagctcaagagccacaacaccaaaggcatacacatctgttttctctgttagatgtccacgcatggcatactctggcgcaagatacccactgcattgatacaactaacatgagctataaagccataattgtgttgcaaacaaaatgtcagggtctatggattttgcttacatcgtccctgccactctggtactaatatgggttttcttgtcatcatatagttttgcaagcccaaaatcagaaacttttgggaccagttcagagtccagtaaaatgttgctggccttcacatctctgtgtattatgcgaacacttgcttcctcgtggagataaactagacctctggctactcccagacatatctcataacgggttgacaatcaagatgcaaactcttatcccctgtaacatccacccaatggcataatga

SEQ ID NO: 13062 - DNA, 1482 bp, Arabidopsis thaliana
gagggcgatggctgagatgatgataagaacgatgaagaagagaatcgcgatagaatcagccacaaccgcggtgctaacgttctggcagaagtctccaaactgctgacagatagggagccagttggtgctttggttgccgttgtgtgcaaggtaggtgattgatgctgccgctgctgctgctgatgtgttgagcgtcacgaccagctttatatatacaatcataacataaaagagtgtgagttatatcaaattatgaaagaaatgaagaatagagttataaggtaagttacagtatcgcaaatgaggaggatcagccggggcgcgacacgatgtggacggacaatggatacgatggagaatggaagtgaaaggacgagatagctagcgactacggctacggctatcacaaagtaccttcaaaaaacgagtatattatttcattaggttactaaccgcacaatgatataaccggaacatgacttgtcttactaataactcgaatttaaatatttgatttcaagaaaactataacaaattagaagtatctatatggttcacttaaagatataaaatatgcattaaatttgtaaacattatgtcaataagtaattatgaagataggaagggacgtactgaaacgcaggaaggtcatcgtaaccggcttggaactggaggaactgagtaaagaagggaagagtttcctcggcggtgtacatgacagaggcagccccaatagtgactgctatggccgccaaacggaggaggaaatcgaatatagccaaacctctcttggcaccacctcttgaggcgactgccacaaagcccttcttcttcgcgtcctttacgacatggcttgaacttttggtaacagtgcttggctcgccgacgtcgatggtggtggactctttcgccattttctcttgcaattggggtttaaaagaaagaaaaagtgtgtgctttgtgtgttgtgtattggaatgttttgtagttgtggtgggaaactaatggaagatacaagtgtatatatagtgctttgtattaagcagtgattgattaagaataattagtagctagttaatgatgagctcttttaaaatggtttgatattgagtttagttgatttgttaggggtccgggaagaggagttgttgcttcttactttccccacttaattgggtttgagctaacaattgaacacaaaagaaaatgtaaactaatgaagttggtatcccttcgtaggcaaaagtgcttaataatgtatgatttatgttcatattattccatgccaattgtacagttgaacatttttatagcattaatttggtaaataaacaaattagatacataatatttcactactttttagtcattttgatacatatctcttttaacttggaaaatcaagttgacaattagcatatactacgtgactctttctaagtggaccagatgttaaatgtaagcctaaaaggatccgatagc

SEQ ID NO: 13063 - DNA, 544 bp, Arabidopsis thaliana columbia
tatgctcctcctcccaacagattaactggtaagaaaagccattggcgcgacgaagatgaagatttcgttgaagaaagaagtaacaagcaatcagctgtttatgttgaggaaagcgagctttctgaaatgtttgataagatcttggtatgtggccctgggaaacctgtatgcattcttaaccagaactttcctacagaatccgctaaagtcgtgaccgcacagtcaaatggagcaaagattcgtgggaagaaatcaacttctactagtcatagtaacgattctaagaaagaaactgctgatttgaggactcttttggtgttatgtgcacaagctgtatcagtggatgatcgtagaaccgccaacgaaatgctaaggcagatacgagagcattcttcgcctctaggcaatggttcagagcggttggctcattattttgcaaatagtcttgaagcacgcttagctgggaccggtacacagatctacaccgctttatcttcgaagaaaacgtctgcagcagacatgttgaaggcttacagacatacat

SEQ ID NO: 13064 - DNA, 535 bp, Arabidopsis thaliana columbia
gggtaagagtgctctaaagggaacgcaagccgatggaagaatcgaaactgaacgtccagcggcgaccgacctcctcatgcaaacggcggaaattgaagcgttgttgattttgttctggggtcagtggggttatcagcgcctgattatcaatgtcatcaatcaccagccgggcgtagtgctgcgtcgcaggcatgtcatccagacgctggttcacgtaggccagttgtcggatcagtgccggatcgtccggaagccctttatgcgccggttcgagcatttcccgcgactgtgcgatatcaccgctatcccacaaggcgtaaccaagcgctgcctgggtgttgctattattcggttccagttccagcgcggcgcgaaatcactcaccgcggccgggacattatgacgttggcgataaattgtcgcccgcgcaacgtaagcgttggcagaaggcgcaatattgattgagcgcgtgagatcgttcagtgcgagttccggctgaccaggaatgtaacgttgcgcatcagccaacagtaga

SEQ ID NO: 13065 - DNA, 490 bp, Arabidopsis thaliana columbia
ggagtgtgtactatagatcttcaacagtctaagattatacatattctcaaacgccataggattaacatcaaaggttaattttgttgtgtcaagaaaaatcccttcaataacttcattcccctgaaaaaccgaataaatcgaccttaaacaatttaaataaacattgttatagataacagaatgtatcacctaccttagatttatcattttctagtaataatctgattcttgatggttcccagtgtctgcgacgcctcgaagtctggttgatgaattcacgggcagcatcttgaataaaaccttgcatctccactcttttttcctttgagatcgtcagtagagaccgctcagcaagacggtcaatcccaacgtgtggaaagaaccacacccttcaagtattcgcattacatcgtcacacggttcaccattagagaaacacgcaatgtccaagaatatacttctctcattgtcgttaagtgcatcatagctg

SEQ ID NO: 13066 - DNA, 570 bp, Arabidopsis thaliana columbia
taattaggtttaatagatactatattagaaatctcagtatggtggttcccacaagcaaagaggggaatgagattgctatctacctatatttatatctgcgcaacttcactcttttcctcaatcaacacacacaaacattcacatacacagcctttttccttcgttgatcgattgttaagctcgatccaatggcggataacaccgataatcggagatccttatggggagttccggagaagcttcagcttcacatagcgatgctgacgttgcaattcggttacgccggattccacgtggtgtctcgagctgctcttaacatgggaatcagcaaactcgtcttccctgtttatcgtaacatcatcgccttgcttcttctccttcccttcgcttacttccttgaaaagtaaccttctattttcacttcacttctttatttgaaaaccctattttttctctagttgctagttatttaattaccaaacttaattgtgttaatttaggaaggagagaccagcgattactctcaactttctcatccagttcttcttgttggcactcatagggtatata

SEQ ID NO: 13067 - DNA, 551 bp, Arabidopsis thaliana columbia
tagaaaaaaggatgctttaagcttacctccatagctataccattatattaatctgatcaaactcgacattcagaatcatgaaaatggatatgccctaagttgcagttggtggtttctatgttgtaagaagctgcatatgagtgttactgtgatgtcttataggtggctatggagttgcaacaggagggcctttagcttggggtctgtgctacaacagggaaatgagcccaatgcaatcctactgtgacgagtcctggaaattcaagtacccctgcagccctggagctgaatactacggacgcggtgccttacccatttactggtacacatttctcttctactttgaagctctagataaaaactgtgtcaaacaatttgcattcgtccatactgaaggtatttttacctgtgtgttatttgaaggaacttcaactacggagcagctggggaagcctgaaagctgatctcttgaaccaccctgagtacattgagcaaaacgcgacacttgcattccaagctgcaatctggagatggatgactccaatcaagag

SEQ ID NO: 13068 - DNA, 383 bp, Arabidopsis thaliana columbia
taaagaaataaaaaaaaacaaaaaaaaacgttaaaaagaaaaaagggtagaatcctcaaagacaagaggaacaaggcgaggacatgcaactattgaaatcagaacctccacaaaaaaaccaaccctctcctcctcaaccaaatgacatgacttcttttgcctacgggactaaccatgtgattgttcccacgctggctcttgagcaagctgtaccgcccccaatcgtctccgtgaggaccccattgccttatcaaccttctgtagtagtccttccccctcctcatctgcgcccggttgccaccgtggccttggtgtctccccgccgaggtcgtcctccatgagggcgagctcgtcgtaactcagaaagaccggtggctggggtt

SEQ ID NO: 13069 - DNA, 546 bp, Arabidopsis thaliana columbia
ctcactggtcgtaagaactggagatatagactttaagatcacttacagttgaatctccacttccagacatgaggtatccctgagtaagctctggagtgctgacaaatgctgtgcaggtaatgaacctattaaggtttaagataatgttaatggaactgtgcaatactctcagctatgcttacaatcttccattttgtaaacaacactctgataaatatcgtagaaaccatacattaagaatgctaacagaatatttgggatcagattagatgttgctttaaactctaacttactctgaatgtccaagacaaaaactctgtatttcatgagccccttctagaggcttcttgggaaaaacagtcacctgtgatggcaaacagaatcactatgagaccaatctgagcaagaaaggtatgacattgtgcattagtcgattagactagcttacccttatcttaaagtcccggtctgcactaagaatatatctaccatctggggaaaactcatatgaactaagacagatcagaatgagtgacatagtaagtt

SEQ ID NO: 13070 - DNA, 460 bp, Arabidopsis thaliana columbia
gtgctctaaagagaaccaaccagttgatccgtgcagtcagcagtgctacctgaacttcggtagaaccggtgtcgtttgcgtcacgaccaaactcagaaacgattttagctgttgcttcagtacttagagacattttaaaactccaaagtatatagaatgtcaggacgccgatctctaattcagcgatcccagtgtacgttacgcaaagtgttaaacaatttacgcgacgttaagcggcagtattctactcgtagcgacctgttatcgcaagacggttaacattacgccgggtattcaaccaccaggcgacgaggcgcaacgcggcttcatcgtcaatttcgcccataccgataaatttgccgttctcaccttccgtgacgcgaaccagtccttacagtggcgcaccagatgtacgaaccgggttagcatttttgaagtaaacagaagacgttaacggaag

SEQ ID NO: 13071 - DNA, 578 bp, Arabidopsis thaliana columbia
tttggtgcatttgcgatgctcgtcttctttgccttgggtggtgtggtactttcacgaggtatgtgttgatgcatatctgtttgcgtccagtttctcatatcaaaagctgattaattttatccattaacctgatttaaacagacgacattaagaagtggtggatatggggttactggatctccccaataatgtatggacagaacgcgatcctagccaatgagttctttggacacagctggagtcgagtaagtatcaccctcctctgtccactccagattcggaaatcattttccatggttctggtatttcttttagacaggactgatagggttgattgtattacaggctgtcgaaaactcgagcgaaacacttggagttactttccttaagtctcgtgggttcttaccccatgcatactggtactggattggaactggagccttacttgggttcgtcgtgttattcaattttggtttcacgctggctctgacgtttctgaactgtacgtaatcattccgttttgcttgttctcatcttctgatacaaaagctgttttcttaaaataaaaaatccttgtg

SEQ ID NO: 13072 - DNA, 457 bp, Arabidopsis thaliana columbia
cgtcgtgcccgcaaggtcaaggtaatcattataaacaattggtctatggttcagttgtttaatgaattgttggatttggtactgatttcgtacttgttctgttttcgtttgtgtgttaggctggtgactctacaccagaagagttggctaatgctacccaagttcaaggagactacttgcctattgtacgtgagaagcctaccatggaactcgtcaagctgacttcagaaatgaagtctttcaaggcttttgacaagatacgccttgagcgcactaacaagaggcatgccggagctagagccaagagagccgcagaggctgagaaagaagagaagaagtgaggtcgttcttcttaggtagaagaaacttttatcttatcaacttttggaactgaattttgtgtatcagactgtcttttctttcatcagtttttatccttaaatctttgattttgctg

SEQ ID NO: 13073 - DNA, 521 bp, Arabidopsis thaliana columbia
  unsure (1)..(521): unsure at all n locations
caaaccatatggagcaatttgtgcctctcctgctctggtgtttgagccacatggtttactcaaggtacgagagtaatcacaatagcacacacatttgcttagatgtgtaggatcattactatatatccgatggcatggagtattctgttatcaaaccgttatttttgcacttaaaactaagggaagggtcacaatttttaatggatttttttacagggtaagaaggcaacagcgtttccagcaatgtgcagcaaactgacggaccagagtcacatcgagcatcgagtcttggtggacggcaatctcataacgagcaggggtccaggaacctcattggagtttgcacttgcaattgtagagaagttttacgggcgcgagaaaggacttcagctctcaaaggcaacacttgtgtaaactcatgagtatcttaggtaagagtgactttaataagaaaaaggctttagtatcaaacgatcaatgagtgtaccgttgctgtggtgagctttgtantaagtgtgatg

SEQ ID NO: 13074 - DNA, 904 bp, Arabidopsis thaliana
gaatacttctttgaaaacaacatttgtagttgttttaccacgattaccctcttcatcgataataagaatcttcaaacctcgtcgactcttaactctcgataccgcaacatatagttgcccatgggaaaaaactggtctgggtaaataaatgccaacatgagataaactttgaccctggctcttgttaatggtcattccaaagcaaggaacaactgggaactgtcttcgctgaaaacgaaatggtattctaaaatctgcaggtgtaagaaccagcctcggaagatagactttgttaccagcgttacttccagtcaacacttttgcttcgataacacgatctcccaactgtgttacttgcaaccttgtcccattgcaaaggccatatttctggtcaaggtttctgataagcataacgggaacgcccaacttcaacctcaaaacatggttaggtacaccagaacactttatggcattaaggaattcagtagacatgttagcgtctctctctacagaagtatcaaaatcacatattttatcagagctgaagtattccttaacctctccgggaagaagatccatgatgtgattattcacctcactaacatcatcgtttgttggacaaagtattgcacgctccctgaagaaagtttgatcattaagattttgaagtagatttggatagacgcaattagcaatagagtcaatggggtgaagtgagtcaagaagaagcatgtcttcgggtatatctatagctcgtcgccatcattaggttctgaaagctttccatctcctagcttaagaatccaatcagaaaactctttgatgttgtctttttctgtagggtctgcctcaacagttagccgcatgttcttggtcaatgtgagaactttgcaagaattccaca

SEQ ID NO: 13075 - DNA, 797 bp, Arabidopsis thaliana columbia
ctgaaagtagctcgatgcgatgtagatgacgtctcatgatctcagcgtgtacatccttcaagcaagcctgttgaacatcgatatggtcagtgaagatgctgcctcacaaatcctcagttttcacaatctgatacaccatgatcatccacgagcagatagctattgccttgtatatttcgaggcgtttaagaactgcttcccaatactctactactttcgcagacccagaacgcagctgcgattcgatgtccaactgcagttctacaagctccgcgtgaggtcttcccatcgagaagttttctcacatcagcttcaacaccagcgtgtagtcccctctcttgagcaagcaattctgcaggaggctcctcccctctaactctagctcgatcaagggcatccctcttacgagcttcagctaactcccaatcgcataccacaataagcgcctggaaaatttcaatggtattaagcccaaatatttactcgtaagcagcaggtaatataacatgaaaaagaggcaagaatactaatcaaccatcaaaaaggtacaacaagatggtccatagaatatgtattttttggatcgaaattccatacatgcataataactttaaatgcgtgaatctcctcaaatgcaaaatgagactcagttgtagaacatacctcccaatattgtacccgtgttggagttgccgatccaaatccagatacatcttgatatcatcgcgacgtcttccatatctttaacagtaagtccctgcatcatacagatcagggggtcaattttaataataaga

SEQ ID NO: 13076 - DNA, 551 bp, Arabidopsis thaliana columbia
cagaaaacttcttcaatgaacttttggcctcaagatcagcagagttgttgtcatttccaaagtactgagcagaggatattgatttggcgtttgtgaatttcttccgtgcttcgtctgtttcttgaatctggtaaatactagagacgatgagtacaaaaagaatctactcaaatcttacaacagtttagatatttagtacaaaagagtgaaactcacttgcagttttgaggaacttgtgattggtttcttctgaaacctgcctccgttcatctccaactcttcctcaaagaagcctgatgattttggtggagctacatgactaacgacttgagggctcatgtaatcttccctgttttgaacattgtccgcataatcaaaacgagaggaaaacgatgacctggctgatttagctgaaactggtgatgtcgcttgtataataacagattcctctggcttttgatcataaagagtccactcgactgcaagaggaaaaaatgtgagctctcattacaaattctataaagaggaaagaacattactgaccttagtag

SEQ ID NO: 13077 - DNA, 505 bp, Arabidopsis thaliana columbia
cccaaaaccaatattgacataagagaggaaaaaatggcacatacaggtccaagatatctaatgcattgctgcttaagctttgacctcggacattcgttaagatccaaatctatccctcctccaacatccaacctgccaaaaaaaaaaaacccggatatatcacaaagttatagataagaattatcacctaaaaaagattcttgagctacaagaaaacactaactaaatgaacctaagaatttaagcataccagtaaaagaatggctgaccagcatcagctttacaccattcttcatagtatttatgcaggttgtgtccataccggtgtctaggatcaatctgattttcaaattttcatattattagtcttctttttacatttaatcagattataacacaaacaaatattgaaatttgtggaagaaaggaattacagcttcaatccaatgctgaaaggccaatttctgagctttgtcgactatagacagacccttccccacctaaa

SEQ ID NO: 13078 - DNA, 454 bp, Arabidopsis thaliana columbia
atatttaacactcgcgttcagtccaatgaccaataatattttttcattaataacaatgtaacaagaatgatacacaaaacattctttgaataagttcgctatgaagaagggaacttatccggtcctagatcatcagttcatacaaacctccatagagttcaacatcttaaacaagaatatcctgatctgaagaatgaggaggctttagtcccttggatacttgggaggctgtggaagaacagaaactgagctggtgcttaaagggagggaatttggaaccaatgaggtattagtaaggacacgagaagatgcagatgagtggattactaggaaagaggctcagaatgtaaggaaagcgccaaccactaacaccgtcgggacagacgagaaacatgcgaagctgcccacaatcttgggttaagtgcactttgatggggcatggcaacagacggat

SEQ ID NO: 13079 - DNA, 469 bp, Arabidopsis thaliana columbia
tgtgaccacaggagtatatgttatttctctttcagctgcaagtctctgagctttctgaaactctttgagaactgattggaaatcttttgccagtttagcatcagctatcttcttaatttgctgcaagaatacaaacataacatcaaaactagaatacacatatcatcaatcatgtaaacaattctcccactaaatgaataaaatggtacgattctgacaaaattaaaccaaaataaaactggttcaatagaaaatgttctcttagacactaacattccatagcatcgtaagggaatgaaacacaaaagtaagcatttgcttacactagctgatccatgaaggtcggcttcgctagcttccttaagtttagctgaagtattcttcaccaattcggatatctgtaaccttgtcttttgcctgccaacaaaagaacctaacactttaaaacaattcacagaacaaatagatg

SEQ ID NO: 13080 - DNA, 266 bp, Arabidopsis thaliana columbia
gtttcgatgtctcagtttgcatatgatattaactacgtttaaaaactcgttctttacctgccttgaatcaccggatagtttcttcaccgcaaccattgtgttcatttctttcaagtttccttcataaactgctccaaatcctccttcacctagctttctatggcttgagaatctgttggttgctgacacaagatccttataagaaaactttcttggtcctgattacctttcaaggtctttgtatatcgatatcaagatttctatat

SEQ ID NO: 13081 - DNA, 534 bp, Arabidopsis thaliana columbia
  unsure (1)..(534): unsure at all n locations
tgcttactcaatttttttattttcctgtgagcagctgtaaatcctatgagagagccaaaaagaagctgaaaataacagagcctccgaatgtccttaccattgcactaaaacgattccaggtaacttatatcttcaatgaatacccggtttgtttctgtttagttctatctggattctcttgtttctcacaattttgcgacacttgattcttaaaggcagggaaattcgggaagctcaataagttgattaggtttccagaaactctagatttggctccatatgtcagtgggggaagtgaaaaatcacatgactacaaactctatggagttattgttcacttggatgtaatgaatgcagcattttctggccattatgtctgctatattagaaaccaaaataagtggtacaaggctgatgatagcacggtaagtttctcatatattatcaatggaatgttgtttgcgaattagtttataagtaagctcgatttnttgttccctttttacttgagtttgttatttgatgaactttgga

SEQ ID NO: 13082 - DNA, 488 bp, Arabidopsis thaliana columbia
cagagacgagagctgcctgattctgctgctgtagaagcattttgccgagatgtattagacatcacttgatcttggaattcttttctaccagcggttgaactactaggtggcactccatcacacctcattttgcaggcgacaaaagatttctggcaactggaacagtgcatagaagtgttcatatattctctcaagtatttataacactggccacagtgcctgctacgtgtccagaatgtgaaaacaccagcaatattctccgcagcattgtttgtagctgcacagtggcgacccgagtatacattcacatgcctgttagcaaacattgaatgggatctgtatctgttatcatactgagaacgtttgatctgatcagaaagcaatctgtttgcttcccaaccaacttgaaagcagcctctgctccagcaaacttgtttttgtctggatggagaagcagccaacgtttctgtattgcttcttgattgtgt

SEQ ID NO: 13083 - DNA, 518 bp, Arabidopsis thaliana columbia
gaaatcagcgtcttctgtaaggcacatcactgttttaagctgactataatcgtcggtatctccctggatttgattaaagaaaacacttttaacgaacacgaacacacactgacacacacatatatatacatagtgtacttggaagaagtaacatctgtagcaacactcacattttggacagatgcaagggcctttctaacggcaaacaccaaatctgtgtcggtatattcagcgttgtccattgcatttgagttgaacggaacactcggaaattcttctgctcccattctctatgaacacaaaacacagctactgctgctacttcagaattttgccaagaatctccttaatttaacctactaaagaacaaaacaaaccatcaaaatgcaaggagcacgaaagtaaacagtagattatgtataaagccccctttaagaaaccaccctaacaatttgcttctaaaccaagtaacgacgcctactattgaaatcaaaaccagaaacctatcataacaaagg

SEQ ID NO: 13084 - DNA, 519 bp, Arabidopsis thaliana columbia
tcactctcagatttgctttactgaagtctctctggtgggtgcaggatcgaaacggttatttacaaggagattccaccaccagaatgcttgaaaaccgggttagatttcttgaagatgaggagagcgcaagtccccagatcgtcttcagtcatcaagaactccggccaagctctccgacttgccaccggtgctgctttagccaagaaacagcgacagagaaagtgaaaattaagatgtaaaattttcatgtgggctcaattccataacatttttgttttagttagcctttttggctacttctgctgctacctacatgtatcagatatttatttattactaatattgttcaaacgctctcgacacaaaactctttatgaaatacatcaacgtgaaggccaatatcattaagaaacaataggagaatgttcatgaagagtctgagtttatctcttgcctcagtagactatgtgtatgtagaatgtaagtgtatatattgatctgaatcagttttgtagggac

SEQ ID NO: 13085 - DNA, 859 bp, Arabidopsis thaliana
tctcccaaaactcttagcttcatcagaatcctctgaattcatcgcatgggctttaccttactgctccggtggagatttaaacgtcctccgacaacgtcaaaacgacggcgtttttagctcctccgttattaaattctacttagctgaaatcgtctgtgcgcttgaccaccttcataccatggggatcgcttacagagacttgaaacctgagaatatacttcttcaagaatcgggtcacgtgactttaaccgattttgatctctcttgtagtctcaataaacccacccgacccgaattctatcatctatccgacccggaaccggatccgaacccggaatcgaatctcagtcataataagaaaagtctgagaattttccggcagaagaagaagaagacgaagtcagctcgtgttaacccgattacacgacggagactgagtttttccggcggtgaacggtcaaattcgtttgttgggactgatgagtatatatcgccggaggtaattcgcggcgacggacacgattttgccgtcgattggtgggctctcggagttttaacgtacgagatgatgtacggagagacaccgttcaaaggaagaaacaaaaaagaaacttttcgtaacgtgctggtgaaggaacctgaattcgccgggaaaccgtcggatttaaccgatttgatccgtcggttattggttaaagatccgacgaagcggtttggtttctggcgaggcgcggcggagataaaggagcatgcttttttcaaaggagtgaggtgggagttgttaacggaagtgttgagacctccgtttattcagttgagagatgacggagacttgacggggaaagtaacggaggaaagt

SEQ ID NO: 13086 - DNA, 584 bp, Arabidopsis thaliana
cttcatggatgaaccaacatctggtcttgatgcaagagctgccgctattgttatgcgtactgttaggaataccgttgatacagggaggactgttgtctgtacaattcaccagcctagcatcgacattttcgaatcattcgatgaggtttgcctccaaaaaaatcacagtttttgtccccaaaacagaattttttttttttaacaaatcatatttggtcattgtagcttttgttgatgaaacgtggaggccaagttatatatgctggaagtctagggcatcactctcagaaactagttgaatattttgaggtgaatcatctgtttgtttcatctcttagtcatatatatccgtggaattatctatatctagaacgctacttgcaggctgttgaaggggttccaaagatcaatgacggatacaatcctgcgacgtggatgcttgacgttactactccttcaatggagtcacaaatgagcctggactttgctcaaatattctccaactcctctctttatcggtatgccaaagaaaatgctgctactaaaccagagtgttactctgtccttttactacgaacttgatg

SEQ ID NO: 13087 - DNA, 503 bp, Arabidopsis thaliana columbia
tacacaacaacaacacaaagtaaatattgagaggaataataatatgtaaaacagattcaataatattacctctgagagtgataaacatagagaaagttgtcggacagaagtaagagccctcagaaacttgtgagtaactccttgagtaatgtcaacatgtgcctcgaccaactcaggcatgttctcaatttgacggacgtcgtaaactgcgtcatctgtaatgttaaggtacttcaaagaagggacatctatcacatatcgatcacattgtccataatttttgtcgatcatggataaccgtcgtaaggaaggcaccacgaaagtgacatccatttctaagtcttgatcatgtcgctccacaaacaactcttcaagatttggacaaccaaataaaagacttggaagagatgcgtcgtcttcgtaatcaacagtcttaaggtgtagaactttgagagacgggagacaaactgaagaaggaacatccaatagaacgaaattgatga

SEQ ID NO: 13088 - DNA, 492 bp, Arabidopsis thaliana
aagaacctacaagttagtagcaaatatcagcaattcagcataggctctgcaatgattgtatagtgcatattttctattaaaatatgaaaagagacaaacccgatgtatatcgacaggtcctccattaattgttgcaacagtggggagcccatgagctcctgcctgttagatacagtgcgtgttaattaataagagaccctggaatgaatagagcgctgaaaagagaataaatgataaatacctcgattagagtcagtccaaatggttcgatgaacgctggatttataaatactccctggaaaagaaggtttaacataaggcggataaacaatgcaaggaactaaactgtatcacagaaatggaggcaaaacacatgctatgatcctatgcattttaatatgggaacaattattgaatgagcactacaaataatttatgaagagtacatgtcctataagagatcaaaaaagaaaatactgggactcatgtgag

SEQ ID NO: 13089 - DNA, 542 bp, Arabidopsis thaliana
tcctatttgcagggaatattttctttcctgataatattgtgagatatatgatgaaaataagagtataaatgaacttttctatttttcactgatataatgatgcatcttaaatttattgggaaattctcataaattaattttttcttataagtttttttaattgattgacccataattttcataatcactcatatcatatctttaacaatatgtcctttttataaacaacttttgcaaaatgacattgacatgtaccattagttaagctatgtgacaaaacaagtttggctttttgtgtttgttttatggcaaaactaaaaaagatggcaagcgaggctggatttaatagcagtacggataggtatagtagggaacatatgcttggcgttcttgttctatccagtggctcgtggctcgtcgttgctggctgcagtggggcttacgtctgagtcaagcatcaagtaccatatatggttggggcacttggtcatgatcatattcaccagccatggtctttgttactttatctattggataccaag

SEQ ID NO: 13090 - DNA, 486 bp, Arabidopsis thaliana columbia
tcagaaaattcaccagctttggcactgtgaaacaaccttaagctctcatatgtatgaagattaaccttcctgatctcatcaacatcaactgaaagatatgaagctactttttcaatgatggcttctcctatatatgatccttgtacatccccaggagctctcagcgcggttctgctcacagtgtttgttttgcatactttcacattgaaagacagagcaccccaatcatacttcattagtgctccttgtattcccttcggcataagcgggcttatatcttcggttaaccctgcatcaagtaacacctctacatctaaagcagtaatctttccattggatttgaatccaacactatatgtgactttcatcggatgtcttctccggtagttacatatccgtttttcggttcacatatgtcctcacaggacgctgcattttggatgctgcaagtgacaagctgcagcaaccttgaaaacaatttgttga

SEQ ID NO: 13091 - DNA, 1380 bp, Arabidopsis thaliana
acagtattataattataaataaaggtaagaggagacacaatacaaaattcagacccactcgtctctcatcactcacactcaatggagccatcaccgtcgtccccaccatcatcaccgccggagattctcgaccttgactctatcaaagctctcaaaatcctcggtaaaggcgccacaggtaccgtcttcctcgcgcacgacgtcgtttcaacctcttcttcttcttctcccttcgcggtcaagctcgtccccaaatcctctgcttcctctctccgccgtgcacggtgggaaatcgaggtcctccgtcgtctctccgttgactctaatcaaaacccttttcttccacgtctcttagcttcttttgagtcaccggaatactttgcttgggccgtcccttattgttccggcggtgatcttaatgtacttcttcatcgtcaaaacgacggcgttttcagttcctctgttattagattctacgtggcggagatcgtctgtgcgcttgagcatcttcataccatggggatcgcttacagagacttaaaaccagagaacattctgattcagcaatccggtcacgttaccttaaccgattttgacctttctcggagccttaaaaaacccctccgaccccatttctatcaacccgacccggaattgataatcgatcgtaaaaaaagtcggagcttttctcggttgatctcgccgacggcggatgaaaaacaaaacagggttgaagaaaacaagatccgctcggttaacccaattaatcgccggaaaacgagtttctcctccggtgaacgttctaactcatttgttggaacggacgagtacgtctcgccggaggtaattcgcggcgacggtcacgacttcgccgtcgattggtgggctcttggcgttttgacatacgagatgatgtatggagagacgccgttcaagggtaagagcaagaaggagacttttcgtaacgtgttgatgaaggaacccgagttcgccggaaaacccaacgacctcactgatttgatccggcggttactggtgaaggatccgaatagaaggttaggttgccaccgtggcgcggcggagataaaagagctcgcttttttcgcgggtgtgaggtgggatttgttaacggaggtgttacgacttccgtttattccgttaagaagatgacgtaggagttcacgagtatgtgtggtttgatataagggaacattttgagaaactgaggacgacgccatcatcagctcctccgtcaccgttacgttctccgccgcacgtgtgtcgtaaaaacgatccgtttattgaattctaatccacgtgtggggaatctaacacgtacaaagttgtagagaaaatgtatatccataccccctaacgtgt

SEQ ID NO: 13092 - DNA, 585 bp, Arabidopsis thaliana columbia
cactctctcttgtgacaaaacaaactcataaaacctttctctcttccaacagcaaaactctgaaattgacagaggagaaaaatggaggagacaatggccgaagaagggtgctgtgaaaatgttgagtcgacgtttgacgacggtaccaactgtatttcgaagactgaggacaccggaggaatcgaaagcaagaggttttacttggctcgcacgacagcttttgagatgcttcgcgatagaggctacgaagttaatgaagctgagctctctctcactctttctgagtttcgttctgtttttggtgagaagcctgagcttgaacgcctccgtatctgcgttcctcttcgctcagatcccaagaaaaaggtttcagcttttctttgttccaccgctatttttcgatttgggtgttactttttgtttttaacagatgaaaatgtgaaaaaggcatcaccttttttagagtttgggtttgcattttggtttacgccttcacagagaaagaaaatgtgtaaacgcttaaactttatcgattttgagcttcagcttggggttgcgtaaacagaagaaatttgagaatgcgcg

SEQ ID NO: 13093 - DNA, 470 bp, Arabidopsis thaliana
aaagttctagatatagttccatattcatatgaccaagagagaggaaaagcaaaaccaatgattcacctcaaagtattcaacgagtttttgtgagtgatgtcctagtgttccagcatatataacttgtcctcctcgtttcatcaacagcaactgcattaaaccaaagatgattgattaactttatcctggttcagggacttaaaagtggaaaaaaattcgggaagcaaacctcatcgaaggattcgaaaatgtcgatgctaggttggtgaattgtacaaacaacagttcttcctgtatcaacagtattcctaacagtacgcataacaatggcagcagctcttgcatcaagaccagatgttggctcgtccatgaagattattgatctattagctaccaattcaactgctatagtaagcctcttcctctgttctgttgaaagaccatctacaccaggaagaccaactatagag

SEQ ID NO: 13094 - DNA, 358 bp, Arabidopsis thaliana
tgacaaaacccaaaagatggcaagcaaggctggattcaatagcagtaaggttaggtctaacagggaatatatgcttggggttcttattttatccggtggcacgtggctcgtcgttgctggctgcagttgggcttacgtcggagtcaagcaccaagtaccatatatggctcggtaacttggtcatgaccttattcacaagccacggtctttgttattgtatctattggatatccacaaatcaagtctctcaggttagtctatgttgggctatctatataagtatggcttttggttaaattcggctttggctacataaagacaaataacagacgtataaaattatttataactcgaagtg

SEQ ID NO: 13095 - DNA, 595 bp, Arabidopsis thaliana
tcgaacaatttggagccaaagatggatcaacaactcatgaaattcgaagatgaaatcgaagagagaatataggtaaacgaactatagaatctgaagaatagaatcgtaaaatcagagcatgaaattgcatcttatgtcaaccgataagaaaagcatatttgtactttaaagaaaacttatactaaatggctaattacggccacgtttcttgacgggtacggcatgtaacgggttggtcttgtgcaatgtgagaccgaaagtctcgtccatgtccaaatcctctgaaccgacaccgtttggaagcttccagtcaaatgaataaagaagagaagcaagcataagaggcactgttttcacagccaaaggcaatcccgggcatattctacgtccggctccgaatggtgtaagctcataatctctacctctcaggtcgatatctttccctaaaaacctctctggcttaaaccgggacgaattctcccacacgttcgggtctcttcctatggcccacacgttcacaaatacgtgagtgtctttaggcaccatgaacccaagaacctccacatctgattcagcttttcgggggactagtagc

SEQ ID NO: 13096 - DNA, 426 bp, Arabidopsis thaliana columbia
tgcatatatactttgtccaaaaagggttttactgtggtttccggtttgtcaaaattttccttcaatccacgtgtccggttttgatttgtggtttaatcttcctttttcctgaagatagcaaaaatagtaaaaccaaaaatttccaggtcataattcgtgattcctttttctagatttcaaaaatccaaacttgtaaattgccattgatcgatggagatgaagagagacttattttcgttctcgcaatcatattgttctcacaattgaccaaggaaagagaaatgcgagagattctctgaatttagagagaagcaaaagagtttttttttttttcgagaaccaaaaatggagaatcaagaggaagatgaggtggtgctggcgaaggtgacgtcggaggttgaggataattttgaggatgaaggggtt

SEQ ID NO: 13097 - DNA, 1291 bp, Arabidopsis thaliana
taatcaattttgtggtgaaaatctttaaatttattagtattccaacaaatgttagatgagtgaaaacatgtttcgatcatagaaagacatttttaaaactttaatatcacatcatttttatacaacaggatcatgttgtactcgaatgttatgagttgaaatcgcatgaatatttatatacggaaccgaaatgtcgagctgctcactgacatgtgatttatatgtgtcaggatatgtttacagcaggcacggatacaagctctagtaccctggagtgggcaatgacagagttacttaaaaaccctaaaacgatggcgaaagctcaggccgagatcgattgtgtgataggtcaaaacggtatcgttgaagagtcagatatctccaaactgccgtatttacaagcagtcgtgaaggaaactttccggttacatacgcctgttccgcttcttatcccgcgaaaagccgaatccgatgcggagattcttggtttcatggtgcttaaagatactcaggttctagtgaacgtctgggccataggacgagacccgagcgtgtgggataatccgtcccagtttgagccagagaggtttttggggaaagatatggacgtgagaggtagagattatgagcttacaccattcggagccggacgtagaatttgcccgggaactcctttggctatgaaaacagtgtctcttatgcttgcttctcttctttattcctttgactggaagcttccgaagggtgtcctttcggaggatttggacatggacgagacctttggtctaactttgcataagaccaacccgttacatgccgtacccgtcaagaaacgcgccaatattaattagtcgtggttttataattaaaaataaacagagaaataatctccaaagctttgtttattaccaaaaactatctgttttcggttctagagtttgtttgtttctctctcttgaggtggctagagcttgaagaagtcaaaagtatccatattgatgcctagcttcggtcctcggtttaggctaggaaggaaacgaagaagtttctgcaaaccgatgcagatcatcaatggaataatgaaatgttaattttatcatttactcatataggtttccgcctcattatcatttacttgatgtttctcctaaatcttgtcatttaattgactaaggaaataacgaagaaattatcatttacttatttatatatgttcattggatacaattatatatatatacgcacttaaaataattgtttagtgtatcaacaaatgagagtgcaaatgttt

SEQ ID NO: 13098 - DNA, 590 bp, Arabidopsis thaliana
cttcctgctttggtaggaaatggtaccatcttcggtggctatcctgtctccgacctcaaaacggctattcaaacggccggagacttgaagcaaatgacggctgagattgagcttgtcgggactcagttcatggtggctcctccggcggttcctttgccatccaacatatcgcttgttaacgagggttggctctgtcctgtgcctactcttcaaagtaatcattccaatcaattttttacttttttatttttattttttaaaaacattttatatggtaattgctaatgttcaaaacttgattagaggtcagacactctaattgcttttataggtttacggatttaactgatttaaaaactcgtttttttgaagatctttactagttaatcaaaagtgttaactagtgtaaacaaaaagtggactttcaaataacaaagtttataaatactttgtagatatttttcctaattctgatattatatgaatacaatattttaggaaacaaaatacacatacatgtaactttattttttacggagatgcagtaaaatttgaagtgaaaatattaatgttagcgttactaattttgt

SEQ ID NO: 13099 - DNA, 343 bp, Arabidopsis thaliana
ggagatgcagtaaaatttgaagtgaaaatattaatgttagtcttaactaattttgtgtccattaggcaaaagagaactaacgacgtgctgcatacgagacgcgagcattatagtcaacacaacaatcaccaccaaattcctcccacgacaacccggagacttgaccataatgtacgacgtgatccgagcctacgaccagaactacctaactgaagtaaccatggaaaaccacaacccgctaggcaggcttgaccattgggagcttagtttcgattggatgcgagacgagttcatacaaaaaatgcaaggcgcatatccaacggtcgtggacgccacaaaaatg

SEQ ID NO: 13100 - DNA, 574 bp, Arabidopsis thaliana columbia
tgaaaacgaactcgatggaaacgtgccctactcgttatctcaaatgaaaaatctccaaagcatgtgagtgaaaacaaagaaattgattaagcatatctttgctgtgaattatggtttatgatcacttgttaatttatatatgtgaaatgcagtaatcttggacaaaacaagctcaatggagaactaccagatatgtttcagaaactgtccaaactcgaaactctgtaggtacaattcctttagttatgtacatttttaacagaaaatgtttgtaagaagtatcaaatttgagaccttacacacccaaatttatgtatgtagggacttttcgttgaataaactctctgggaaattacctcagagttttgctaatctcacaagcctcaaaaaactgtaaggaataagaaacaaatcattactttatagtatttttctacgaaggctaaattggaaactgtcttgttattgtgcaagacacttgcaggataatcgattcacaggcgacataaacgttctcaggaaccttgccatcgatgacttgtaagcagcaaaaaccatacttaggctgcgacac

SEQ ID NO: 13101 - DNA, 549 bp, Arabidopsis thaliana columbia
tagaggaccctctccttataaacaacccatacgacccgcgaaccaaacaaaaattgaagccacatcgtcacaatttggcagtgttgcagataaacctaccagacgaatatgctcctttgtgctttcaatctgcctaagagtcctagcgacaatactttcaagcacaggccctcgattatcatcaagaagatgaatttcgtcgattataagaagcctcacaagctgtgtataagtgcgatctccagatttcctggtgatgatatcccacttctctggcgttgtaacaattatctgagtctctttgatttcttgcccagtaagggactgatccccactgagttccttcacagtaactccaaaatccttcaaacgttgagatagactatccacgacctcagcaacaagggctttcattggtgcaacatagacaattttgtaattaccatgattaaacgttccaccagggttcatattcaatccaagctggtgcagtatggtgagacggcaacattggtcttccagcaccagttggagcacaaagaagaatgt

SEQ ID NO: 13102 - DNA, 437 bp, Arabidopsis thaliana columbia
ttacattcacttgcaatcctaaatggccagaaattacaaaacacctacaagaaaggaaactaaaggaagaagatagggctgacattctatcccgaatgtacaagatgaaattagagaatctcatttatggcattcataaaaacaaactttttggtcattcagctgcaggtaagctacatttaatgttattctaactatttatatttatagatagcatttacatgatccaacccctaatctatcttcatcatatatacaaccgagtttcagaaaaagaggtctaccacatgctcatattttgttatggctaaagcgtggctcaaaattgccaaccacaatggacatcgaccaagtcatatgtgctgaaatcctgatcaagccctacccagtccttaatgaaattgtcaaggaactcctgatttatggtccatgtggct

SEQ ID NO: 13103 - DNA, 568 bp, Arabidopsis thaliana columbia
  unsure (1)..(568): unsure at all n locations
nnnnnnnnnnnnnnnnnnnnnnnctaaagtctgttcttctgggttgccagaatgatcatgttgggtatcaagatgactggcaaggttcctttcaaggaggtctactgtcattcccttattcgtgattctgaaggtcgcaaaatgtcaaagtctttgggcaatgtcatcgatcctttggatgttatggagggtaccaagcttgaggacctccatgccaagcttctcgtgggtaaccttgctgagaaggaggttgctaccgctacgaagtatcaaaagaaggcgtttccaaagggcattcctgagtgcggtgctgatgctcttcggttctcccttgtgtcctacactaccggtggtaagttcagtgacactgttttggcactgcgtatgattctaattgtctgttgaaggcggcgatatcgcatttgacatccaggtcattcacgggtaccgtaagttctgtaacaagatttaccaggctaccaagtacgttcttggaaagcttggtgatgatttcaagcgctgccgaccccgacaaagactggcaaggaatctctttctgaacgctgga

SEQ ID NO: 13104 - DNA, 1012 bp, Arabidopsis thaliana columbia
gcttatatatgttacttatcattaaagcttgaagttgactgttggaggcatttgtgttggttgaaatcattaaaaagggatacctgttggttgaaattaccatatcttcgttttttattgcctgctctagtcatcaccccgcaatttatgtctcaactgttaaaacttaagtaatgtgtgttgcagtttctcaatactagattgtctgctaatatgaggaccacgttacttatttgcttttgaaatttttacgtcctgtactattatttattccatttcgtccaatataactctttgtggcttccaggcaggaggttctttgaagaattagatagagatggtgatggcaaagtaactttggaggatctggaaattgcaatgaggagaagaaaattgcccagaagatacgccaaggaatttatgcgacgagctaggagtcatcttttctcgaaatcgtttggttggaagcaatttttgtccttgatggaacagaaggagccaaccatcctccgtgcctatacttctctctgcttgaccaagtctggtactcttaagaaaagtgagatattggcatcactaaataacgcaggacttcctgctaatgaagaaaatgctatagccatgatgagatttttgaaggctgataccgaggagtctatctcatacggacatttccgtaatttcatggttttgctgccatatgagcgcttacaagatgatcctcggtaagtatagtactttgttttgaaataaaattgatgttttattttgtagcggcttgtctttgcactaatgagtaaaatgccaatttgaccactagaactgtttggattgaaccggaccagtttccccttagtttccccattcatgttgattcctcaaacacttcaaacttataatttttgttgtcatccaatggtgattgatgctatttttacttgtatagtacatctggtttgaagctgcgactgttgttgctgttgccaccctgtggccttacctgctggagatg

SEQ ID NO: 13105 - DNA, 678 bp, Arabidopsis thaliana
  unsure (1)..(678): unsure at all n locations
aaagaagtccatatgaaaatataacaacagcaatttaaaattctaaatgctttaaacaaacacaaaaactattatatacctttgctgcaatgccgggtctttctcttcctgtgatgcgatttcacatttttgtctcagtactttgaatcaacaaaattaagttgaacaaagaagaatttggaatcaaaccttttttgagccgaagccacgcttagggttagaatccgagcaacgtattcgaaataggagaagcttcgagttaaatgaaacggaggtcgtcgccgctagtgtcatcaacatcctctgtttgtattgtcctaaccaaaacagagaattttctaagaaagtttcaaagaaataatgagaagtaacggctacgaagagaaattcgtccgccggagattgacgatgaaaggtgagctccgtgatcgggccggtaagataacgttagtggttcttcttcttcttcactttgcagattgtctattatatgggccgaatggaaaacataattttgggctaggccatataatattcaaatgttaatattccaaaattgatgggtatttttgataatttaactcgatctatataatgtaacaaacgaggatgattttaagtttttaactttttaagtgagaatagtgattaagtgtcaagancgattggataggatgt

SEQ ID NO: 13106 - DNA, 856 bp, Arabidopsis thaliana
actctaatgcaatcgtatctattcacaaagcctaatgtgaactctagatctgtttcctctcttctcgtcgtttggatcttccaatcctaaccatctcgaagcaaccaagcgatcgtcgacgcgtctctcgattgcgctgagtggcacgcgagccattccgacggtgactggtcctttcgatgttcgatactccaacgtgaaaacaagctgatcggagaaaggttcggcggctacgaagagtagatcttcgttccatgacggagctccgttacgagtaacggcggatttggttttctgaacttgggaacctaactgagcttttaactgaaatgacgcttccttaaacgccgttaactgaggcggtaacaagtcttgtgcttctatcacggtagcgcgtagataccacagcttcgacgacatgtaaaccttcgctcgtgcggtcacgtttccggctgtatcagttttccacgcgtcggggaatgattcgtctgcttgagttcctgtccacgtggcaagcattagatcactgttgtgagctccaccaccttcgagacggtaccattgcggcgctaatggactatccggcgggtctcggagcggaatctctgacacgtcgaagcaaattccaccaaggaattggctggtttcgattcccgtcgatgaatcccacacggatatctccagaattggagaggaagataaatccggtgagtcacggaggaaggcgaacgtttgatccactcgaagcaagaggtttttctagccggttttgattgaatcattgtgccggagagtgagatctttgtgactggactcccggaggttggtaaagaccgagctttcacgacgcggatga

SEQ ID NO: 13107 - DNA, 478 bp, Arabidopsis thaliana columbia
gataaaacacatcttccgttatcttcaaggtactattgattttggattacattatcctagaaaccccgagtttggtctagttggttttgcagatgcagggtatctatcagaccctcataagtctagatcacaaaccagatatgtttttaccattggaggaactgcaacctcgtggcgttttcaaaagcagactatagtcgccacttcatcaaactacgcagaaataattactcttcatgaggcatctagagaatgtgtttggcttagatcgatgactaatcatattcaagaagcaagtggattagtcatcaaaagagagccaacaagaatatatgaagataatgctgcatgtgttgatctaatcaaagaaggttatatcaagagcgacagaacgaaacatatccctccacgattcttctcctacactcaagagctcgagaagaacaaggaagtagaagtgcaatacattcgttcaagt

SEQ ID NO: 13108 - DNA, 778 bp, Arabidopsis thaliana
tagaggattctgagcaaaagcaacagaataagctgcattcgcatcaatttcagtgtatttcaccatcatagtcaaggccagagccatcaaacagtaaaccacagtgatcatagacatcgaaccaaccaaaccaattggaatatctctggaaggtttctcggtttcttcagccatgttagccaccatatcaaaaccagtgtatgaccagtagacaactgcagcagattgcaccacacctttcgctccataagggaaaaaaggaaccaaatttgaggtttttgaatgagtaaaccccacaacgacgataaacacaataatacaaacagtgaccatggaagtaatcaaattcaaccaagaagtcctctttgttccagtcatggcaataccattagcaactaaaagcactgcaacagcaaccggatccaaaagatcaaaccctttagcaaaggaatcgactttaatccgaaaataatcagaatcattcttgaccaaactagctagatacgaagaccatgacctccctaatccagcagcaccaaccatagcctcaagaagaatattcccagcagcaataaaggcaataaaatcccccaattcaaccctaagataagagaaagaacctccagcgacaggaatctcaactccaaactcagcataacagagaactgagagcaatgcagagacaccagagatagcgtaggagagaacaacagcaggaccagctccaactcgagcctcctgacccgtgatcacgaacacacccgaacccaacacagaa

SEQ ID NO: 13109 - DNA, 969 bp, Arabidopsis thaliana
atgcctggtagagaacttgcagaaatttatgtttccttgcaaatgtgcgtctctctatcctctgtcctcagattctatttgacaaacaattaactactcaacgattaacaaatgtttttcattttgagggtgctctctttataacccctttaaatttataatctgtaacaggtacaagcaagcagctttctgctacgaggagctcatactaactcagcctactcttccattgtaccacttagcatatgccgatgtaagtcccatcttttatttatttgttaaaaaaaagtaaaaattgttctctggctttgttaaagaaaaaagtcaaattttggccatcaccaaggagcatcaaaatgtcttagtttgtttaagacaatgtatctagtatgcatcctataatcaattttgttgttccttatatcttacactggaagttcattgtcattcatatgtctattaatgtagtagcaatagaagagcgagctattttctggaactttgcattatttgcactgcacatatcaaactcaaaactgagaattctaaaagtttggaagttttttttttatatagttcgaaactctaaactacagcattgatcatgtatgattgtgtaattaacgtaattttcattttgcgttgcaatcgccaaaatcaggttctctacacaataggtggactagaaaacctcatcgcagcaagaaagtactatgcagcaactatagacttgacaggtggtaaaagcacaagagcacttctcggaatatgcttggtatgaaccctttcttcctcacaccagtttaatccactttggttatgcaagtgacaaaatgaccgatacatgttctgtttttgaaatcagtgtggatcagcaatcgcacagatctcaaaaggcaggaacaaagaggacaaggacatggctgcaccagagcttcagtctttggctgaactgcattggagcgagag

SEQ ID NO: 13110 - DNA, 720 bp, Arabidopsis thaliana
gtcgtgtagacagctctttgaccagttttttcaacatacctagaagaaacattaatgcagttaatgaaaatattcaccaaagatattaattaagtaagctggtcaggatagttttcttacttcagaaaattgtgattttgctgttcctggatcacctagtaaaagtacattaatatctccacgcaatctgtgtttccctttgatatttttctcttggccaccaaacatagcaagagcaagagctgttttgatatcttcgtggccatatattgacggagcaattgacttaatgatctgaaggagaaattgaaataatgttaaaagagatgaactctgaagcaattcaaaggatttattaggaggattgatatccaacttacacgttcaactattcgtggatccttggatagctcttcgatttgtgtcttgtcttcttgggttagcttgtacgcagagaagaggtcttgtttctttgtaacatagttagcttccaccacagtggcaaagactggaaacccattctttgtgttcaaagataggtcaaagttgttggtatatatgccagtaacctcctgcaaaaaatccaatgcaagataacatgaatgattgatcatatacatgtgtgcaagtattctagaaggctaatatatgatgaacgtacaatttcttccccaggacgagcgcaatccataaggtcattcagcaggataacttctttgt

SEQ ID NO: 13111 - DNA, 590 bp, Arabidopsis thaliana columbia
gtaaactctttttgattctatgaggaggtagtgttttgtccaaactatgcaaatgtatctatctactattgaggtagagtacattgataggtgaaattagcaaacgactttccgtcattcaatctcatgatgtacttcagagttcagatagattggaacaactgctttggttttatgttttaactttgattgtgaatctttatgtatgaatctacccgagatgccatcacactgctatttttccatttaacattctgtttagttacatggtaatgccaaccgatataggttttcgttttttatttctgtaggcgaatgcgtggtggtaggaggctctggcaatccagagatgaaagaaagtggggacatgacaaattcgaggaaatgaatacacagaaacagcaatatgatgtacttttctctgatcatctctctttctctttctctccttttcataaatatatttgtattcatcgacttgtttcctcttgctgtgtttatacatttgccacctcttttttctttttccttttttttttccttttgaaagctgattaattaaacttgtgaacatagaggaggactcgaga

SEQ ID NO: 13112 - DNA, 531 bp, Arabidopsis thaliana columbia
  unsure (1)..(531): unsure at all n locations
ccgtctactccaaggtctgagacccgacccgattctgtaacctgctctcctaccattccttgtcagagttggtctgctacagctatctccactccttcaccgtctcttcccgctagtcccaagcttcaatgcgatacttccggggacgttactccgacgagaaacagaagtcctctctctttcctcagcgtttcttcttcttcttctacaccttcctcacctaaatctccggcgagcttttctctactcaaatcaaaactctgtttcaccaaagtaagaatcctaaatcgaaacaaccaagttaacatttttaaaaataactcaaagttaacatttttacgtttgtgttatgaacagagtagcatcagtagtagcaaatgtggaatttgtttacaaagcgcgaaacgtggaagaggaacggcgattttcacggcggaatgttcacatacgtttcatttcccttgcgtagttcacgcgccggtgatcggaatctactctccgattgtcctgtntgtggtgcttcatggagag

SEQ ID NO: 13113 - DNA, 518 bp, Arabidopsis thaliana
ctaaagatgagtgaagccgagcaattgaataaaggctttctcaagcggatgcgcaccggctttccttatattcagttaaaacttggcgcatcgcttgatggtcgcacggcgatggcgagcggcgaaacacgtggatcacttcgccccaggcgcggcgtgatgtacaactactgcgcgcgcaaagtcatgccattttaaccagcagcgccacggtgctggcggatgatcctgccttaacggtgcgttggtctgaactggatgaacaaactcaggcgctctatccgcaacaaaatctccgtcagccgatacgtattgtgattgatagccaaaatcgcgtgacgccggtacatcgcattgtgcagcagcccggcgaaacctggttcgcgcgtacgcaggaagattctcgtgagtggccggaaacggtgcgtaccttgctgattccagagcataaaggtcatctggatctggttgtactgatgatgcaactgggtaaacagcaaattaacagcatctgggtg

SEQ ID NO: 13114 - DNA, 462 bp, Arabidopsis thaliana columbia
tatttagatggttctcacatcgaatgatcaaaatcatggtttttgttgagttctatgaacaaaggaacaaatagaaagaaagaaaattgtatgtgttaagttagagttatagtacctgctaagctaggacggctacaacaatgtagatcattgattttcagaacttgttttgccgtctcagaagaagaaactacgaccgttgggacacttccaagcttcaaaagcatcaccggaccatacgttttggaaagactccatagagattgatgtggtaattctccaagctgatgcaagtttccgatgatcggaaagccaggaggggacggtggttgctgctgatttgtccgacgcttctagtgtctagaggcgtcgaggagaatgctgcatccgcttgcaagatgactaatgctaatcgtagccatttttccgtattaacgtacgtctcaagtattctatgtgata

SEQ ID NO: 13115 - DNA, 586 bp, Arabidopsis thaliana
aacttctcactcctctcttcttcttcttcatcagtctacgttcacacaatctttcacccacctattcaaagctctctccggaagtttcgaggggttggttgttggttttcccgatgacttcggatggagctacgtcgacatcagcagctgcagctgcggcggcggcagcagcggcgaggaggaagccgtcgtggagagaaagggagaataatcggaggagagaaagacggagaagagctgtagctgcgaagatatacactgggcttagagctcaaggtgattataatttgcctaaacattgtgataataatgaagtccttaaagctctttgtgttgaagctggttgggttgttgaagaagatggtactacttatcgcaaggtgaagactttctccattttttccagatctgagcttgttttattgatgtttttgatgtttgaatctgaattcgttgatttcaattgtggttaaatgggtttgaatctgagaatttgagggttttctcaaagtgaatttgaatcatcagaaactatggatggatctgatttctcaaagtgaatttatgggttttctttctaatttta

SEQ ID NO: 13116 - DNA, 596 bp, Arabidopsis thaliana columbia
tcgttgatacaacatgataagaaattaccaaccattaaagttttccaatgacaaataaaagaaaactaacctgaagctgacaaatataacagcatcacagtctctggagagagctcatcacaaatcattgccaagacctggaatatatatcacgagtaaacagttaaatataatgaatggatactagaaaggcgcagtcaagaagtcctatatgattgatactcttataaaactcaccgctagtaagtgtgatactgtgggacgataaagaatagctttcctaggattaggaggtaatgatggatcagccatatcagcagccaagttcatatctataagcccagaagttaaagtatgatcaaccacaaacccattctccttggcttcaacaggctttttttggtaaaaagatccactgggttcccattctaaacactgcatcattctatacgtatccaacgtcacttcagcatatttcacctgagaaaaaaaccaacacatataaccattactaagaaggtacaaagttgaaattttaggtttccagaaaacaacaaacagtgcttgtttactcattacggtgatacttgccagag

SEQ ID NO: 13117 - DNA, 530 bp, Arabidopsis thaliana columbia
ttacagtttgaaaaagcttctgataactttgaaaacgcttcaggtttcaattgagctgcgaaagaacctgtgccgagctcagtcagttgtggagcacaacgaagtaagctaacgagtccatctagagtcacagctggattcaacttcaaagacttcaagtttggagatctgctcacaagacgctctaaatccgagattttaacctcagaatctaaacaagagaagtcaagagagaccaaagaagttgaactctctggaaaatagctaagccaatctcctcctaaatcttcaacaatacactctcgtagttccaacactctcaagttcctatattgaaaatcagacaacaacaaagaacaaaccaaagctaattactactatgagatataacttgcagccaaagaaaagattgtttttgtatttggttggaaccgaacctgcaagtagctgcaatagcagcgataccatcagtagagaaccttcacaagaagtcacacaaggactttaaaatccttaaacgaagcagcaat

SEQ ID NO: 13118 - DNA, 536 bp, Arabidopsis thaliana columbia
caaaattgagacataccgtcccaagggagggagacaatagtttactgaataataccatgtatatttttcttaaatcaagtaaacagagacaaatttcccaggtatttaattaccttggttaagagctcccaagcccattcgatagcttccttcttgaaataatctccaaaggaccagttaccaagcatttcaaagaaggtgtgatggtacgtatctttgccgacatcatccaaatcattatgctttccaccagcacgaatacacttttgggtgttacatgcccgagatagcttgctaagctcagtatttggatcggccgtacccaaaaatattggcttatactggttcattccttgaaaaacagagaagtttcaatgtcattaataattctatttttcgccagacatatcaagagaacttaatttacatagctcagtatcaatatcagaaaatttcgaccaaaactgaaattgagaaatttgaataagtcccaaagcgtcaaagacagaagaagacagaataagtcaactctatag

SEQ ID NO: 13119 - DNA, 884 bp, Arabidopsis thaliana
tttaaaatctccagtggtcacatagaacaacttcaagattccacttttgcttttataatcagcagtcttctagaaatctgtaatcttttcgcttttttggtaccttttattttaaattaaagttcacaaattttcaccatttatatgtccatcatcatcatcaccacaatcaaattgagctaaattggtttttgattgttgtttttctccagctccagattacaaaaagaaacagctcgtttttttcactttcaaaaaaatggaagctttgaggatttatctatggagtctctgtctctctctgtgtttgattatctatggagcaaactcagatccattagaagacaaacgcgcattgcttgagtttcttaccattatgcaaccaactcgttcactcaactggaacgagacttctcaagtctgcaacatctggaccggagttacttgtaatcaagacggatctcgaatcatagccgttagattaccaggcgttggactcaatggtcagattcctcaaacactataagcagactctcagctctcagagttcttagtctcagatccaatctaatctccggcgagtttcctaaggattttgttgagttgaaagatttggcctttctttatcttcaggataacaacttgtctggtcctttgccattggatttctctgtttggaagaatctcactagtgttaatctctcaaacaacgggttcaacgggacaatcccgagttcgttgtctcgtcttaagcggattcagtcgttaaatcttgctaacaatacgcattccggtgatattcctgatctgagtgtgctctctagtctgcagcacattgacttgtccaacaattatgatcttgctggaccgataccagattggct

SEQ ID NO: 13120 - DNA, 504 bp, Arabidopsis thaliana columbia
tagtagctgcctcccgctaattgtttaagtcacaatccaaatccaaatggttacaaaacaaaaatacatgtaggcatcgtgtacaaacaggttttttctttttcttatcgatctgcggttttgatatcgagaagagaaagtgtagcaatctcattcataaccaatgctttatcagtttcaaaacctacatcttctttctcaggtttcaaatcagcaaacaaacgaagaatcttggtccgattcgccacgagaatcgccacgatatcctcaggtttgttctcgtttgccacaaagagtttaaagatatgaaatgcttctaactgaatgttcttggttggttctcttaaaagattcatcatgattctcaaattatccaaactgctcacatactttaccatcacacctgaattcgaacgatccatcaacacatctccaagcaatttcgacgcttgtctcttcgtaaaatagcttcctttctccaacaacttggtgttatactctgcg

SEQ ID NO: 13121 - DNA, 552 bp, Arabidopsis thaliana columbia
agagacataaaatgggaactgatgacttcgagccattgacaatgataggaaagggggcttttggagaggtagcattagttttattgtaaacttttcctgtttcttttcagcttttcattggtgtgcatatctacacatcatcttgatcgtcctgtcctgtgatgtagaattgttaaaaacatgaataccttccttgaagggcttgcatccatgtgtgctagaagcactatgcaaatatcttctgggaggatgtacctacctgcagtagttcttgtattcgttgatctttagttggctagttagtggcctgtagggtttatgccatccgagaataaatacacgttttcttaaaaatcagattgtctttttgtagttttcagcatatatcatacagttagctcctggtgttgggatagcgcataaaatttgtaatcgcatgcttatgtttggtagtcctcttgatgcaggttaggatatgtagggagaagacaacaggcaatgtcgatgcgatgataaagcttaagaaatctgagatgctccgtagaggccagg

SEQ ID NO: 13122 - DNA, 535 bp, Arabidopsis thaliana columbia
  unsure (1)..(535): unsure at all n locations
nnnnnnnnnnnnnnnnnnnnnnctaaagttgccgttaccgttcacttcaatacccagcggctggacgttgaatttgaactctacgccttcttcccgcgcgtttttcacttcgcggcgggaacccggcatgttctcttcatcacgacgataggcacaggtaacgtgcttcgctccctggcgcacggacgtacgcacgcagtccatcgcagtgtcgccaccgccaaggaccaccacgcgtttgccttccatgctgacgaacggttcgtcgcgggtttcaccaaagcccattaactgtttggtgttggcgatgaggaacggcagcgctgcgtacacgccatcgggtcattcgttttccagcccgccgcgcattgactgataagtcccgacgccaaggaacacggcatcgtaatcactcagcagatcgtccagctgtacgtcgcggcccacttcggtattgagtttgaattcaatacccatgccggtgaagatttcacggcgacgcgtcattacctctttttccagcttgaaggccgga

SEQ ID NO: 13123 - DNA, 500 bp, Arabidopsis thaliana columbia
gagtgtgctcgaaagatctcactggcgctgacgccggtgatatcttcaaccgactccggcgtgtagccttcaacgattttacgatactcttcaaagccttctgtacgtgaagcgacgaacgctttgtcgtacagattttcttcaataatgacatggcccatcgcattcaacagcgcgatgttcgagccgtttttcagtgcaatgtgcatgtcagcaatgcgcgcggtttcaattttgcgcggatcgcagacgataattttcgccccgttacgtttagcgttaattacgtgattcgccacgattgggtgggaatcgccgggttgtaccgaaaacgaacactaaatcggtattatcaatttcgttaatagcattgctcattgcgccattaccgaccgattggtgcagacctgcaaccgatgggccgtgtcagacacgagcgcacgagtcaacgttattggtacaataacggcgcgcgcaaatttttgcattacatagttggt

SEQ ID NO: 13124 - DNA, 439 bp, Arabidopsis thaliana columbia
ccagacacggcgccagtgtgctctaaagcggccatcacgccttcggtgtagtcgccaaaaacgcgatcattgtcgtgcagttccacctgagtttgtgcggtaacgccgtgtttcgtatggacatggctgatatcgacgcccatgcgggcgagatcctgcttcagctttgtgccgtagtcatcgtcacccacccaggtaatgcatcccggctgtatgccgtagcgagtgcagtacaccgccacattgaccgcattaccgccagaaaacgctttattcagttgcgggtagatatcgacgcagttatcgccgattgtcgccagggttttcatctctcatcctccggcagcagcgcgcgaaacgtttccagcgcctggcgggcatagagtctgggctcgttcatatacatcgtcaccagctccaccgtacagtaacctcatag

SEQ ID NO: 13125 - DNA, 1507 bp, Arabidopsis thaliana
gttaatcctcccatacacaaagagatggagtcccatgaaattatacattaaaatatctactgacagaaaatctaattctcgaattatcattggctttaagaaaagaaactgacaaaaactttccctaaagataatcttatccacacatatcctaggaaacacatatgggaggggacacctttctcttgtctcaacttctatataaactcacgcaagcacagacatttgcataacattcacattacactctttaagtcttaaacgaaacaatggcccttcaagctgcttccttggtctcctctggtttctctgtccggaaagatggaatttaataactccttgcttggtttagtaatcgtttcgtttttgtttatgacctgtctcggagattaattcgcatgttttggttgcagggaaaattaaatgcttcagcatcatcatcattcaaagagtctagtctgttcggtgtttcactttcggagcaaagcaaagctgactttgtctcttcctcattgagatgcaaggtaccaaacacaatcttttatgagtatttttcttggaaaatgatgtaataatctaatcaattgaaatgcttctactttgtagagggaacagagcttgaggaataataaagcgattattcgagctcaagcaatcgcgacttcaactccatcagtcacaaaatcttccttagaccgcaagaaaacacttagaaaaggaaacgtggttgtcacgggagcttcttcagggctaggtttagcaacggcaaaggcattagccgagacaggtaaatggcacgtgataatggcgtgcagagacttcctcaaggctgagagagccgctcaatctgcagggatgcctaaggacagctacactgtgatgcatttggacttggcgtctttggacagcgtgaggcagtttgttgataacttcaggcgagctgagatgcctctcgatgtgttggtctgcaatgccgcagtctatcagccaacggctaatcaacctactttcactgctgaagggtttgagcttagcgttgggataaaccatttgggccactttcttctttcaagattgttgattgatgacttgaagaactccgattatccatcaaaacgtctcatcattgttggatccataaccggtctgtagtctcctcataagaagaatgctttatgtacttactacttactctaaaccctaaatctgaaatcttattcgttttgtttcttattgagcaggaaacactaatacactggctggtaatgtacctccaaaggctaatcttggtgatttgaggggactagcaggcgggttgaacgggctaaacagctcggcgatgatagatggaggagattttgttggcgcaaaggcgtataaagatagcaaagtctgcaacatgttgacaatgcaggagtttcataggcgtttccatgaagacaccggcataacttttgcttccctttaccccggttgtattgcaacgactggtttggtcagagagcat

SEQ ID NO: 13126 - DNA, 627 bp, Arabidopsis thaliana
ccaggtggaccaatgcccggtccacctcaacacatgtacgtaggccaaaacggagcaagtatggtcccgtcccagcccattggatatggattccagcctcagttcatgcccgggatgcgtccaggttctggcccgggcaacttcatcgtgccttatccgcttcaaagacaacctcagaccggtcctcgtatgggattcaggcgtggtgctactaacgtgcaacaacacatccaacaacaacaagtatgttactaaactgagtctgtttatagttttcaacaatcatgaaactgagttggattgaatattgacagcttatgcaccgtaacccgtccccgggaatgagatatatgaacggtgcgagtaacgggaggaacggaatggattcgagtgttcctcaaggaatcttacctcctatcattcctttgccaatagatgcttcttcgatctctcaccagaaagctcctctccttccaatctctaagctcacttcttccttagcttctgctagtccagctgatcgcactcgggtttgcctcttttccttccatctcagctaaacatttctttgttttgcgttttcttttgcatttggtgtataacttttgaatggtctcaagcagggga

SEQ ID NO: 13127 - DNA, 897 bp, Arabidopsis thaliana
ctcttatgggttcatggaccatgctgtgaatgatcatagtagacatcgcgttagtgctatgcttgaagctggagctaaaatgggtctcactgtttgtagaacatgggcttttaatgatggaggctacaatgctcttcagatctctcctggtagattcgatgaacgagttttcaaggtatctttttgccgacatatttagtcttcgttcaacttattttaatcagaatgtcaacgaagatgataagatatagactagtaggggaatgcatcatccattaatatctctcttcctgagcagttcaactacttacttcttcctgcatttgttatcgtttgcaatgcatatttcaaggcttattgttcattcagtttgatttttacttatcctgttctcagtctgaagcttggacaatgttcatcgttagccactttatgtgttcggtctccttataatctgatctcctctctctctcttaacaaagtttatattaatgtggtcaggccttagatcatgtaatcgcagaggccaaaacacatggtgttaggttgcttctgagcttagtgaataacttacaagcttatggagggaaaactcagtacgtcaattgggcatggcaggaaggtgtaggcctcagctcatccaatgattccttcttctttgacccatctatccgcagatacttcaagaattatctcacggtatgttttttttaatcttatttcttttctatgtgaagatggatgtgttagtcttgatcatcatagttgaattagatactgaattcagaaactttgttctcgcttgaccggtagacttggataagtttcgcacaaaagcttttcttcacttataggctttgatttttcatggttgtgtaattgatgttgagcttgtaa

SEQ ID NO: 13128 - DNA, 668 bp, Arabidopsis thaliana
ggtggcaacggtttttttccggaaactctccggtggtaagtacccgatagtcccaccgatccgagtcgaatccgcgactcggaactggtggttacggaaggaagaaacagagtcgtaactcgaatcatgctctgtttcatcaatcttgtgttctaaccaccgagctaaaccaaaatctccgagtttagcgttaaactcagaatccaacataacgttactcgtcttcacatctctgtgaatgatctgagtctctaactgctcgtggaggtagaacaacgcggcggcgagtcctttgacgattttacccctccgatcccaatccaacggtttaaaatcggagttaacttccggtcgtcggaaaagcacacgatctaagctccggttaggcatgtaatcgtaaacaagaagcaactcgtcttcgtgtagacaccaacctcttaacttcacaagatttcgatggcggacgtgagccaccgcaacaagctccgccgcgaaagttttctcgaattgttctcctttcttctccgccaagcatttaacagccacggtggttccgtcgctcggtaacaacgccttgtaaacgcggccgaaaccgccgcttccgaggatcagttcgtcgctgaaaccattagttccgatataaagctcagagtaccaaagattcttgg

SEQ ID NO: 13129 - DNA, 571 bp, Arabidopsis thaliana columbia
tcgaataagccataaagatggcatctccttttggaacttcaataaacatgtctccggagacatgcttgactcctatcattagtattagtcaaaccatacaaaagatttaggaggtacattagttagtaatactagcacagcaaatatactaagtatagttttgtacctggataaaaaggagcttgggttaaaacttgagctaagtcgaaattaacacctttgatatgaggatacttggaagtgatgagacctaatatggtgccgatacctcctcctacatccaccaaagtgttaacatcttcaaatcctctgtattcttctagaaccttcttcatgaccattgtggaagattccgacattgcgcggtgaaacaacttagagaactggtcatccgaactaatatattcgaaaagtctcatgtcgtgggcagagctgaatgcatcttttccttctagtatcacatccttgagatttgtcctatatatggaattttttcaaaaaaaatatcttcacatgttcatttacgttttatgttcactaccatgttttgagaatgacttggctatggagc

SEQ ID NO: 13130 - DNA, 1056 bp, Arabidopsis thaliana columbia
agagaaaacacttgcataagataaaaatgaatcgaagaaatacaagcgtatgacaattgattagcacatgtttagtaaagtgttgttgttgaagttaacgaacgttaccaatgaaatctgatctgagggattccacaagtgcattctacttgagaaagagcagagaagtttctacatcctgaatattcctgatttaacatctctgctgtggaaggaattcgcaagacaagtgtgtggaaggttagaagaaactacacaaacgaccaaaaacatggtacataagaaataacgagaaagaccacagaagtttctaccttgcggggatggcttgagcaagtaaagttgacagaaaaccacttcctgtgcccgactcaagaatcacgggcaggggcaatctcaaggtagactagaaagctactactacccgccgcaatgtaaagaatctgagtcttgtgacctgtttccatatgacccaacatgccacatgtactgcatacaaatttacccttgttgctttggattttgggccagcgaaattacacgggtacaaaataagaaaagcccatatcgaagacatgttatccaagttttctgatattgaacatgcagtaattttccacacattgtagtccaaatgggtcaaagggcgtcctttgttttgctcaaaacacttgggttatcgaaattgtagacgtgtgttttcaatgttgcagggcaggttggtgcgaggcatgtcattattcattagatgagtccttataagagtcttgaagaactctgggacggtgagatatgaggcttagctgatttgatcactgtatgtgccaaatcattaaccgatttagatcaatttttagtaatgctaccagttttcaataattagttctgctacgttttaaatgttcttctcaaaagatacattgataccccagttatattcgatactgaaaccatattacaaactcattttaataaattgcatgcaagaaaagatggtacacaataaatttattacatagacattattttcaaagatcaaacgcgtttttagagaga

SEQ ID NO: 13131 - DNA, 883 bp, Arabidopsis thaliana
tcaaacagagtgctaccttagctcttggtccgggaagttcgggaagtaatcctccatgggctaataatgcagggaatggtgcaagtgcgcatcctggcttagggtcaactccgactaaacccccctccaaagaatatgacgaaacaaatttgtacattgggttcttacctccgatgctggaggacgatggtttgattaatctcttttcatcctttggtgaaattgtgatggcaaaggtaatcaaggaccgtgtgactgggctgagcaaaggctatggttttgtgaagtacgctgatgtacagatggctaatactgctgttcaggcaatgaatggctatcgtttcgaaggccgaacactcgctgtcaggattgcaggcaaatcgccaccgcctattgcacctccaggacctccagctcctcaaccaccaactcaaggtatcctccctcaaaccagccgcctggtgcctatccatctcaacagtatgccactggtggtattcaacagttccagttccttgggtcctcctgttccttcctattctccatatgctcttccccctcctcgtcctggttcttaccatcctgtccatggtcaacatatgcctccttatggaatgcaatacccaccaccaccacctcatgtgacacaagcacctccacctggcactactcaaaacccatcttctagtgaaccaccagcaaagcttcccaccaggagtacaagctgatagtggtgctgctacgtcgtctataccaccaaatgtctatggtagctcagtcacggctatgcctggacagcctccatatatgagttatccgtcttactacaatgctgttccccctccaacacctcctgcaccggcctcgtctactgatcattccc

SEQ ID NO: 13132 - DNA, 624 bp, Arabidopsis thaliana columbia
attcaccgtatccttcatgaactggtcaatcagatagccattagctccatgaatctcaactccatcaaaacctgcaacaacaaggacacatataagaatcttgaatggtttcagcttcttgaattccaaatccaaaatgtgcttaccagcttccatagcatttcttgcagcaagcctaaaatcattgacaatgccggggatttcttcgataccaagccgtcttggaggggtaaagagagcttcatcgatgccattagagcgaatttgaggcatcaatggcttatccgaacaagagataggagcttttccatttggctgaaacccgctattagaaacgcggccaacatgccagatctgacagaagaagataccacctttggcatgtacagcatcaacgattggcttccatgcctccacatgctctttagtccatatcccaggagtatcttgatatcttcaagatcaaatcacacacatgtggtaaggatcagatcaaaaacccacaaataaaaacgtaaactttaatcacaaggaagggtttttgagttacccttgagctgtatctgaacgccagtggcttcagtgatgagaaacctcctggagtcgtctctgagagtaatatat

SEQ ID NO: 13133 - DNA, 740 bp, Arabidopsis thaliana
agccagtaccctaaaccattgattttccatgatggccgtctcgcgatctaaccaaccctaatgaacactttggtcttgttcatgtggggtcctttcgcagccgcagccgcagcagccagactcttcgtctctctttgcatcccttactctttatcaatcccgatcctcgccttttccggttgcagactaaccgtcactaacgactacgtttcatctcaaaaacaaaaaccaagtcaacgcaaaggttgtctctttgtttgtaaccataggactttattggaccctctctatgttgcattcgctttgagaaagaaaaacatcaaaactgtaacgtatagtttgagtagggtatctgagattttggctccgatcaagacggtgagactgacccgtgatcgggtgagcgacggtcaagccatggagaaattgttaaccgaaggagatctcgttgtttgtcctgaaggaaccacttgtagagaaccttacctgcttaggtttagccctttgttcaccgaggttagtgatgtcatcgttcccgtggctgtgacggtacacctgaccttcttctacggtacaacggcgagtggtcttaaggcacttgacccgcttttcttcctcttggatccttatcctacctacaccatccaatttctcgaccctgtgtcctgtgccacgtgccaagactcctgatggaaagttgaagtttgaggtgtccatcgatgttcagagtgatattggga

SEQ ID NO: 13134 - DNA, 400 bp, Arabidopsis thaliana columbia
gaatgtatcggaaatgtagaaaataggtaggagaaatagcagaaagtgtctggatagcggtaacattttacgaatctttaccccgctgtcgatttttgactcattggggcataaaaataagtattacgtttagacaatgtttgttctagcgtctctcaagaagagtcgggcctgacaatgcttatcgtttggcaagagtagatattgttgaccacacgtaatgttcaaccttgtagaaggagtcagcgatgccgtatagaacgaaaagcgatctgccggaaagcgtctagcacgtgctaccgtctcatgcccaggatagcgataaataagcgtgcagcagcgcatgggatcagtataccgatagtagaaagatcggcgtgatgacgccagcgcgaagaaa

SEQ ID NO: 13135 - DNA, 483 bp, Arabidopsis thaliana columbia
gtctttggcctaactacaaaaccggtggatggccgcaaaattgtaatcctgacagtcgatttgatgatttacgggtttgtttttaacttataacacaatagtttttgtattttgggacttcggaaattattaaccacaagaaaagaatcgtaaataactaatgagaatcgaaaacttttataaaggtttctgatctgatgagcgatttacaaagagaatggccaacgttgtcgtgtccgagcaatgatggtatgaagttttggacacatgagtgggagaaacacggtacgtgcgctgagtccgagcttgaccaacacgattacttcgaagctggtctcaagctcaaacagaaagctaatctccttcatgcccttaccaatgctggtacaatattcacttgttttgcccttcattttgatctccattgttagttatgtataagtggatgttcttttcttattatattttgtgttgcatgatgta

SEQ ID NO: 13136 - DNA, 592 bp, Arabidopsis thaliana
ttaaaatgaaaaatatgttcatttgtgtctgtccttaattatatcatatcatatgaagcaaatttcaatatcattttttttggtttacgatcggaatattaaatgggagataagtatgaatgattttagattcaaaaaaaaaaaaaaaagaatgattatagatttttcttcctcgccatttagtcaagtcttcgttcactcctacttcaaagcaaacataatgctttccaaaatgcattattttgatggtaagagagcaatcacaaaagcaatttttctgtatggctctatggtggggctggaagtggagatgtgggaatgtttttggcggcaatggtagatgtcggaatagagttaagtttctgaaggatcttgccaaggaagtgctggattcctatgcggggctcagagatgcacaatcgggtaccgcaagggtgcgagagcttgattaagtgggtgtttccggggagtgggtagctgaaaattaactctgacagggcgtcacaggagaacccgggtaaagctgcaccagggggcgtgatacgagacgagtcgggaagctagatagtgggttttgcactcatataggcat

SEQ ID NO: 13137 - DNA, 1343 bp, Arabidopsis thaliana
ttctacaacgaaaagtaacactaatatctatacccgaactttggtggagaaaaccatagagataaacatttcatgattgttagtgatttttgtttaagtataaaaatatgtgaaacatacgatgaaaagactgaaatagtataaattacatctaacaaccaataaatcaggagaaaaaaagaataacatatattggagggtgatgagtgatgatggatccgcatgtagtagatgtaagtcgtcgtcattgcccagcattcactactgttgcgtttcccatattcacttgtaaacttatattctgtttgagtggcactgcaaccataaataaatatttatatacattagttaattcaaataaaaattatagtagaaattcaaattaataagatttattgcaataagtttataacaataaaactaaaaggagaatacgaacattctgattccgggtggcgcctaggtttgatgaaatatttccagacgccccaaccaccagctccaagacttaacaaagtcggtaatgaaattccaagaggtaaagctaagttgctgctgcttttctcctctcctgatttacctgaagaatcttcatacacaaacacaaacgtaccacatattagactcgaaccaacgatctcatatcatttgataacaataataacatgattattaacatccaaagcttcataaatgttttttttttatatataaatgatattgttatacgacaaaaactttgaaaataatctctagaaattgtcccaaactatattaagtgactattcttctaaaagtcctaatatggaaaaaaacatcttaattaaaaaaaatattgagaactgatatgcctgcagatttttcatcttcactagctttgttggttcctccatctccattattgcttcctcctaaaatatcgttcaaacgaagaaaagtgacttataattttagttttcagtttaagtcaattttcttacggagctagtaatttggagagcatgtttttgaccaatctatctagaaaaatgacggctcaaagtcggactaaaccgcctcctagtcggctatgttttacaatgaaagtttttggttaaacacttcccattcttctaacctttaagcctagttatgatcttgcatgttgataaaaggcagttgatcgtcaataactagaagctagaatcttgcatcctaattaatatacccacacgagttcctccctttcaattcagtatccatatattttaaagaaccactagagtagagttagttatatatatagatttatatattaatatatagattgatatcttttctacaaaacaaaccgttttcttatt

SEQ ID NO: 13138 - DNA, 559 bp, Arabidopsis thaliana columbia
gttttatttaaaattgccgttcttactgaagtcattaacaaaaaatgggaaaaaattgggaagtgaaaaaaaatagtagtcttattttggttagtaaaaaggtttgtttttcatcatcatcttcaatcactttagaagttaggaccagctgcaagaatctcttcagtcaattttccatcatcaccaatcttatgacttgtgaatgtctcaaaattgcttttaaacaaaccagccaatttcaacaatgtgtcctcataagccattttatcaggccactgcacaagacacacataaccaaagatgtcaaataaaggagttaatttcattaataaaaagtatatatgttttctgctgtctatctgacttactgcattaataggttccagtatctcagaaggaactccttctacttcatttggaatctccaaaccaaaaatatctgttttacggtaacttgcattcagtagactacccgaatgtatagcatcgattatctttcgtgtatacgccaacttgattcggcttccagttccgtagctgcatattttatcccaatttt

SEQ ID NO: 13139 - DNA, 898 bp, Arabidopsis thaliana columbia
tctgcttggactgtacaatgttctacagaagtataaacatgaagctcaagtgcttaaccatataatttgtctcatctctaagaatttttccgagtcaagtgtacagccttatccttgttgttattggttgtctgcatagtgggcatgttgtgataacaactccgcattccttgcatgtctttatttgaaataaaaagtatcggagatgtcacaaaatcgatctagaagcagtacagttcatagaacaagtaagagtataattgttcctttgaaattttcacataccgtgtgaccgcagctaaaagccatgtcctttggattcgtcaagcaaatcgggcatacctttttgaaaaacaaaaggaatgtaaatctcagtatcagagaaactgagtatactcattgacaaaagaacagaaacaaaggcagaaataatagagtatttaccggcactgtggaaggagcgagtctgtcacttttctctgcagtttctgtcatctgatttggcaccgatctaacagcattgtcacgctctataacctctggtggtggcgggagtggcttgtggtgctgatgggaactgcgcactggttttctactgttcataagcacaatcaaaggttggtttagttggcaaagaatctaatgcaataagaccataaacagtgagtgatacaagtagtttccaacggtaaattttgtattgcatttacttgagacttaatgtagccttgtatctgaaaagggatctccatgagagctgcgagtgcgaaagcagcctccttcttagccgcatctttgtgctctgacattatcttcgtgaagtttacaaactgtggaacaaaacacagtttttcatgattcatgtttcaggaacaaaacagagctattcagggtttta

SEQ ID NO: 13140 - DNA, 937 bp, Arabidopsis thaliana
cgcttgcacgccactctactttgtgtgggagaagctaatagggatgcatgagtgcagaagcatgtgtaaacgagccgctgcgaggctccctgtcgttatacccatttggtttcttgctatcatattcccgttctttggtcccattaactcaaccgtaggatctcttctcgtcagcttcactgtctacatcatcccagcactagctcacatcttcaccttccgctcatccgccgcacgtgaaaacgctgtggagcagccaccaaggtttctaggacgatggactggggcattcacgatcaatgccttcatagttgtgtgggtgttcattgttggattcgggttcggtggttgggctagtatgatcaattttgtacaccagattgacacctttggcctcttcaccaaatgctaccaatgcccaccaccggttatggtctcacctcctccaatcagccatcctcacttcaatcacactcacggcctttgaattttaagcatcaaatctttagtaccggcccaaaagtgtccctagctgccacgaaagttggcgtttttccacggatcagaaaaagacgagatttgggtttttcttagatctaccaagcccgtagtgtgtttgggtgtttgtttagcatctaaagttggttggtctgtttttattgtatttcatgtttgggaattaaagaaaaaaaaaaaaaactttaggagttaatgccatatctttcatcaagaacaatcatttccaaatttcaaggattagttcggaagttatggttaaaagattgtatgaaggcttgaagtagaggaagaagatgagcaaaagttatgataaacatgcaattagaaccaatccagtttctttctcaaatcacaaggaaccataaccattacgaccacaagtcctaattaattaattccgaaaactccattgaagaga

SEQ ID NO: 13141 - DNA, 540 bp, Arabidopsis thaliana
ctcgacatgagaaaagcttccattgacttctccatggagatccaacatcacacaatgcgaaaaccgagctagacattaacacaggacttctaggtttcgatggtaaattcgacgagaatttgagccattggttagcaactacagtacctgagtaatacaacgcagcgagctcagtgagcaccatgactcgattcaccgaatcaacaagaacagtaccatggcgtgaccaagctgagccaagctgaggcaaaaccttgaactgccgagttaacggattacaagcgacgagcgatttgctagattcagctaaatcaatcgaatctccccaaagatagatcaatccgcttgaagaagctacaggctgaggagatcggaaagggaggaaatcgagattgaatctgaaccattgattctgctctggatcatatacatggatgtacggtcggataatcgttgcgtgtcagtttccgctgtgacggtgactgtggtggtgatgaggaggtcggagaacgagtagatcaacggcggacgagttgagat

SEQ ID NO: 13142 - DNA, 763 bp, Arabidopsis thaliana columbia
ttaagttacataaatcataatgaaaagtagatgaaacgtgtcgggtgtcgcacggaaacttatctaaacataaggaagaagaatataagatcgcatggcatgaaaatgttaaatccatgtgagaaaactaaaatcagcaatctcaaccgaaaccgcaatcttataatagacagaaagtgataagaaatgtgaatgatgatatataatcttctttttcattttctgcagacggtagttactacattaggaaacaacgatgtgatggtgatattagacaaccacctaactaaaccagggtggtgctgcgccaacgacgatggtaacggtttcttcggtgaccagttcttcgatcctaccgtatgggttgccgctttaaagaaaatggctgcgaccttcaacggtgtctctaatgttgttggcatgagtctaaggaatgaacttagagggcctaaacaaaacgttaacgattggttcaagtacggtaacgttattatttagtctataatgcgcatatatacatgcatatattttagtcatagagtttaatgtacgtaggtatatgcaacaaggagcggaacgagttcattcagcaaacaacaaggtacttgtaatcctctccggtctcagcttcgacgctgatctctcctttgttaggtctcgacccgtaaagctatccttcaccggaaaactcgtcttcgagctccattggtattctttcagtgacggaaactcgtgggctgcgaataaccctaacgatatatgt

SEQ ID NO: 13143 - DNA, 944 bp, Arabidopsis thaliana
aatgtcaggcatttgatcaaagtacaagtccgccctaacattgttctcagtgctgagaaagaacttggcattgttgctggtcttcaggacagggttgctcaggtctatggtggtcttgttcacatggtcagtgtctcccctcctatctcatacattgccgttggttccatcggttttatgactttttatcatcttcttcactttgcaggattttagcaaggagcacatggataaattggggcatgggatttacactcctatggatatcagtctcctccctcctctgcatctcatctatgctgagaatccgagcgactcagggaaggtacttacacttattcaatgattctggtttatgcatcaatcaagtgaaattcctcaaaaagcatttatgacactagaactcagatctttggggcataactcagtagaatttagaagtatctctctgttagatgtttcataatattagcattgccttctaatgcaggtacatagtatggttcggcaaagatggttagacggtgatgagtttataatctcatcaatgaaagaagtcggaagtctagcagaagaaggtcgaactgcattactcaacaaggaccattccaaacttgtggaactcatgaaccttaatttcgacattcggaggtaaatataattccagacaaaactcgaacctatacacaacttaagattaaactccaagctcacatgatgttgaaatagatgggaatacacacatataatagtgatgtctttttttcccgataggcggatgtttggggatgaatgcttaggagcaatgaacatagagatggtggaagtagcaaggagggttggtgcagcctcaaagttcactggaagtggaggagcagtggtggttttctgcctgaaggtccactcaggtgaacttctggaagaagaatgcaggaaagcgggat

SEQ ID NO: 13144 - DNA, 519 bp, Arabidopsis thaliana
cgttggttacttgcgagatcatctgatcggaactgttcgcttcctcgtgagtaacttcctcccaaccgccgccgtgaaagttccatctctcgtcgcgcttcagatccgtcgtccttctggaaagtttcacggcgttcttaacatcgcggctatggtgatggatgcttctgaacttccagctgatttcttcaagtcggttcaagagatccgtcggagtcggaaaatgagaaagtctagatctgcggttagttcgtcggagaacggttccgctgacgacggtgagagttcgaaagagaattcggtttgcggatcggttaatttctccgacgacggtactgactcgacggcgtcttctccgatgccgtctcctctcagagactggaacgctgttcgaaatttggcgggaaagaatcacgtgcgatcgtcatcggacggcggaggattgatgtgctgtttcttgatgaaatcgtcgggcatgttaccaccaagaagaaaaatgacggacggctgagatctgtt

SEQ ID NO: 13145 - DNA, 704 bp, Arabidopsis thaliana
cttccaccatcattgaatgcctagcaacatcaaaatgtaacaacaactatctcagaatatcccaaagagaacatgtgctatgatacgagataaaactaactaaaacttatgaacaacatgctgccaaatgttctttaatttctccggtgagagcggtttttgtaggaactcaactgcaccaagctgaaaaacacttatcaattctcatcatcacataaccaacattcttatacatctacgcaaatgcaagtcgcaatcacttaccgctatgcatttcattgtagtagtgatgcaatgatcggttgaaatcactgtaaagacataaaagaatccacattttaacaatcttttcgtattgtaaagatttgtgaaaaaataaaaagggtacttgtaaaaggttcacaaacttatagtaggaagaacgtctttggcagcctcaagaaacttgaaactctcactctcagcgctcatattcacctcgacgatggcaatgtggaagctctccgggttcttgacaaccgcagagagtgcttcagtttcatcggtgaatgtagtaactgcaagaaagttccaaaaaagcaaaaattgaatctataatcttaacattatgtgtttgatagtcaaaacacacagaaatccataaacagtttcgagataatttggatcctggttcataaatataaactaacaaaagtccaaaacat

SEQ ID NO: 13146 - DNA, 581 bp, Arabidopsis thaliana
taccttttggttctttacaaaacaaaatgttcatcttctcttgtgtctttctccgatctaagagagttttaaatttgcgtcccacacagctttactaccttcaccacacatcacatgaaccatccacattctatcgactgatctgcatactccactacacttccagtcaaatgtagccacacacatttcgccagcctctgccctcatttcacagtctttgggaaagagagaaataaaaggagagtaagaatatgagaaaaactcaattatctttttttttttactaacttcttgaggcatattaaaaaaaggaagaagaaattttacctggaggagtaccacaacagaaattacgatcatcgatttgctcaacctcaagaccgataaaccatgacccgagtgtcacatcttcatttgcatacttatgcaaaattggcctgcgaagtcaaacatcaaatgttatgtttggttgatactcatttcccttggtaaaccatatcttaccttgtcgaaaatccaaaaaccataaagttggtcacttactggttgttagatatgtatgtggcaagatcctttgatat

SEQ ID NO: 13147 - DNA, 540 bp, Arabidopsis thaliana
caatgtttgcttgtgtggtttctttgttttggtagattaggttgtgatgagttttttttttgtttctaactagctgcaaggttcaggactctgctttgatatatcaccaacattttttcacccgtgatctaattattagttgaaaaatctatcaaatagatttcacacagaagaacatagataggcattgtacttgtactgatgttgatgggatagagtgttgcatatgtgatttaactatatggttctacgtcatgttttagtggcgacttagacctttgattgtcaatcttattttttacaagtgaactattattaccatctgttgttctaaatcataagtattaatatatgtggctacattgcagcaactatctctgaagggttttgctggagacacagctaaggctcatgcaaagacttcaatgattgctggtgaaggagtcagtaacattagaaccgtagcagctttcaatgcacagagcaagattctctctttgttctgtcatgagcttcgtgtacctcagaaaagaagcttat

SEQ ID NO: 13148 - DNA, 435 bp, Arabidopsis thaliana
gagtcaacaaagctttcaagaacatctcactatacaacaacgtcgcatctacttcactagcatcaattccagagctaggccaaccagtctccgccacaatcaccggaagattctcatgacccataacagccatagagctaatcacagcatcaagcatcatatcaaaaagattccggtatcttactccggtggtcagatcatctctgaaattgaacgggaactcttcaaaaagagcaaatccaatcggaatcgagaagctagaccgatacatattgtagggatagagattgatcaagaaagacgaattcgttctttcgaggaattgcaaaatcggtctgatgataacttctccgtcaggttgttgaaactgcgccgacgaacgtggaaatgccgtgggtactgatgttgatgaaagagaacgtcgttgatacagag

SEQ ID NO: 13149 - DNA, 894 bp, Arabidopsis thaliana
ctcttccttggtatgtaatatgttcggtgacagttgagactcaacttcttcatcccttatctttctcaaaacccttttcctacaactctctgagctattaagaattaagcttttgaatgaaaagcttcaagatccaaccatggaggagacattcgagtccatcttcccaaaggaccatcgaaaaaacacgttgttctccattatatttttcaccaaaatcggcctcggtggaattactcaaacactaaggcagctcatcgccaagcgcaaggaaactgattcagaggacgaattaagagatgagatggtgatgaagcgtagaagaaaaagaggttgatcagtagcatctatttaaagctctcttgaattgttagtctatatttggcttgatgatcgaacaaagttacagaatacttgttttattgggttgatgatctaatttcgaagctgtcttctatttgcatacataatcttccttttcgtatctgatgctttgtttaagaccaatttatgtcagagcaagaagagcataaacttgtcagcgtcacactaaatcgaaaacatcacagtgaagtttagatgcctttgttataaactaaaacacacaaaccaaattataattataaacccttagtttgatgatgtatgataaaaatgagtttcacaaattacagggattcatcactatacaaaattaacaaatgcaactctatttcaatacacaactttcttattactcaacagaacagttccttaagaatcaaacactatatgaatctcatatgtaagaaaccttcttacaaaagccaaaaccttaatataagaaagcaatgataaagatttagctatacgttgtatgtatgtgtgtgcttaaatattcaggtccaaggagga

SEQ ID NO: 13150 - DNA, 898 bp, Arabidopsis thaliana
atcacgaactctcagcaaaaaccaagatattcttttccactgcagtagccaaatgggatgcagagttctatatcaaggtagatgatgatgttcacgtcaatctcggtaagaaaacctgcttctcgattcttttgtttgcatcaatctccttcaatgggagcaatgaaaaactttgtctttcaggtatgcttgcttccacacttgcccgtcaccgctcaaagccgagggtttatattggttgtatgaagtcagggcctgttcttgctcagaagtaattccatttgcttgagtcaagcttaaagtttctctggttttactggttagattattgttgagttagtttattgaactgtttcaggacagtaaagtaccatgaacctgagtattggaaatttggagaggatggtaacaaatactttcgacatgctacaggacagatctatgccatctccaaggatcttgctaattacatatccatcaaccagtacgtacttctgcatccttttcataaagagccttccatcaaatgtttgtcctaaaaggtttacaactttgtatgcaggccaattttgcataagtatgccaatgaagatgtgtctttagggtcatggtttatcggtcttgaggttgaacatattgatgaccgcaacttctgttgtgggactcctccaggtaaagctcaataacatcacacaaagcaatcttcctcttatctctcttgcttctaatggttatgttccattggattcacatactcacagattgtagatggaaggcagaggcgggcgatgtttgtgtggcctcattcgaatggagctgtagtgggatttgcaagtccgtagagagaatgaagatagtgcatgaagtttgtagtgaaggagaaggagctgtttggaat

SEQ ID NO: 13151 - DNA, 572 bp, Arabidopsis thaliana
caccaccacctgcaaaacaaggaagcgatgcatccgcggttgctacagataagaagccgaaagcgcccaagctaccccttctcatgccggggatgattgctatagtcaagaaccagaacagtccgtatcacatgtattgtggaattgtgcagaggatcactgatggaaaagctggtgtcttgttcgaaggaggaaactgggaccgtctcattactttcaggcttgaagagcttgaacgaagagaaaaaggtccaccgggtaagaatccaaagtcttgtattctcgagcctcttatcgaacagatgcaaaaggaagaggcagcaccataagtgatcttctcttctctgtatgtaagttcctgtgaatgtatatgtaacgtacctttgcgttttaggctacaatatttctgactggttctaaaagagcttcatcatgtgatataaaaaaaagaataaacgatgaatttcaatcataaagcacttaataatagagatcaaatgcactcaatcaatgatgaatcagtatagaagttaaaactgcaatggagtagttttattgttatcattggttgt

SEQ ID NO: 13152 - DNA, 1119 bp, Arabidopsis thaliana
gaagagaactcttttgaacacatgggaatacacttgggagagattggtattgttctctttccttggtttctgtggttaagtttattcctaagttgtggctatgcagctataactatttcaagtcctttgacattgggacaaactctgagttcccctggtggattttatgagttaggattcttcagtcctaacaactctcagaatcagtatgtagggatctggttcaagaaaattacaccacgggtggttgtgtgggtggctaacagagaaaagccgatcacaacccctgtggcaaatcttactatcagcagaaatggtagtcttattttgctagacagtagtaaaaatgttgtttggtcaaccagaagaccttccatatctaataagtgtcatgcaaagctcttagatacaggaaatcttgtcatagtagatgatgtttcagaaaatcttttgtggcaaagttttgagaatcctggtgatactatgctgccttactcatcgctgatgtacaaccttgccactggggagaagcgagtattatcttcgtggaaaagccacactgatccatcccctggtgatttcgtagttcgactaacaccacaagtgccagcacagatcgttactatgagaggctcatcggtttataagagaagcggtccatgggctaagaccggtttcactggcgtaccactaatggatgaatcatacacaagtcctttcagcctttcccaagatgtaggaaatggaacagggctcttctcttatttacagagaagttctgaacttacacgagttatcataacatcagagggatatctaaagacttttcggtacaatgggacaggctgggttctggactttatcactccagcaaatttatgtgatttgtatggtgcatgtggaccttttgggctgtgtgtgacgtccaatcccacaaagtgtaaatgcatgaaagggtttgtaccaaaatacaaggaggagtggaagcgcgggaacatgacttctggatgtatgcgacgtacagaattatcttgtcaggcaaacttatctacaaagacacaaggaaaaggtgtagacgtcttctatcgtctggccaatgtaaagcctccggatctctac

SEQ ID NO: 13153 - DNA, 1820 bp, Arabidopsis thaliana
tcatccaaatcggttgaatctgagaccgataatggtatgggttcaacagtggcgagattcgatttagacgcgaatgagaaaagggttcgagatactgttaccgaaggcttagggtttaagaaactgaaatgcgaagaagagagagagaaagaaggtttcgcgaggattgagagatggaatcttggaagatgcgctaaaatcatatctgatcgattctcttctaagtaatagtcttatgagctttttagttctctttagattctgtgagcagccatggatgtaggactgaacttacggatgcggaggaggtcggggaaacaatatccacatcaaaacgctacgttttgatggtggtaatctggacgatgaactttccttatattacaatttgcccgctctattttaacgattgtatcatttcgccactatcttctaattagagagtaaatgggtaaattagaaagaaaacaaaaagtataaggagtatatagcaaaatcgggtcgttggcatctccttccacctctccaagcacggacgagacttcgaccagtgaaccaaaatctctctcaaatttatcaccccgtgcttctgatcacggtgggattctctccgatcggtgacatatcgtggttcatactccggtggatctcacggcgtaataatttatcatatctgaatcgcaatcttattaaccatggctcctccggccgcttcacagcgttatccgtcaccgtcgcaaccttcagggtaacttatgcttctatccatcctctctcgatcaatagcactgaattcaccttacattttttagataattagctgggatcaatctttatgattcgatcatctcttttcatgcgtggtccgtcagctcattacttctcgaattttatgatctgtattattcctatacgaaatccagaaattcagaagctctcatttagcagatctagttttagtgcctagttttaccagtccgagctaagttatgtcaaaaagctaatgtggaatcagaagaagccatttagtttgaattttccccacttagaatctgattcctaaatgcagtgagtatggtcgataatatctgatctctatttggtcaaatgaagcatgaattgaaaatagaaattgttatttatcaggaaaagcgaagtgtcagatctgaaaacccagcttcgccagctagctggaagcagagctccaggagttgatgattccaaacgtgacctctacaagaaagtaatatcgtacatgactattggcattgacgtctcatctgtatttggagagatggtcatgtgctcggcaacatcagacattgtcctgaagaagatgtgttatctttacgttggaaactatgcaaagggcaatcctgatctttctcttttgacgattaattttctgcaaagggattgcaaagatgaggaccctatgatccgtgggcttgcattgaggagcttgtgttctttacgagtgccaaaccttgtggagtatctggttggtcccttggggagcgggctcaaggacaataatagctatgttagaactatcgctgttactggagtactaaagctttatcacatctcaccctcaacatgcattgatgccgattttcctgcaacgttgaaaagtttgatgcttcatgattcagatgctcaggttaattttgttttgtatgtataatgttttgttggatggaattggacttgactccctagcatattacttgttttgtataattattaatgttttgatataaaatatattgtcaggtagttccaattgcctgcatgacttcaagaaatttggagtttag

SEQ ID NO: 13154 - DNA, 822 bp, Arabidopsis thaliana
atcaaacaaactgggatacagtcaaagaacaggttactagagagatccaagagttcttttcctctagggtcctgccctgcaacatcaataatacacatgttagacttattcccaaaatcaaaagccctaaaagaatgttagaatacagaccaatagcgctctgctcagtgtattacaagatcattgctaaactcctcactaagagactccaacctattcttgctgcagtcatctcggagaatcaaagtgcctttgttgctcaaagagcaattgcagacaatgtgctaatcacccacgaggttctccattatctacatacatccggagctaaaaaacaatgctacatggccgtaaagacggacatgagtaaacatatgacagaatagaatgggtttttgttagaatagtgctggaaaagctgggtttccaccacgtttggattgggtggattatgcaggtatcacttcagtctcttattcttaccagctcaatggatctgctcaaggacttattactccacagagaggtctgcgccaaggagacccactgtctccatatgtcttcatcctttgtagcgaagtcctgtcaggtctatgtatcaaagctcaacgtgaaaacaaccttacaggaattaaagtgggaaagaagagccccagattgaatcacatgctgtttgcagacgacactatgttcttctgcaaatctgatgcaaaagagtgcactgcattgctagacattctgcacaagtatgaggttgcttcgggccaaaagatcaattcacaaaagtctgcagtgactttctctgcaaaaacacaagctact

SEQ ID NO: 13155 - DNA, 302 bp, Arabidopsis thaliana columbia
caaaaactgctacacactaattctctaaaatacaagcaattgttgagtactctgttcttgtttttgcaaagaacatctagcactagagattgacattaacaaagccttttctgtatctccatccattcgtcttttgatcaatttgatgagatactccaaaaaaaccgaatcgaatggtaatgtgattggtccaccggttgggaggccaaactcttcttcagatatctccaaaatctcttgaaatacagagttgcttaggtagcttatcggaaaagcaaagcgtgtgttgtccgccgtgtaac

SEQ ID NO: 13156 - DNA, 579 bp, Arabidopsis thaliana
gctctttccaatgtcaacgtctctatagttcaaaaacgcctctcttggattctttgacacgtaagggctcattgcctcgaacaatctttctgtctggctcaagcaatctttagccactgcttcacctggcacgaaccagtttgctgcgtactgaatcttgaacatgtttcctgctctgtgagggaaagcggtctcggtcgatggaatctcactcatcctccctccgtaaggtttaaaagccattgtgacgttctcgttctctgtcatgatcttgaatattgactctaaaccggttcgtgaaatcggtttttggacgtaatcggattttctcttgaggtagatttgcttttgtgggatccggtttagcatactcgttgttggtgctgtaccgggtgggataccgagccagaacagaaccgattcgatccatttcatttcaatacactctcttttgatcagaccaagctcagggaatttcgcgttcatgatttctagaagattcgatgagtttccgaggtacattcccatgaaagaaccttcacggttttgttgcttgagcctaaagttaatcttatgaca

SEQ ID NO: 13157 - DNA, 817 bp, Arabidopsis thaliana
agtaacggccgccagtgcacagcttggctccagctgcagctgctgcatcgattgtggaagggcctaagccgccgtccacctgatccaggagataggactcagtttaaggaaagatcaaacactgtctgaacttgtaggattgagatgacttacctcaatatcaagtgttgggtacttgttcctcaatgccctgacctatatcaagaataaagaaaactaaggttacgaggggatttcaataggcaaatgacattttgatttccagagttggaaacataaccttgtccatcatgctgggcatgaacttctggcctccaaatccaggctccacagtcatcacaagaaccatttcgaccggatttgtaccttcgacctgtcatagataggtcaagcacgcataataacccaatcgcactctggccaaacagcaatttcgataattcaataccagaggatagacttgttcaacaggtgttccaggctttagagccacacctggcctcatcccagcagccttaatcttcttcacaagttcttgccaattctctgaaagtaagcgaataatacaagtcgagatcataaagatgagaaaaagttgaaggatggtgtgggggaaacagctatctatatatataccttgggccacctcaacgtggaatgtgaaaccagacgccccagctttagccatctgatccacataatccatggggttcgtcaccattaagtggcaatcaagatatgcactgtgataaaagggaaagataaaacgttttcaaagacatcacttcacttgaagaacatgtcacatgttattaat

SEQ ID NO: 13158 - DNA, 916 bp, Arabidopsis thaliana
tttctgggccttacgaggcggtggagccgtagcttctgtgttgtcttagcttggaagatcaagctagttcctgtcccggagaaagttacagtctttaacgttgaaacaatcggaaacagaggagtaatccctaccgatcttgcagcgaaatggcaagagatcgccgacaagatcgataacgatttgttcataagattaacgttgagctcaagtaacaagacggtcaaggcttctttcatgggaatgtacttaggaaactccgagaagcttctagagattatgaacgccaaattcccggaactcggtctgaacaaaacagagtgcatagaaatgaaatggatcgaatcagttctgttctggcttagtatccaccgggtacagcaccaacatcggtcatgctaaaccgaatcccacaaaagcaaatctaccttaaaagaaaatccgattacgtgcagaaaccgatctcaaaacccggtctagaatcgatattcaagattctttcagagaacgagaacgtgtcgatggcttggaacccatacggcgggagaatgagcgagattccggcgacagagacggcgtttcctcaccgagcagggaacatgtttaagattcagtactcatctaactggttcgtgccaggtgaagaagcggctagcgattgcttgagccaaacggaaagagtgttcgaggcaatgagcccttacgtgtctaagaatccaagagaagcgtttttgaactacagagatattgacattgggaagaacttgaactcaacgtacgaggaaggtaaagtgtatggagttaagtattttaagaataacttcgagaggttggttcaggttaagactagagttgatccggacaacattttccggtacgagcagagcattccagtgcacgttagccgttagagaca

SEQ ID NO: 13159 - DNA, 1263 bp, Arabidopsis thaliana
gtgggttagattcgaaaaacaacacctatgaagatctatttcgaaactgtgaaatgcctcaaatgacatacttagctctccagtcagctaaaaagatgtaaagaagttcaatgtttgaaaccattacgatttgagaaactcacagtgaaaagttcagcagtgtattgctcttcagtggtcgttgctgcatctttgcaagagctgaggtcctttggatatgaagagtacaagtaaatctcagagtcatagagcataacacgataagatatgaggagataagtgttacaagccatacatacctcttgtaatgaaccgattttcgtttcgagctccctcaatctttccttatgccaatttaacgaactagagcactcaatataatttttctcaacctgatagaagaaggaataaggagaaaagaaaacagagagacaaatattagaatagaaatatgatattggccttacatctacaagctttgctgacatttcagattcaagatcagaatgccttctacggagttcagcgtaactgtcgactttggctgtcaactcctcatctagccatttggcatgcctttcagtgagttctttctcctgtttccatcaaaaaccatatgtcataaacaatgtaaaaggatcaacatattttattacatgacatcatacaaattcaggtatcaataaaatcaatcaaaatcatgagcaatcaaacataaatcttaaaatgcaatcaataatctgacctgagataaccgactacacatagcttgagaacgggccaattctgcggtggcttcagctagtcgggcttccttctccgaactagtatccgtcagcttaacctgagaaatagaacaagagttagggttacacatttgaaaaatgcctgtaacacattattagtaacaaaaatagggaaacactcacaattttatctaagtagctcttgatagtggaattcttctcgctaatctcggcatctttctgctccaataactccatcagttgcctcttagacttatgaagctctgacatctccgtcgacatcctctctacctctccatccttctcaatctacatcaaaaccggaagatccgtcaaatattagggattccaagaaaaaaaaaaaaactgaaaaaccacacaaggacgcaccgattgcaaatgaagctggtgcttctgcgcttgagactgtgcaagctcagctaaacgatcatcgaaatcagactgaagcttcgcgttctgagattcaagggaagag

SEQ ID NO: 13160 - DNA, 1398 bp, Arabidopsis thaliana
ctcgtttgctgtctcttcaagaatcagaacctgaatgttacactgatgatatcatcaaagggctcgtacaggtacatgagtttttaattcctataattttgaatcgttaataggagtgatcaagattgattcatcaaagattcaaaggattcattgcaggtgatgttgcttgctggaacggacacaaccgcagtgacgttggagtgggctatggctaaccttctaaatcatccggaagttttaaggaaactcaaaacggaactagacgaggtttcgaaagaagggcgtgtgtttgaggaatcagatactggcgagtggccctatctcagcaatgtgatctctgagactcttcgattgtttccggcggcgcccttatttgtcccacacgcttcatccactgactgtgaagtcgctggatttgacattccacgtcgcacctggctatttatcaatgcgtgggctattcagagagacccaaatgtatggatgacccagaaactttcaaaccagagaggtttgaatcagagacccatcgtggtaagtttctgcctttcggaatcggtaggagagcatgtcctggtatggcctggcccaactagtactgagcttagctttaggctcattgatccagtgtttcgattgggagagagacaatgacgttgccgttgacatgtcggaaggaaagggtcttaccatgcccaaatctgtgcctttagttgccaaatgcaagtctttaccaatcctcgacaaacttgttctttaactggatcatttatctttcactttgtgatactttgtgtattaatttgatctattatcatcattaagcgtagttataaataaaaatttattttattttcctgaatagcttaagagaaatttgatcttcgtcttcgtcactacgtccccagctctcgagctttgttcactcgatttcctctatacatttccttaaaacccaaaattcttaagcctaatccaaaggagaaaaaaacagagcatttttcttcttctccaatttaaacagtttcctaataatctcactttgtctactcgattctcccaactccaatttgactcatcggaatcatgccattatcaatgaatcctccgacgaatccgccaccattgttccgttgcatctccgtcatgtaactcctcacttccgccttaatcatctcttgcaccaccgccataaactcgcctccgttaccgggaaaagacttcccatttcctcaatcgcacctctaaacccaccactaaacggcataaacgacaccgtattgttgtggttgtggcggctcgaagtggtgttgttgatattcgttgactcgtggctacggtttgactcctcgcttacgtcggcaccaggaagtgacaagcttaacgaagtcggtg

SEQ ID NO: 13161 - DNA, 1632 bp, Arabidopsis thaliana
aaacagagttcgcctgaaaaacagagtaagccttctccgataagagcaattaaggacatattgtccagactagtaaactccttgtgccaaatgaagccgccagacgaacgcaccgtgatctatttctgaccgttgattacgttgacccaacaaaattatcactaaatatctctatcgttcttttttttgtgtgtgtgtgtgtgtgtgttattattatgtttcctagcaacaagatagacctaaaaaaaaaaagttaaaatatagtgtgagataattattatctagtggcaaaattgttctattaagcacatcgattacgactttgtgaaataaacttgggagtttcacaactgatatttgtctcccttaattaattttgataaacagaatcatattacgttcatgggcctgtattttttttgttaaggtcatgggcctgtatttaatagttggccacataaattatctgggaataaacctagttgactactgaaagatattcaacttcatgggcctgtttaatataaagcccatatttatcagcttcagagaaacagcccaaagaacactttttaattactagtaaagtttaactaacggttaataaacttacatcagacaatattacactttttatcttggctgcttcaatgtctccgcatcgttcgttttaccggtgaaagaagcttcttagctttcctctttcaagcttctcgagaagcttatcggcgcccattacttccatctccgacagcttcttcagataccctattgctccgtacgacaccatcattttcttactcttctcgcttcccgacatccccaacagccccgccacggcgtacttcttcgccgtgtttccagggtttgaatccaataacatcaccaaattcgtcagaacgctcttcccgtctttcttcagttcccgtcgaatccttccttccgctaccaatccagcgatcgcctgagccgccgcttctcgacatccgtttgacttcgattccagaagtttcacgatctccgggatgcaaccggattctcccactagccttttcgtctccggcgagcaagcgaaacggcaaatagccgatgctgctgcttgttgcgcgcctaaagatcctgacttgagtacatgcctcaatcgtggaagcaaattgagagccacccatatctctggattcaccgacgggattagatttctcagtgccgttaccgccggttgttgcggcaacggaccgtcgagataagccaagagactcggaactccgccttctgagacaatggcttcacgtagagcgtcgctcgctgcagtgagattctgcaaacactcggccatgtgttctcttgatcctaacaatatcccatggtttagaagatcgatcgagactctaattattccttcttccgcaagcaattgtctcagctctgaaactgctgacatgttcttcagagcagctgcagacgcagcttgtgacacagaatcccctgttttacagagatctataagcggtgtgattccgccgtgtcctgcgatttcccgtgcgttttcctctgtcatggacagtctctggatcgcaatcgcagctttttctttggtttcaagactccctgattcgattagtctcactaacg

SEQ ID NO: 13162 - DNA, 1563 bp, Arabidopsis thaliana
tttctctgcaggcctatcttggaaggagtccatcatcatcatctttaagctccttaagcttgtcctcttcttctttagtagggccatcttaagcaagcattcgagaagctcgggtccaagcgtatccgagttacctgattcatgaacaagaaagtgattagacatcaactaagtcaaacaagtcaagcttcaataatcacagaccaatttgaggaatcatcaaaccaatgcaatgttgcagtaagtgcgagtaacctaagcaacaacagattggaaattactcaccttctataagagcttcacatacttcatcagcagttacattaagagctctcaacaaaatagcaatgttgtgtgactttcttggatcaagaaaccgattctcctgactcacggattgaacaacgccatctcttgttctcgaagttggatcattcaccttgaacaatgtctctatcatttcttcattcactctgcaaaaacacaaaagaatcatatcttagtcgtgtatgcaaaaggatagatcaagtctttaattcagattcgttatgtcttactgaaaggagtttgatttgatttggtcccacaccataacacggctcgagcttgctctaactttatcccaatgtaaagtcttcaactttggtttcatggtctccactttcttctctgggtcagaatcatcaccaggaagggaatgcgacatagtagccggaacctccgagacctgtggcggcggaggaggtggtggaggtggcctcgctggacaaagccgcttcggaatgccgttgtttgagcttatctgactgtgcagcgagacaggaggactaattgacttaggtttcaaacttgttcccggagaagcattcaacgacggcgcaaaattagtcggcgaacacgagttcgagcctgagccgttgatactcctgttgtcaatctgatcaacatcagagacacgggtcgggctctgtttacgccctgaagatcctctcggagagaaaaactcatcgttttcgttatcgtctccgtcaaagtcttgtcttttagggtttaactgttcagtgcttttgtaaacgggagtgaaagattggagctttggtaaagggggaagaggacgaagctctggcgagcctagcttatggtactgtgagtaagaagaagaagaagacgacgaagctggaggaggtaattccaatacgccggtgataccgccagagagggagattggagacttttgctgctctaaaccattgcttcgagagtttactaaagtacctaagtagagaaactcagaggaagtgtgtgaggaagtgtactttggtggttgttgatgttgtttctgtttcttagagccgtcggaaggagaggcgttgaagagctgaagagcgtctgatctcgtggatttggtgtcgtctgcaggggaggagcggcggcggtggcgagttcggcggatgaagatgatgaagacggcgaatagagagaggagagcacggcggagatgacggaggcggttatggtgacgagctagcgatgtggccgttctgggagcttggaatgtttgtt

SEQ ID NO: 13163 - DNA, 728 bp, Arabidopsis thaliana
aaggacacgttgcagttgctgcttcatgtctaggtaatgaaggctttatgtgatagatttgttcctcaacaatgttcttcatcaagcaagagtgatacgcatgataaatcccctttagtctcagactctggacctagtgataataagtccaagtttaccttatggtcaaacgtgtttacgtcttcttcctcagtttctcaaccgtatagggagtcttcaacttctgggcataagcaagtttgcaccactcgtaatggttggacagcatttgtaaaaagagtctctatggctagtggagcaattaggagattccaggagcgtgttttagggcctaataggaccggtcttccgagcacaactagtgacgtatggctcttgggtgtctgctataaaatatctgcggatgagaactcaggggaaaccgatactggcactgtattggctgcattgcaactagatttttcatccaaaatactgatgacatatcgtaaaggtttgtaaactcaactacagattaaagccaaaataaagttttttacataaaatttaccatttacgaattgtattttacaggttttgaaccctttagagacacaacttataccagcgatgtgaactggggttgcatgattcgaagtagccagatgctttttgctcaggtgtgaggaagagtatttcttttggcatgagattttgaagtttataacatattctgacaaaccaaatat

SEQ ID NO: 13164 - DNA, 926 bp, Arabidopsis thaliana
aggtcgagtcgactctagacccccttgggactattcttgatgatttcacttcataattaactgtcacacaaacatggccaagatggtatcaagaagggaaaagatggtatctactatctagaactctcaggcgtccattctcgtgtttgtgagtttattaaagggtgtggtccccgactctttcaaatgtatttataacaagtttaattagttcacatgtcgcgattgttatgacgacacaagaaattatcgttttccctttataacgttgtcgttacgaacttccttaaatcccccaaaaaaagttttgtttcctaattatcctataattagttgatgatgttagggtttgaaaacttaatatagcgaagaaaaacggtttactatacttaattatgagcgtattttctttacgtttgccactttctttctttgcatggacattcactaagagcgtgtgtttgtgtttcaggtgattcttcgctgtgttagacgtggactacttctaccggtgttcaacaatctggtaagcttgtcttttgggagtacgaacaaaagaggttggaaactgctgccacttctgattgagcagtctccaaagcttgaaactctaatcatccaggtacgtatcattagctaatatatctaaagagagtcagagattagggacttagtggttgagcctttacatccatcttcttgatgcttttccaggggctggatagagttacacaggcgatgtgaccatgcctccgttccaagtgaagatgctgcatgttcatggttatggaggaaatgcggaagaggtggaacgcttacataaatttattggggagtcggaatgcggtgaagtggtgctaggctgcggaacgtgtggtggataatacatgtattgcaaccaaaagggttctatagtctatagttga

SEQ ID NO: 13165 - DNA, 747 bp, Arabidopsis thaliana columbia
caacttcaaagtaagaatcttgtttgccctacaataatgatttaacttgttttagtcaggtattaaacccttggttaatgggaaacaggtgaggcatatgtgggttataaacggccaaatagaggacatggacgtgagatgatccaactcggtcttcctatagctgatacgccgcctgatgatgatagtatcaaaggcaagtcctttaaaatgttatttacttataatttctgtgtattggttaacatgagatatgggctttatgcagatcgaagaatagagccaatcccatcagctctttcagacatcattgaacgtttggtctcaaagcaaatcatacctgtgaaaccagacgcatgcatcattgatttcttcagcgaggttaaactgattgctaaattctttgcaacccctaaaactatctgtttctgttttcttaacaaagtagaagttttcttgtgtcttctctgttattgtgaaccatagggagatcactcgcagcctcatatgtttgttccctggtttggacgacccatcagtgtcttgtccttgtctgaatgtgattatacatttggaagagtcattgtctctgaaaatcccggcgactacaaaggctctctcaagctgtctctcactcccgggtaaccgatccatatcacttattctgtaaaatcaagatctttcaatccttttatcatcaattatatttggtactttgaactttgaacagatcggttcttttggtgg

SEQ ID NO: 13166 - DNA, 1045 bp, Arabidopsis thaliana
atccccagaacctcgtgcactggatcatcgaaatagcacccaatcccggttgctgagatccccattgcgtgtgcttccaggtacaaaacttgtccaacaacacccgtctcccagaacagtcgagggtacatccatgagcccttctcccgcagtgctggttcaaaccgagctatcatgcctaagctgaagcatccatcccctgcaatgtcctgcatccatcaaccacaatgattcagtaaccaagtgaaatatattgttaattacaactctatccgactctgtacctgatgacatgatagcccttttgccagcctctggcaatcaccctcggcgagcttgtacagaggaagattgtccggacatccatctggtttagtccactcaaattcaggcctcgtagctgtcttgagatcactgagatgatcctcgtttctgactaggagatacagtcccttaggcaaacccgaaactctgtgaacaaacaaggcaagatgaacctcagcagtatcccaaggaagagctcgaaacggcagcgcaagttgctctttttgggactcgcctgtggaaggaagacagtgcatcagcatctggtaaaacgaagacatgtctatacaagtaacagcgtccatatcaacagcacttcttctcgtccttacaacttgcctcaccgttaacttattatatgaactgtggctaaacagagcacgactgcttgtgaaggaagcaacatcaattgaagaagaagaggtggagtagatcaatggaggcttttctacggccttggctgtccgtgtagatgatatcccaacacaaatgctctttgctcagagtattggggtttccagtccattctaggcttgggaagtctctaagggcagagctaattgcgaggtagtctaagttgagatgttctctactagttccgttggggaaaacaaggagtaagcagtcaggatgctcgaattcaatctcagggagctcagctttacctttaccttcaggtaactgaaattcggggagcccataagcctcttgagatcacagc

SEQ ID NO: 13167 - DNA, 624 bp, Arabidopsis thaliana
attgccacctcaaacgccacgtcattgttacctgagggctccattgttgatctgagccataactcaatctccggagagctaactcccgcgcttgtcggagcagaggctttgttcttgaacaacaaccgtctcactggagacattccagaggaatacgtcaagagcttaatcaacggtacaacaaaacagctcttcttgcaacataactacttcacgagattcccttggaactctggtctccaactaccagactctgtttcgctctgtttgtcatataactgtatggagacagatccagtcgttggtttgtccacgtgtccgatcgaagttgcacctctgctctcaagacctgcttcacaatgttcaagattctataatcacagctccactggttaaagatcagtttttctttgttatttttctcaaagaaatttgcaaaaaatgacaaagtttttcataagcgttatcgacaaaacaaaagtatgacattttaagaaattgaaccgttatgtctcctagtgttttcttaaaaaaatcaaaagttcataaaaaagatctgtaaaactgtggtcgtcacgtgtaaatgagattgtagtgtttatggaatatataatttatagattg

SEQ ID NO: 13168 - DNA, 569 bp, Arabidopsis thaliana
tcgctagtttagctattcctcaggtacgtacgtatcaaaaatccgacgacgacccattttcacgttccgatcaataacgaccaccattttatgcaattcttgattataatcttcgtcttcttggttttcataaaaacaggggattagttacgcgaactagcaaatttgccaccaatcgttggtctatgtaagaatctgaaagtaaaattgaatagaatatacatgaaacattatagaccgttacataaacacgtgtgttgatgtatgtgtagactcgagcttcgtgccaccgttggtttatgcggtcttgggaagctcaagagatctagcagtgggaccagtctccatagcgtcgttaatcttaggatccatgctaaggcaacaagtatctcccgtagacgatcctgttctctttctacagctagccttctcttctaccttctttgctggtctctttcaagcctctcttggaatcctcaggttataaatttatatatttacctaaaaagttttttgtagctttgcatgaaccatgatttatatctgttgaaatatagtgtgttatgtga

SEQ ID NO: 13169 - DNA, 579 bp, Arabidopsis thaliana
tgagacctgaccaacaccaaggcacacaaacggtcagtttagtcataaagagactaaaacagcctcattcacaaacctacatcaagcaactaaacaaagctcaaggtgaagtctagcaatcacctatagaaaaaccttcacattcaatcacataagagtatcatacaactatctccatcctaaaacatgcaagaactaattccagaaccgtgtagaaaaagtcaccatccatcatcagctatgttttacgattaccattctccatgaccagactcagaattcataccttctccgccataacgcgatcacccttgtccaaggtagggtacatagacgttgaaggaatcgactttcggctcgcaagagctgatctaaaaaggatagacacagtaaccgccgtgaaagcagccttagcatcctcagaacaaacactcaaaagcttattaacccatccacttcctccattcctcgattccttatcatcatcatcatcacaaactgttcctcctttatccacgtcatcaatcaccggtggattcttaatccatttcgacccttgaagaaacggaataatagaag

SEQ ID NO: 13170 - DNA, 665 bp, Arabidopsis thaliana
cccgtatatctacttcatcgaacatatgtgattaaaaaagtacagttaaagttgtgatgatttcatatcatctctttggtagaaggttcaggtaaacgggtcaatgtcattatgttctgtagagtccctctttttgaagctgacaagtttgttttgcgttgttgcaggttgatatgtctgtgactgagcttgaccgtcgtgtcccaccagtcgtcaagcaagtgtctgcccaagccatctccgctgctcagatagcacccattgtggcacgtgcgttggcctctgaggttcgacgtgctggtgttgttgaaaccgcttctggaatggctaaatccgtctactccaagtacgagcctgctgctaaggagttgtatgcaaactatgagccaaaagcagagcagtgtgccgtttcagcttggaagaagcttaaccagcttcctctattcccaaggctggctcaagttgctgtaccaacagctgctttctgctctgagaagtacaatgatactgtggttaaggctgcagagaaagggtacagagtcacatcgtacatgccattggttccaacagagaggatctcaaaaatcttcgctgaggagaaagctgagaccgagcctttggagttccatccacttgattgatatgggtgttttgttagtgtgatt

SEQ ID NO: 13171 - DNA, 326 bp, Arabidopsis thaliana columbia
ttcaccgaacttgtaggattcaaagcaggcttggcttttctaggtctgccacgtccacgcctggaactttgaaactcagatagctgagaaccctcagatgtttcttgtactctactgtctgtatattcctcatcctcctccggaatggagctactagatggtcgcagacgtagatcaactggcagaggcttttcaccttttgtttccataccaactgccactgaggaggatagacgctgctcaggcttgcagatgtcaatcccatgttcaactcttttacttggtgagaagattattgaagtgcacttctgcagtatcgacatgct

SEQ ID NO: 13172 - DNA, 1236 bp, Arabidopsis thaliana
gactctagagacctatacccggccgtcggggcaagagctctgcacctagaaatcaataggcaaataaagaacatcataagttccactgtttctctcgtcgatggcagctaagagcatattccgggtatacctgagaacacggaaaaaatatcagttctttcaggtcgcaaaacggtatactaaccggaccacagcaaaatctaaggatactcttacttatttgggatgtatattatcatcaaagttgtccgtggatcttcacccctcataatcttactcaagtcaagctgaaactgtatcttgatgtcggcttggttaccgttactatcaaactgttggttgcttccatcctccaatgggtcgtcaatggaaaccattgtagcagcaggccagaggtaagagccattgcctgtaaacaattgactacgtcttggagcagacaacattttaaaatttggagagctagtttcacgcaagttcctttgagcattcatattaccacttgctcctcggaaagccactgaacccattgatgaagtttcaggggacctcgggaagaatccagatggcgcagatccgatatgatgaagctggtggagggatccgttctgagctgagtacggaaacctgtgattttctctgtttgaagagaatggattcacaggccaggctgaagaactagggcttccccacaggaattctgatccagataatgtttctacatgactcgggtgtgagttcaaagaaccaaatgaagagacagatccaaacgactgcggttgctgaaaggtagaagctttgtggcttgcattattatagctgctacttgaaaacaggtgatccaagtggctaaaccttcttccttcttggtcattgttcaccgatgcagtcttcatcgaaaattctggataacggatgttctttgttggactcaagtttccaaatattggagacttactgaaactttgtagaggatgatcaataggactattacgccagtttcctattggagagcttccaaaggcgactcgacatgattcaggtagctgtaggaatcatcttgttccaattccggattcatttgcaacatcatgctgagagaagaaagcaaaacagaaaattagtccacagtttctttaaagtcagtttctttggtatcagtaaactcactttcgacgagcaccaccaggacgactatgttccagcttgatacgttttccagcaatttctgtcctg

SEQ ID NO: 13173 - DNA, 526 bp, Arabidopsis thaliana
acaaagctgccacgtggacgagtagtagcaaaacgcatcgtttcgtatcatcatctcattctcatcagtaaacaaatccggcaaatcaaacagcttctcttcctcactgtctttgtccgtacacgccgaagtcgaagcacacgaagcttccgaatactcttgactctgagtcgtcgtcgtcgtgcttgtgtccgaagaaaacaactgagccaccacggctcgactcggctcggcttcaactatttcagccacttcagaattactcacatcgttgaccgaatcttgccagttaacggccgctaaagaggcggcggcttgaatgtctttaggagaatttgtgactggacgaggaagctcgccggctaacttgggaaaattgaggtaagccgttgtacctttaatggctaaagccgctacgtcatgagctcgagctgccatctcagccgttggataagtcccgagccagattcttgatttctttctcggctctctaatctccgacacccattttccccaactcctcatc

SEQ ID NO: 13174 - DNA, 911 bp, Arabidopsis thaliana
ccttcccatgattcactctgctaaataaatcgtgcacttataaagatagattttacttgtaagtgttccattggcccatgttcttgtcttgaattagactttgaccaatagacatctagctggcttgattcctgcttaagatatgtccagattactttctcaagtttgttattatagtgtgtttctttggtttgtttaggctatctcctggcattgaagagttggtcaagaaactcagagccaataacattgatgtctatttgatatctggaggttttcgacagatgatcaatgtactctatctctctccctagtttcttcatgttctttactaagaccagctgcatcaattcttgtgtagaatactacaatcacggtagaaaggttatgatacaacttcggcacactgtagccaggagtctcgatatctggcacacgtcgggagcatatcaatgacagtatacggcaagttggaaagtccagatagtttctaggaaatcctcgaggcgctgagagattaccatccggtatcattgcatccgaatcggacttgtacttgcgcagattatgggggaacctgatgaggtttttcctcactcttttgatatgacatctttcatatgtgatcaatgaacattagcttcaattttattttctctgtttcctcaggatttagtgaaacaaccgagatatctagcaacatttacagtgggttataatcagagacacaatatagatgcgtgtgttagcaaggttgattgatataacactttttgttttctgtttttgcttaatagtaaactcattatgttttgtctactcaaatacagttttcagagaactttactattgttctgtttcattatgatggcgtacaagtgcatggaatgatgagtttgagtggtcgagga

SEQ ID NO: 13175 - DNA, 896 bp, Arabidopsis thaliana
tggaaaactgtgctacttcctaaagagtcattgttcggccttgatgaagtggttggtcagaagttttgagactgatgtgtcttcgaatgaatcaacttcaaagagttctttcagcttctcatcgcatatgactctcctcttgtcagaaggatcctaagttaagaaaatggtgtaaagaagcaggtaagtaagaaaaaacagagtgtagagagcaaatggcatacctgaagatcattatgatttatgtactcccacaatctctttaccacatccgccctcgacagcgagtattctccatcacccaagaacttgacaagagcatctgaaagtggaaggggagcaagaacttctttcttctgctttttatctttctcatttggttcctcactatctgtgtctgaccgaatgcatatgctttgtttatacagtgatgagaaatgggataagtttaaattcatctagctttcttacctccatctgattccattttttgctttccattctttggagacttagagctaactgattctcctagaccagagacaaacaacagttagtatacggttaaaaagcctaaaccggaaaaagatggctcccagaacatgtaagaacttccagtcatcaaatacctgcattatcctctaaaggccatatgtgctttgttagctgtttattcatttgaaacatattgatggactcgacagggaacagagatcgaaatgattcgtcgcatattatagagcgtttatcattcggatcttgtaaattgttctcctttatgtacttccaaaggcaatttcacaccctgaaaccattccacagacgaaaatgtcaaacaagagacttggttaagaaaattagacaagtagcttagaaatttaggctcagagcttgag

SEQ ID NO: 13176 - DNA, 553 bp, Arabidopsis thaliana
gctcgaccaaaggaaagcagagctcattttctcaagttctcaaatgcgttgtcgaggtaaccgagaagctgctaaccaaaaattgtagatactccaaaggactaaactgataagaattaatctgcctgcataagagagaaatctagaagtccaagatccaatccgttttctgacctggtcctgtaacggtatgcaatctgctattgagaggcgcttattgacaagtggtagacccaagtaccgcactggtaactggctaatagaaaacgggaaccggactgctacttcattgcgagtagaggctggaattcctgctaagtacacagtggatttctccaagctaatacggtgccctgaccatgctgcaaactcatcaaaaacctgaactagtcattttattgaaagaatattcccatcagaaagcaccataagatcatctgcaaaacttaagtgtgttagaggcccatggtcttacatttcggatgatagccaaactgtctagcagccgctgctctatccaacatctttgataacacatccaggggatcctcta

SEQ ID NO: 13177 - DNA, 990 bp, Arabidopsis thaliana
cctggtacattagaggctacattggagaggacaagaatcacaactgctagaaccgcgattcctttggcttgatcaattttggcatatggctccattaggtcccatagagcggtagggataccagttttgttgaatccatcaacggttatgaacatcccgcagaaaaagatcaaaagcgaatacgatacctgcaaaagttacaactttgataagatctttgaattgtatctctaaagagtttaagaaaatttggttttcaccttctcgagagacggccttgcgtctttgaaatcaagaaccacgagtgctagagccgcggtaattgcggtccacgacatgtttaaacccataagcagagatattagcattcctaatgtgatgaaataaacacttgatttccataaaactcttctccatctcttggtctggaacatattgttggtattattgctctctccttgagactctgcgtcgttgtgttgttctctcgacgcatttgaattgcagcttattaactcgctctcacccgctgaacccgctctgtttctgagagtctcggcggcatccattctcaagttcgaatcttcggatgagactggcgaaaatgtagctggcgagaacctatgagattggacatcttcttgggcaacaacttcagaatcagcattttgtacttcttcttcatcctctttatgatctgacaataaccgccaatacataccgagaagaagcatagcgttaacggtaataccaacaatcatcgcaggaaaaacaccaagaagaaactcccaaaacgggatcttgcgttgaaccgcaataacaagattctgcggattcccaatgggagtagcagcagaaccaatattcgcactcgtggctaaagcgagcaaaaacgggtgaggcgggagattcttttgcctagcgatcttcaacacaaactcggttagaccacacaagatgtatcgttagtaacagagcgcttgaaacagc

SEQ ID NO: 13178 - DNA, 1117 bp, Arabidopsis thaliana
tacatatagttcacaatgccccatcatttagcaatatttcgtcgatgcatagcatatgatttttcacacgaagccattacattagcctactgcaagaactcccttgggtcagcgacacggccggttaaagccgaggctgcagcagtgtaaggagacgctaagtaaatttgcccttctttgtgtcccatccgaccggggaagttcctgtttgtcgttgagacacacacctgtaacaaacattttaaaacacgtctttgttagtctcactttcaagaataggtgaagtgcagataattggataagtagggtaagtaatgggtacgtacttgaggttcattcaagcgagcgtaggtgtctgctgggccaccaaggcaagcaccacagctagggctggctggtgtgtcacagccagcttcttcaaagatctgcgcacatgtctttccacctgctccaggtaccgggagagcatacacatccatccacacctgataagatgaccagatagatacaatgcatttggtatttgtattctttgattaaaccacttgagatagtaacaatgtcgaaatgtagagctaaccttctgagtagccgggacaaggaaagttggaactttgacctttcttccctgataaaacacaagtagattttcatgagactaacgcaaacaaattgtggtgatagagaaaagaaaagaaccttagagaaagaatcaataactttttcctaatatcaacaacatgccagcaaaactgactcaaccagacaaacaaaacacataactatgcatgacatagaaaataataaagaaaactatcactgaatggaacaatttcaatttgatgaagtcttagcttcagatcatatactaatacaagataacagatccttttgcaagattgacgattgtagtttcttccgcaaaatcaagtacaacagagttaagcatgagtactaagatacagacaagaagtggaacttactgctgcgtggaaaagtttagctgcagccataaaatcctctgtcttcccaccagtacaagaaccgatgtatactctgtcaattttcacgtctttgcattctctagctagagctcggttgtcaggagaatgaggct

SEQ ID NO: 13179 - DNA, 599 bp, Arabidopsis thaliana
ctcaaaacttctcatggattcttcacatttcaccacaacgaccaccactcctacactaacacttatatcaccaacacattgtgttctactatacataaaattcagttcctaagtatttttgttttgttttgtgagatcgatggagagttacttgaggaaatggtgtttagtttctgtgtgggttttgcttttaggtttagggtttaaggtaaaagcagagcctcaagttccatgttacttcatctttggtgattctttggttgacaatggaaacaacaatcgtcttagatctattgcaagagccgattatttcccttacggcatcgatttcggcggccccaccggccggtttttccaacggcagaaccaccgtcgacgttctcagtaaacccttaactatatctttcttcttattttttcttctcaaagatattactttctacttaatctgtctaattaactaaactagagtgcgactgaaatgttataatcagaatctaacatgtttttattgttttgacatgacttgtgtgatataatgaagctgagctacttggatttgatactacatcctgcgtatagtctgtgagtggcaagag

SEQ ID NO: 13180 - DNA, 1071 bp, Arabidopsis thaliana
tagaacttgcccccaactatgagtataatttttgttttattgtaacttttgtgattttagattttagattttgaggttttaagattctctcatgagaaaaatcaattaaaagagagaataaggactattctatttccacatatggacaatttcaaaaaaaaaaactaaaaagagagggagaaccctacaatagttttgatggattttaaggttccgcattgcgatgctgtaaatggttaattagggaataataatatggttaaaacaggccgttgaataatggtttctgttggtggtgataaaactgattaaactatataaatgtcgatcattcattagaattctagaaatagaatgttattataactacttttaaaagagagccaattgcctattttataaacctactttttttaaatatgattgaccattttcctgaaagaaattatatatcctagtatagttttcaaatccaattattcttaataacaatatggttaaaacaaaccgttgaatactgttggtggtgatacaactgattaaattatatatatgtcattcatcatagacacgtcctgctctatacctgtgctggaggagatgatgcacatgtccatccaaaactataatcttatcatgtgactattttaaaaaataaaaagagagccaattgtctattttatagaccttttttatatgattgaccatttatttaacatatgttcaatttgcaaaccaaagccaagagtaatatactagggttttttaaaacttaaaacaacaagtaatttagttaaaacacttgccgcgtgaacgttgaacacataacagataagacccttgaatgtatatataggccaccttagaactagaaagagactattaggtcacaatttgaaaaaggcaccaatggcgcaaggagagatcgttccaggccgtcaccgtttgatggcttgcggagaattgcatcccaatataatctcttttactactccacgggatgcgttttttgctgcttcggtttcgaaagcctttgaatcggcagtccaatccgatagcgtatgggagaag

SEQ ID NO: 13181 - DNA, 1118 bp, Arabidopsis thaliana
  unsure (1)..(1118): unsure at all n locations
atccccccaacaaccgcttcgaattcttcggatgttgacatacgtattccgactagttcactttatgtgtacaaatgtgccaacaatgatgaccttcgtggtgacattgttggcatttgtgctagagtgggactccattggtacaactttcaaaaggttaaaaattctcatcttggtctaaccacactacttgtatttttttactgaattcttctttatcttctttactacctctgatttcagggctcaaaccttgagttgatgcacgtcgataaatataattctagattctgtgcgcttatgacttacaacattactgctgaggctgttgatccagccaacgattcacgtttcactttccagacatgtgttaccagagctacatgtcaaaaagatgaagacctgaggatactgactgaagtctgtagaattaaaccaaagattcaaggtgaatgaatttctgcttttgattagtgggttgttctctttttgttatcataatcttgatgatcctggaaagtgttttaaaaaggtactggagacgaaataaagcgatggaatgacgaagctattgatgatatctacaaaggcaatctacctgagtggatttcggatgatactttgatgtcatgcagtgagcaagatcacttttatagggtgcaagagtcagacatccgagaacacaactggcttcaactatacactgagattgcgtcttactcgctgtgggaaggagacatgaggctcaagtcttgtgtgccgctgcagattaagaatgtccttgtacgaactcgtgaagattttaaatcaaaggaaaagctcaaggctgggaatgccatcttctacattagttttaggggtgtcaatactcctcatggtccacctcaagatcacagagccattgtaagaagaaccgtcgatgggattccaggacatgtttgtcttgagtttaagtgtttgctcatggatctgtgagccgctctattttctttatttgatgttgcaatgtaacatactgaagatcttaacccttaaataatgatattgtttttggtttgtttttctgtntccatgcctctgcgttttggtcatacaatgtgtaacaataatgttggttg

SEQ ID NO: 13182 - DNA, 525 bp, Arabidopsis thaliana
tgtcaagaaaagaaccactttgaacctgtccacatctgcacataattcacattttcaggaacttgctgcattgaactgaaacacaagaagccattgctaagatgctaacagctactaacccaaatgtgacatatgcctcaacacgctctggattcttatcttctgttgttaagtgcataacatcttccataagaataccagatgtcgaagtctgagcagagacataagacaccatataagggcaagtgctgaatgttccaaggcactgattacgctgtgcacatagactgttgttgcaggtgaccttcttatttgtagttgaaactttaggattgtaaatgctgagttcaaactcctaaacacagcaaatcgaaacccaaaatcaagatggaaacttatataattcaattggtaagatgagtaaactcaacaactgtgtagttgcttaaagtgttaaacttacagaagcataagtggctccttcggttggtgcgcatttgccgcaatcacaagggacccaaaaga

SEQ ID NO: 13183 - DNA, 1059 bp, Arabidopsis thaliana
taaataaataatgtgatcttattagagggtttattgaagcatgagcttttctcataacggacacaggaaccaattagacatttgagttgatttgaaagtcatttgattaataatatacaaggtttggttctcttttcttcacataaacttgtcgcttgtggcacaataatcttttggattcaattatccaaatcgttaccccaattgataaaagtaaatatattacggtaaatacaaattgtttatataggcccataggtatgaatatgggcttatgtagtatacatcgggccttcacaataatatgggtttcatgattattattaaagcaataactgatttctcattaattacgtcagagagaaccaatgcgcgcgtttacaaaagtaattaaaaaaagaagttcgttttaagtaaacgaatcaaagcctccatataagtgagagggttccaaaagctttagagaagaatcagaaaccattaaccccactcatattttctttattttttttcatttattttaattaaatcgaatttattgcaattttaaatccaaaacctttttttttattttagtttagttttttttcttctttcatcagttggtgtatccgccattattaccgtaatcactgacatgaaaaccattgtcggagccaggtttccgggagattttaagatgaacgccgggatcatgatgagatgccgtcgagttgtagacaatggagttgtttatcatctgaacgttactattcataaaagctttcattgggaggttactattgcctttgttagggacgatcttcgtcgttttgcttcttaccttctccttcgtcgctgcagccactgctgctgctttgaagtctccgtcctttctctccggtgccgtgtgaaacctagaggaatgtgttcctgaaccaccggtttcgtcgccatgaggagatcgtaggatctccattactgcaccttagttttcaaccgcaatggtgatgacccgtgtgctcatctatgttctcaggatcggacgaagatggttgacgatgcatcttcttggggttg

SEQ ID NO: 13184 - DNA, 1060 bp, Arabidopsis thaliana
tatgtcttccttcgttccacacgatcttcggtttctccgtcgccgtccccgtcgccattttatctgttatctctctaagtctaagtccactctctttcatttcaaaccgagaattgattttaatatatcgttagtaaaccggtttaatggataaaaacgtataatcgtcgtacacgtggcaggcgatggaggcggcagagtgttttgcttgcttcgtcgtgttatttggcgtgaagtaaagagttcagagagaaaaggaagtcaaaacttcagagagaaagtggatgggggacacgaaggtagagacaatctcgaggttagctcaatggagaattgaaaattttggtccttgttctttcaaaaagtccgatcctttcaaagtcggaatttggaattggtaagcttttcatttttggtttattttggtaaattttcttcggaattttgatttttgtttgttttgggatatgatgaaggcatctgtctatagagaggaatcgctatctatcagtgaggctattcccagaactttctcgagtatctaaagagcaacctcctgttgccaaatttgttcttcgtgtctccaacgttggccccaatcgtagattctacatctctcctggtatgtcttgtctttgaattgacttttctggatttggaatttgaattctattgtcgagctcgaattaggtatttcaggaaagggaattaccttttatgtgggaactatattcaattatgtggaatctgaaagatattaatttagatgttaatgattggctgatgattagtagtaccttatgggatggttacaactgaattaggtttgtttaagctgagatactctgtttatttggtgcagtttatgagaagctgctgcgtacaactgatgattgtgtgtggcatgttgactccagtttccacggtcgattcaccattgatgttgagtttcttgatctcaaaatctgccctgtgaatgtaagcttaatgattctatttatactctcacaatttcttctctttgtaacatttgtacgtccatggttgatcaaatcaaatc

SEQ ID NO: 13185 - DNA, 1098 bp, Arabidopsis thaliana
tatagttttttctaatcaaaaccataaagcaattcaccttgaatctttggtttaattctacagacttcagtcagtatcctcaggtcttcatctttctgacatgtagctctcgtaacacgtgtctggaaagtgaaacgtgaatcgttggatggatcaacagcctcagcaattatatggtaagtcataagggcacagaatctagaattatatttatctacgtgtatcaactcaaggtttgagccctgaaatcagtggtagagacaaatatttatctacgtgcatcaactcgtcaactttccgtttgcgcatcggtggttcgtcgactgcttccatatcctaaacaaaactctagatgacagcaatacctaatccatgagatacaaataatcactttgtaattaacgcctaaaataaattttagggttttttcgtcgccggttttgtagattgtcccatgatgaatattacggcgtcgtttagagtttatgtccctaaaaccaaatttattttcatacttgtgtaaataggattcaatcataaacttcaaactaataaaaattctgacaccatgtctactttaatatgtttgcaaaatcctctttttcactcattgatggagattcatgagtaaaaaaacactgtattttgctttagaaaaaaagagagagagtctacaactgtatcatttcagattattatatatggttcaatgtcaattaaataatgtaatacagtaacaaagaaggtatttctaagtgcattgatgctattaacgtactaccatgaacccaagaagaaaacacttatataaatgtatcatattatttattatcttcagtttcataactgatataaacgtaatagctagcccaactaggttaatattttcccttacatttgccataattattgtatcatatttctgaggacttataggatcatatttttttttaatgtttaaggatgagttctcgtctcgcttctcacattattctgaggacttcaccggctactggcaatgtaagacacgtagaatgaagctgaagtgggctacttatttagaatctccctcgccgtggccaagtgactcaacttcgc

SEQ ID NO: 13186 - DNA, 1430 bp, Arabidopsis thaliana columbia
caacacaaaggaacaatccatgccctagttagagctacactatcagcttatcactactactacaacaaatgacaagtataaaaaagatgatctaaagagataagaatcgactaacataaagtagctattaatctaatcaatatgcactgcactgagtgaaacaagcaaacctgagattcacagagaacataaacaagccatgaactaaggaagagaagcacacaacatcagcatacaactctcgtttaatctctttctccaattagtaatgcagcaatcaatagtcgaaattgaatcatttgagaaatgagtaaatcaaaagtgaccaaatttgagaattgtaataagaagtagagagtgaaggcaattgcgtctaaacagttaaaagaacacttatttcatgaacatcatcattatcgacaaaacaaaggagaattgaaacaaagttcaagggccaaacgaaaccctaactctccagtcttcgttatcatcatcattaaacggtaaaaaaactcctcaactcccggagaataaggacataccaaatcaagcaaccggagatccaacggtgatgcttaatcagatgaatctccagcggtcgcgagcttctccatctcaagacgctctaaagctttctgatgagcccaagtctcgattgaaagatcaggtttggcattgagtccaacgccgaggataacaattgtaaggaagctggtgatgtaacaaggaagctcccaatcttcccattttcgcgactgtcctggtgccggaggagtacggttcataaagtaacccttaggtcgctcctcgtgacctggcgtcgcccaccgactcggaccggcggatgtagatccagacctagagaagatccgatttcgtagcgtcttcgctgcgacggtcaaggactgcgtcgacggcatcgcgttggttcagatatttccgctgtaagcaaaaaggaaatgctcagatttgtcaagtgtccaactatatacgaccacgacctacaaaaggtttcattcgaaccgaaccgagaatttcaattttggtttattgaaattgtcagtttaattgggaattatataatggtttcagcttagattatccggtctaacagatttatatacgaaattgactctcttttatgttcggtatgacttggtattctcagttctcattttgttttacggtttgactggaaattttgtagtccaaatcggttctggcagtttggttataatttaggtagaccaaattgaattggtcacactagtcggttaagcagtattggatgatagtattcgtgtacgacgtcgtaattgctcagtaacatatcaaatcttcatatacttctctcaagggaaacgcaatttagacattctgaattctacattgaggaatctagtagatatagaaaggcgatgaacaaagac

SEQ ID NO: 13187 - DNA, 539 bp, Arabidopsis thaliana
ttttcatgtcgtatttattgtaaaactgttttttggggtaaaatataattttacattcataccaaaaaaaaaaaaaaacttaatttttctgaactagaaggatgatggaccaactgtacacattaataacgtggtccggaattattttatcaaataaagaaaataaatttctatgacccaataatgtaatgctctaatatttaattttaaaaataataaaattaatgctcactaaatactttaggttgaaaaatgaagaagagaagtttctagcatgattaaaagaaacagtattcttaagcgtcatcttctctatataacccaaggcaacaagtgttatttcatcaaccaaaacaaaacaaaagaagaaacacgagtggaagcttttaaacaaaattcaccccgagagagagaaatggcgacgtcgggaacatacgtgacgcaggtgccgttaaaaggaacggtggagaaacacttcaagaggtacaggaacgagaactatctcttccctgacactatcggccaccacatccaaagtg

SEQ ID NO: 13188 - DNA, 648 bp, Arabidopsis thaliana
acccttctgctgcttttcccgacaggacactaaacatcctctctttttcttgtcggtttttgctttgaatttctaattcctatatgaagctaagtggctctgaaatctgattctctgttctatcttatgagcagtttagcaattgccagggaaggtgaacttacgattggaaccattgatgatattcagaagcttcacatacgtactattcctcttggagagcatgctcgtcgaatttgccatcaggagcagacacgtacatttggtatctgcagtttgggaaaccagtcaaattccgaagaatctgaaatgcactttgtccgtcttttggacgaccagactttcgagtttatgtcaacttaccccttggattcctttgaatatggttgttcaattctgagctgctcattcaccgaagataaaaatgtctattactgcgttggaaccgcatatgttttaccggaggaaaatgaaccaactaaggtatctgttttctctgagaacatatcaacactctcagttcaaatattcttttctaatttgtctttgaaatacttatttttattttgtgatttagggaaggatattagtatttatagtcgaagatgggaggttgcactaatcgccgagaaagaaccaaaggagctg

SEQ ID NO: 13189 - DNA, 1136 bp, Arabidopsis thaliana
aagcaggattggtgttagaggagaattgatgaatcttctttggtttctgacgaatttgatggagagaacagagaagaacgactaacggcgttagacttagaccaagggttggggtttaaccagtgttgtaatttcgaatcattattctgtttcattaaattaaatccaagatgggacctacatgtgggactccacaacaaaagtatctacactgtacacttttttattttggtgcgagaacctctcatggttttttttcttaacaaaagatagaacatgacacgtggccacaacccatttgcacgaaaatcatatttggataaggaaatggatatcatttctccacaattccacaaactcaaattacccaacttcttaaacacattcccatcacctcacaaaccattaaccgagagccaactagcgagtagaatcaactatcaagcaatggcatcgatgaccatgaccgctaccttcttcccggccgtcgccaaggttccctcagccaccggcggacgaaggctctccgtagtcagagcctccacgagcgacaacacacccagcttagaagtcaaggaacagagcagcaccacaatgaggagggacctcatgttcacggctgcagctgcagcggtttgttctttggctaaggtagccatggctgaagaagaagagcccaagcgagggacagaggcggccaagaagaaatacgcacaagtttgtgtcacaatgcctacggccaagatctgccgctactgattcaacaacccaccttctgcatgtctatctctctctttcaatttcggtaaattttctcaattaagtttggtctgtaatcgtatatttgatcatcaatttaccaaaagcccttttatctttctacaagaatcgtcttctttcaccattagcaaaacttgacaaaagcattgcattgtggatacaaaacagttcccaaaaactagattgattccaaaccgtcctaggttaaaaaaagaccacactaatccatactgcagcagcagtagctttcttattcttaggcaaagaaacttaaaacagaagaataccaaactaatacggtcagcatacgagttaagcctagtgccagataacttctttaatcactgcaaacgaat

SEQ ID NO: 13190 - DNA, 1205 bp, Arabidopsis thaliana
cacaaaatttgttcctaaataaccaaacagatactaaatggctatccagagaaagtaaaagacagatattaccttcccaagaagagaatcatagcttggaggcacaacatagtcggaatagacatggctgtccattctaacgaaaggacctccagatggcaggtatgatgttattctgcctgttgttgtaagagtgacgttattttaaagaaagccaatctgctaaaattcgaagacgttaacatataaaagtctactgaaatataccaggtccaggtctgaatcctttaaatggatcttctgcattgatacgacattcaattgagtgccctctgagcacaatatcttcctgtaaacaaacaaaattaaattttgaaataacttttttggtatccactcaaaacatcatatacaacactattcaaacctgtttgtaacgaagttctctcccattgcaacacgaatctgctccactatcaaatcaacagagtaaatcatctctgtcacaggatgctccacctgagtttagattcaagaaacggttcgcattcagtatacttcagatgcttataaacatactcagcagtcataataaaattcaacctggatcctagtgttcatttccatgaagtagaaggaacctctctcatctaaaagaaactccacagtaccaacaccaatgtacccaatggatgctgctgctgcgactgctgcatcacccatggcttttcgcaattcagcggtcaatgctggagaaggtgcttcttccagaagcttttggttacgcctctgttgtcaggggaagatataattaaatgatccagatggttttagatgtcatacaagaattgaaagaaagcagcaagaggtatactcaaattctgagaactagtatcgaagttcgagttatcttagcaattagtacaggaaaaaatcagtttagcagatcatgcagctgggatatgacatgcaagtgcagtaattaggctgaagtaaatttattcctgttttcatatattcagttacatttattcttggagcactatgcaacaattgatggtaatgaaattataaaaaacctaagaggaagatacctggatgctgcagtcacgctcaccaaagtgaacaacatttccaaatttatctgcagcacctgaaatacaagaggtacagagagaaaatatggctttgggatcataatgtgt

SEQ ID NO: 13191 - DNA, 597 bp, Arabidopsis thaliana
cttcacggacaatgctcatgaacctcaaaaccttgagctgggaccaggacactttgaagacacttggcataccggctgaaatcttgcccaagattgtcagcaattcagaagtgattggagagatctgcaaaggctggcctattcccggtatcaagattgctggatgtcttggtgatcagcatgctgcgatgttggggcaagcttgcagaaaaggcgaggcgaagagtacttatggcacaggtgctttcattcttctcaacaccggagaagtgccaatcaaatcaggtcatggtcttctgaccacgttggcctacaagctcggtcctcaagcacagacaaactatgcattggagggttcgattgccatagcaggagctgctgttcagtggcttagagacagccttgggataatcaaaagcgcctctgagatcgaagatttggcagcaatggtagattctacaggaggagtgtactttgtgccagcgttcaacggcttgtttgctccttggtggagagaagacgcacgtggtgtgtgcattggaatcacgaggttcaccaacaagttcacattgctcgggctgtgctggagagcatgtg

SEQ ID NO: 13192 - DNA, 1064 bp, Arabidopsis thaliana
accctgtctcttgtgttaagttttttgatgaagtaactcgaaccagagggcatgacaactctgtagtaactccagaacattgtctgatgcagaccatgttcttggatgcgcaacagcttccacagctttggcgaagttgatgtttgatctatgtagagcgtttgaagtgagaagctttccatgaattacctcagggagaacagttgacccttcttcatctgggtcgacctgcatgttgttaatccccttgcagcgccttgaaaatttcagcacggtgacagttatgatccctgtaagcagagcaagaactccaagggagacaaatattacaatcataactagtttgcttttccctgatggatttctctggatagagacttcgttctcagttttcaacttaaccccagggtttcctctgacatcgactgaaacattatgggtgaaccttggaatatttccggtaagctgattgttggagagtatgagctgtgtaagggacattaatctgctcaggaaattaggtatttcgccggagaagttgttatttgacagatcaagaacttccaagcggtcaagttcagacaatgtagtagggatagatccttcaaacaagttgtagctgagatttaaggaaatttgcaactttcgtggcattactgggatcctccctcgtagctggttttgtcccagctgaagttctatcaaatcctccagattttgaatgttatcaggtatggtaccattcagattgttgccttgcaagttcatgttggaaagcctctttagctgagaaagcgaaggcggtatggatccacttagagaattgcagctgatgttaagaatcaagaggttactcaaaaatgcgattgtatctggtatttctcccgtaagcttgttttgctgtagttttatcacttgaagcctgctaaggtttccaaatgcaggaggtaagatcccggtgaactcgttcatagccaagttcaggagattcaagctcacaagatttccaaatgaaggaggtatgaagccagttaaactgttgttgtccactccagatacgttag

SEQ ID NO: 13193 - DNA, 801 bp, Arabidopsis thaliana
cgttgaggtgttgcttgcggctcagcttcacgctgagagcgaattgaaggagtgggtcactgctgttgtgaagcttgagatcaatgacgatggtggtgctgatgttcactttgagccgtttcagatgagtgatatgtgcgttaggttgtttaaggaaggatggttcgagactgagattggacctgaggatgatcccaagctctccaagttgaagaaagaggttgttgttggagtcaaggatgttaaagaagtcgataatgatttcttccttgttctcgtcaagatcttggatcatcaggttcgtttttgtacccttttagcttatggaaccattactcttttacaatttaggagggaatcgtttaatagattaggatcagaacattggcgactgattgattgaggaactagtgataggaatcaaaggatgataagttgtgagtttttcggtctctgctattttctgtatgaatgaagagcttgagtagccttagctaggaagaacaagtgttatttacatttgaatcttatgaatatagatgattgttttgatgtataattgtgtatttggttgccagggaccgttgtcgtgtaccttcccgatagagaacaggaacactcaaacaacaatgcgggctttgaaaacgcatatggagcgagcaaggagcctcccattcgtgaagaggatctctgattttcatctgcttctctttgtggctcagtttctagacgtatcatccgacgtccctgcgttggctgaatgcgtccgtctacagtctcatgtccctgagggatatgagt

SEQ ID NO: 13194 - DNA, 1249 bp, Arabidopsis thaliana
gcagaaagagaacttgggggtccctcctgcaaaccagacgctcttgtgccaagtgactacaggcgaaggtgtgcgagtatggttccaagtatctcgtgttgagaaacgtggccgataaatatcctttctccctttccaaagaaaaatgtcctctgccatcactctgttttgtttcaccaataaagttcttgttcaatgttatttagaattgctgctcgatgcgtacgtgagctccttccgtcccatgcctctgcaagcgtcttatgcttactaatccccatatcaatttggccacgttcgcccacgacgtcaatcaatctgcccatggttgaccaatcatcataccaaaatgaagacctttcgccatttctaatatcaaccttagagaaatcttttgcaatgtttcggtatttcaacaactttttccacatccaagagccttgttgtgctgatctaagggaccagaaagtgttgtgctttaggaggtgggtcttaatccacttcacccatagctaatcaccatgcgagaccattcgccaaataagtttcagacaacatacatcatttgcctctttgattgaccgcagacccaatcctccctcttgttttggtctacatattgtatccaagcaatcttagccttcttagtacttaactctggtcctgaccaaaggaaagcagaacaaagcttgtcgatttcccgaatacactcacgtggaagcctgaaagcagagagccaaaaattacatatactccataaaaccgaactgatcaaatttagacgacccgcgtaggacaagaaccgggctgtccatgttcctattcgtcgttttatctgctcaagaagcgggttgtagtcctgagatgtgagtctcttggtgactagaggtaacccgagataccgcaccgggagacatcctacttcaaaatgaaattgttcctcaaactcttggcgcacagtatcagaaattcctgcaagataaattgttgttttctccatgctaatcttgagacatgattgttttgcaaaactgtcaaagacctccacaataccctcaagggatcgaagtttcccatctgtgagcccatgatatcatcagcaaaagaaagatgtgttaaccaagatttttacactttggatggtaccaaacttccttaagcctgcagctctgtcaagcttcttggatagaacatccatgacaatgacgaagagataaggagatagagacaaccctgacgcagccccgtg

SEQ ID NO: 13195 - DNA, 556 bp, Arabidopsis thaliana
gccagtgtgctctaaagagggcttcgatatcaaggtggcgatactgaggtgcaatatgcgcaacttggtgtaactgacttaaatgtgttttcagtacatccagggtcaacggtttgaacaaacataagttcatgccgcaacttaaccctttttcacgttcgttagcctgtgcgttggctgtaagccccagatgggtaaggaagaattttgctcacggagtttgcgagtcaactcaaaaccatccatattcggcatattaacgtcagtaataagcagatcataatgttgcatactgactttgtgtagcgcttgcacaccatcagtggcttcatcaacatcatatcctaatagatttagctggcgtttgagtaatagcctgttggtcggatgatcatccgcgattaatatgctcaacttttcaggtagtgtgatgggttgtctgcttttgcctcgacagtcgccacttgctggctaatttctccgggattgtgatcgaaatgttgtcctatgcctggatgactttctaatgcaaatcgccctgcatatttttaattaa

SEQ ID NO: 13196 - DNA, 586 bp, Arabidopsis thaliana
  unsure (1)..(586): unsure at all n locations
taaggctttgtctgcaacgaaatccgacagtacgtcctacagcttctcagcttctagaacacccttttctacgtaacacaacaagagtggctagtactagtttgcccaaagacttccccccacgttcctatgatggaaacttctcactggtatgtgtataatgcatatgttgggggctgggtcaatttgatttcctaccatcaagttaaacttgactttcttctttagcagcctacaagggaaccctatccagggagactgagccatgataattatgcaaaacagccattgtctagaactataaagagcccgaggtaaaagtgttgtagctcaatctatttgatacttggtcgtgtcaagtgtcaactaatttcgtatttggttcttgcagcagagaaaacgtaagagctatcacatccttaccagtatctccatgttcaagccctttacgccaacttgggccagcatacaaaagttgtttcctgtcacctcctcacccgtcttacgcatttcctgggcaagacagtgggtacaacctagcagagtttgctgcaagccctttcaggatngaagaagacgcaatgat

SEQ ID NO: 13197 - DNA, 1210 bp, Arabidopsis thaliana
tttaacagctttttccacatccatgagccctgagatgctgaccgaaaagaccaaaaagtgttgcgcttgagaagataagtcctaatccactgcacccatagcgagtcaccttgcgagacgattcgccaaatcagtttcagacaacaaacgtcattagcctctttgattgactgcagacccaatccgccctctcgttttggcctgcaaactgtctcccatgcgatcttagccttattagtactcagttctggtcctgaccagaggaaggcggaacatagcttatcgatttccctaacacattcacggggaagcctaaaagcagagagccaaaaattgcaaatactccataggaccgaactgaccaaatttagacgacccgcgtaagacaagaaacgggctgtccaagttcctattcgtcgctttatttgctcgagtagcgggctgtagtcctgtgaagtgaatcgcttggtgacgagaggtaaacagagataccgcaccgggagacgtcctactgcaaaatggaattggtcttcaaattctttgcatacagatttcgagatacctgcaaagtaaattgtagttttcgccatgctgatcttaagacccgattgctttgcgaaactatcaaaaacctccacaataccctcaagggaacgaagcttcccgtcggtgagcaccataatgtcatcagcaaaagaaagatgtgttagaccaagatttttacattttggatgataaccgaatttcctcaaacctgctgctctgtcaagcttcttggatagaacatccattacaatgacaaagagataaggagttaaagagcatccctgacgcagcccccgcaaactattaaaatatccagctagttcccgattaacctgaaccgagaaagatgctgtggtaacgcaaagcatgatccagtgaacaaattcttgaggaaagtctagagttaaaaggacattcctgaggaaggaccattgaacagaatcaaaagccttggagatgtcgatttttatagcacaacgttctgaaactgaatctttgtgatagtccttgactaactccgttgcaagcagcagattttcaatcaaaagtcgatccttgatgaaagcggactgatccccgctatgaactgtggcaacacccgttttacctgtttgcataatttttgaaatgactttatagaggacattgcacaggagattggtct

SEQ ID NO: 13198 - DNA, 1187 bp, Arabidopsis thaliana
aaggaattcacacttaaaaatcaattgttcacggatggtctccctatcttatccttcattcaactttctgaacgtgtctgattcaaatcatacctaaatctttaagagcacatgttttgtaattctgactagctgctcatatatttcattcaactccaggaacattttcactacatcctgagttccagaatatgccacttctctagaagataaagtgcacaataactaactagcccatcaacgatctatcggtttctccttagatacccgcattctgatagaaccaatcactttaggaagagaaacgtacatacatcagccctcacggagctctacaagctcgtttatcaaaaacctaaacaaatcatatgtatacaccaggccttccaaaatgcattgtacaatcaatatacagtagcctttctctatcatctaaataaaggaaaaacattttgaggcaaaaccgaacctttctctgtcaactccagtaagatcaccagctataagtgccattagagccatacggtacatatgatcagcaattgattcaggtccatttatcccctgattaatccacccttttctctttgttgtctacacaagaaggaaaagttcactacttgacaatgttgaccaatgaatataactatgcagatctccaattcaaaaattgagagccactctcaagtgttgttaactcaatccattgttttgatttcggaatcggtagtagtctatatggttcaacacataccttgagacgatgacacaacgttaggaaatcgatcgaagacgaaactgaagatgcaacgtgattcatggattccatagagctaaccccgtcggaaacaggtttctggcaccggacggaaacgatcgtcgagctcggagtgggttttccgaggaagaggaagttcctagaggaagaatgaaacgaggcaagtattgatcggcggtgaaaaggccggttcagcggcggtgcgaaacgtgtagctggactaatcaccgccatagatgatctcgattctatgcaaacaaaaaaaagtagaacttgattttgtttgtttcagtgtttttgcttttcctttgaggagctggttgctcggtgtcgggtcgggtttttcttacccgtttacatcagcaactaagagcccagcccaattactcccacgggctataaatatatg

SEQ ID NO: 13199 - DNA, 818 bp, Arabidopsis thaliana
gccgggcttgtaaagtagaccagcggaagtatactcaacatgcggtcccgaagattccgggaccagactacacatgaagctctctgctgatgccttgtacgcctctaagttgtacatatttccttcaataacttcctgtaccgaaattaaatcaaaccaccaagtttatcagttatggtaccggtttggttcttaaccgggtcagtttggattcacgtacacggaaagaaaagaacataactttgatatgcacgtgaaagcctcgtgtttactaaacttttgctaaagtatttaaagttaatttcgatttcatcccctaaatttgatgttaataaaattggaagtattgaactaaccttcgaaacgagaacattaagtccaccaactttgttgtcccagccaaattcgtctacgttatcgttagcaccaaacggttcacggttactctctatgtaattaaggtagctttcatcaccagtcgcttttcttagccaagctgctccccacaataactcatcctacccataacaaaaattttacaaaaaacaacattaaagaaaatcatcaccaagaaaatgtacaaaatataatatttaccaagaatgtatagatatttagcttgttctagtgatcctgttaaatatttgataacttctttagtcacacaaatgttgggattgatgtttacctgaaatccgttgaaatcgcagtagaaaggacacacatcatttttgatatcgtcattgctgctataagcaccggatacatatcagcggactgaaaagttgtgacagcattttggagcaatgtttgagagt

SEQ ID NO: 13200 - DNA, 1260 bp, Arabidopsis thaliana
  unsure (1)..(1260): unsure at all n locations
cttcatatcccaagaatacagtaattattaaaagcttctctcgttggggacgttaattaaaattctctaatcaggcgaagtagactgatacgagagggatatcaacgtcagcatcattatcatcttcacaagcgactacaacatccacgtgacgtctataagcaggcaattcaaccccagccacgtctcttgcaagatccaccactcttctgttcatcctctctttatgccttgagaacatactgttgtacagtaaactgcttccgcaagatatgctgtatgcgtttagccctttctcttttagccagtctagcaactcccttagggtcgggtttcccctcatcacccaccggtcccaaacagtccagctttggtcttggtgcttcaccactttaggtggaaccggctcagccatggagaagagcggaagtgctaagttagcaaatgtgtttctgtagtcttctactttgtgtgacccgtctaagaccttgtacatctcaaggcaaacaaaacctgttgccattgcagttgatgtcgcaatcgcgggtatgattcttccggctatgaacttggctttaagcttgtccacctcgggaacactgtagttccttgctctcatgttggctagcccagcgatcatatccatgtggtagttggtatcatcgtcctaagaacagcaaaataatgttagtttgttgctcttataattcaaatacagaatctgaaagatacttggatacatttatgattcaccttttcaaactggattgccttcatcctgaactctggctgcaagctcatcctgcaccgcactagttttgcgtttagttcatcgattactgctgcatcatcgactgaagctgtagacaaagttgtagccttctcatctgtcacaatagttgcatctttcttcggctcaaagtcggggacaattactctttccacagcctcggctagtcctgctcgggttttagcccactcaggagtagggattccgaatgtctctgctcgcaagatagatgcagccatgacaaagttgatatggctcaggtcggttgaggagaattggagtgggcgaggaaatctctttggggcagaccagaacggagctcctgtactagtagcagcatcctcaggaaatgtgtacataactgcttcacacggttggcgaagtagtcctcaaacctgtaagcaagcaattatgtanagagaagaaaatcatttacatatagcgcaatgaagggtgtgggccacagagag

SEQ ID NO: 13201 - DNA, 664 bp, Arabidopsis thaliana
gtagtgtgtacgcggcggcggaaccggcatcgtcttcgtcggcgagtgaggtgccgattgataatcaagcaccggtttcggatcctggatcaatatctggagacccggaacttagaacttctgatccgcagagtaacgatgcggagaggccagttactaccaccgatgtgccggcgatggagaccgacacaaatccagaacttgaaggcttggtgacgcctacacctgcaggtttccatgcctgcatgttgtcctttcattatatagaaaaaaggatctctttttctcatatgttttgggtctttttctcatatgttttgggttttttcaggtgaagtggtggtggaagctgagaaatcgaaatcctcaaagaagcggattgctaaggctccttgggccaagcttctttctcagtttcctcaggtttgtgttatttgatttatatgtttgcttgcatgtttcgcattacccttagcaaattgagcctagttggtttaccggaatatggtaaagatcctggcttttggtttattgggtccactttagtctgctgccatgtcaagggatgtttactggctagtctctatctagggatgtttcaacttccagtgactccacttacttttgtccttatttgcaatttcagaaccctcatcttgtcatg

SEQ ID NO: 13202 - DNA, 1113 bp, Arabidopsis thaliana
cctctgagcccggaactgttttccggtataagtctgtccgaagctccagttacgtggtgtagcattgttagatataactgtacggccatcactagttgttactttaaaggacaaagcttgaccatcaagttttgcattgctttgccaattctgtccccagtttcttgacatgctttgccaacgtgtattggttcctttaatggagacggagataacatctccggcgccggcgacgttggttataagtacgaggttgaagtatgaatgaccgttgatcgtgaatcttattcctccttttctccggcaagccactctgatttaaaaaacagagcataaatcaaaccacacgtaccaattaccaaaccgagctaaaccgagatcgggaaacgtacctccggtattggacagggacgacgccggctttgtattgagcaatacggaggaagatgggctgagctaaatcgaagtggtgttgaggaggattacaccaacctccggcgttgttggcttgagcaaagttgggtggacaaaagtttgttccggtgacggtgattgttccaccgatacaccattttgggtcgtctacgcattttatctgaaaacaagcaccacagctttggccgccgttgaatagagccgtgcttagagccgccgtgttagtgccgtatccttgactgtataagtttccgtaaccacacgcgccgcctgatccatacagaaacaacaacaacacaaaaataagacttgtgtagatacaaacttatgtagcatattaattagtagcatattaattgtcaccactcactaataaaaactttaaaattcctaagaaatttgaagtttgaagttatattggtcagaaaataagaatgatataactataaagtgtcagagaggagtaagcaaattacccatggtgccagaagcatcagctcctccatagaatgtggctcgagcattgacccaaccactactgtaaccatccacgctcttccacattatcatcatcataagactcaatgaaattatcattttaccaaaaaactccattttctctgcctttttattcctacacaagaaaactttatgatcacttaaatggtaacagaaata

SEQ ID NO: 13203 - DNA, 550 bp, Arabidopsis thaliana columbia
atgtaatgtattgcagttcagtacaaatttttagtgttaaattatatgttttaacattcgtcgcaaatcaaacatgaaaataaataaataaaattcatctttgtggttataaacttactccaaataaacaaaaaagtttggctattttataaggggaaacaccattttcaccatgtcggaataatcggtaaaaaaatgttatatctagcttgttgttggcaccttatgttcatgcatgtgaaagtagaaagatctacttaacgatccaaaaaatttatgatatacaaaatacgcaatttttttggttagttacttaaattttaaatccgtttttttctgttagttttgcagattatccaagaaaatcacaattaacatttacctatataataattacatgaatgtgaaacagaaacaagaaaaaagagtgttgtggtgttgttacaaagtgtatagatgatcaaggggtaagagggagaggagagttgcggataaaatgtttaaaaagagtaagagcagccttaggtttgtaaagaggaacttcatgacc

SEQ ID NO: 13204 - DNA, 643 bp, Arabidopsis thaliana
cggattctgcagatgacatggagactgtttcctgcttattggacttccatgaaaccaaagatggaccaaggaacatacagaagccagtaaccgagattcttgaatcagtacaagtcccccagtctgcatctgaaaaactcttcaacttaagatcagaattggcagaatagaacataccctgaccaatggtgcctttcaagtagtgtaacactttgtagacagctgtgaggtgtggttgtcgcggcgcagaggtgaactgacacagcttatgaactgcaaaggtgatgtctggccgagtaaaagtcagatacataagcttcccaacgagccgtctatacatctccacatctgtcaaaagatctccagtttctagattcagtttctgacttggatccatgggtatagaagatggtttacatcctagaagacctgtctcatccaaaagatctaacacatacttgcgttgacaaatagaaatgccagcagaagtccttgcaacctcaagacctaggaagtatttgagaggtcctaaatctctcagtttaaaagattctttcaaagcggctgtaaaagacgcagtggctgtagaagagctgcttgcaatgattatatcgtcaacataaaccaatatagccatgtaagt

SEQ ID NO: 13205 - DNA, 947 bp, Arabidopsis thaliana columbia
tcttaacatctacagttgctggtgtaaggagtttacttccatggcttatacttagtattgatatcccttttgaacccaaaaatagcaagcctcactttattcttgtggtttttggatcgtatgggagagaaatcgaacgctgttatctactcttctcagtgactattcacctctctcaatctaagttaaatactatcatggttgcgtctggtgtttccttagatttccacaactccaaaatcttggttcagaatcagtatacagcccaagagattatttgtgcttggaagaacctcagagctgtgcaactgaagtgattgaacatgaatactacaaatgatttcctaacaaaggaacctttgcttttctttgctttccgaagaagacaattgttaactgttttacagatgagttgagcagtgtaaacctttaatggttgacaatagtgtttgccttttgatggtcagggggctttatacactaaatagtctagctctcttcaccaaatacaacaatatatatacacgattcttttacgcatcttagattgcgaaaataggatcaacttccgagttagagaaatctgaatgatgccacgagttggaaccactcctgcgagcactcttcaccttcttcctcatcgaccttgtcctcttcgattttaccacgtaataagtcatggttccaagaacaccagccattatcacacccccaaccacggtcaccagctcagccgcccactcgttcttacgcccaaccactatgtatgaagatgccaaaaatgccacagatgtacacatcgatgccaaccacatgagtttgttgatcacttccactaccctcttctcagcttttgtctctcctctcaccaatgtgatctggacaacacaaccggcagagacgtaaacaacgcgagtgcgttgaagatgaagaagatcttgaatgat

SEQ ID NO: 13206 - DNA, 930 bp, Arabidopsis thaliana
gacgtcgactctagaccatagtttccattcttgaaacacttttcgcatatgttgactataccctgccaacatcatatgtcaaaaaaaaaagaagcataaacaaaacagactagagagtatgaaatatgctaatcgaaaaaaagcaaaaaaaaactaccttgttatgttgatagaaaggagaatcgcaacgttctccacaatgcgcacaaaccaatacatgatccggcttcttcaaatcactgaaaacatctgaataagaggtaagcggtggtactttgatgccagtctcaactctttcctcaacaaggggcggtgcggttataggcctaagagaattaggggttgcagtaactcgaattccagcaggagtcccttgttctattttagcattatccacggacaatagatggtcatttttcttcagggaagagctaaaattgatcaatccccatttttcgaggaagagaaaaactttctggagcaaattgacatcgccaacaagaaacttgcggacactggtgaaggtgagtctccgacaagtgtcctctctaaacttattgataatgaaatctcggtactccttgtaaactttgggggttctagtgattgagctctcagtgaagaactccgcaaactcgcgtctttcaatttcgtgtatatcatcccataagaaccaaccttgtaaagaacaagacaaatccccaaatcaattgcaaagaaaacaaaccatagaaagcagaaacctaagagacggaaacagttgagcgagtaaaaagagtagaagaagaaaccctagagatctaaaagcatggcgagggtaagagaagacatactggattgagcaggaatggtgtagagctcgatctctgcgcttggatcagtggcttccatgcccgttaccgattcctccaatatcaaaaacgtctgatg

SEQ ID NO: 13207 - DNA, 906 bp, Arabidopsis thaliana
gattgaagagatccctcttctttctaccaaacatctcaggtaagcccaaatactttcctagacctccagttagttgtatctgaaggatttgttgagcttctgttttaacatggtcgggtgttttccttgagaaagtgattgctgactttgatatattgatcatttgactagacgcttcttcatatttcttgagaattcgtaacaaagtcttgcagcttttggggtctgaacgacagaaaaacattgtgtcatcagcaaaaaggagatgattgactcgggggctgccttttgatacacgtaatccggatagagctgtcgttctgttgggctttcctgcacaacccagagaggacttcgctgcaaatgatgaacatatacggtgagagtggatcccctgtctgagccatgtctcgggagtcactgcaccttgggccgaactgttgaggaggaaagaataagagactgtactgatgcattgtagattccagcttatccaggtttgatgaaaacccatctcttgcataaccagtttgataaagtcccactcaattctgtcataggctttgctaatgtcagttttgacatccatgaagcatcgtttctcagcacctgaggtttggaggtaatgaagagcttcatgtgtgataaggacattgtcattaatcgctctttttggcacgaaagctgactgattctccgaaattatctcttgtaggattggttgcatacgcctggatagcagcttggaaatgattttataaaagactttgcacaaagctgtaagtctgtagtcaaccatcctttgagggtttttgatttttggaatcagtctgatgtgtgttttgttgattgatggttgaagggtagctgaagagaagaaggattgtatttccattacaatgttgg

SEQ ID NO: 13208 - DNA, 463 bp, Arabidopsis thaliana
cgactatccccgattaccgttatttcatttcatcacgcgggcttttcgtcgtcaaggcagattaagactaccggatcgggagttggtgttgtagattcccgagcctcctcgatccttagctgctataactgctcagaaattgacttctcttcagctcggccaagcttggccttcttatgattcgcgtcggctgtcgattcagtgacggggttcctgagcttgtgtgctgccatgaagcagatttgagcatttttctgatttccccagatggttttcacgccgtcgcttgtgggaaatttcgggcagagatgatacgtcgaggcgacacgtcggaattgatttaaccatggtgtgctgataatcgcgttgtacacggtcggctggtcggtaacagagaaatcgacgatttttgttacccctttggctcggactggtaatttgatgggtccgagagtcatagtga

SEQ ID NO: 13209 - DNA, 584 bp, Arabidopsis thaliana
ggcgtcgaacttaacagcaagttcgaatcaatgagcactaggatgagatatgtggaaggcatcctcgcttcaccatctgttaaaaacaacccatgccagcttccagggaaagcaatccagaatccaaaggagtatgccactgcccatgccatcactatcacacatgatcgagagctgccaactcgatatgtccctacatcaaacactgaggacagtgtaattctagaggggaaggatttttatcaagatgatgtgttggctgacaacccaatcgaagagcccatactcaccagtcaacccactcgaccacaagctcccccagctactccctgtgttaaaaaaccagaagctgcaaagaccaaagacatagacttcgtgccaccgccttacaaatctctgcttccattccttggtcgtttcaagaaagttctggttgcaaaatacagagccctcctggaaaaacacataaaggatatccctttagtggactgtctcgcgctaatacctgacgagcacaagtacgtgaaagacctgattacagaaaggatcaaagatgtccaaggaatggtggtgttaagcatgag

SEQ ID NO: 13210 - DNA, 899 bp, Arabidopsis thaliana
tcagctatcatcaaagctggtttagcgactcaggtgaaagtcacagtgcctcttaacgcagatgtgtaccaaagtgcgtctaatctcccttcggatggagatttcaggcctgaaatccgtgatctcatgttgaacattgttaagtttctgagtgataacggagcaccattcactatcaacatttaccctttcatcagtctctacaacgacccgaatttccctgtggagtttgctttctttgatggaactggtactccgataaacgacaatggaagaatctacgacaatgttcttgatgcaaactacgatacacttgtgtggtcgttgcagaagaatgggtttgggaatttgactattattgttggggaagttgggtggccaacagatggagataagaacgcaaacttgatgtatgccaggcggtataatcaaggttttatgaaccgtcaaaaggctaataaaggaacacctatgagacctggggcaatggatgcttacttgtttggtcttatcgatgaagatgccaaaagcattcagcctggaaactttgaaagacactgggggatattttatattgatggacagcctaagtatcagctcagtcttggcagtggtaacgggctgatccctgcaaaggatgttcattatttggctaagaaatggtgtattcttgcgccaaatgctaatcttcaggatcctcagttgggaccaagcgtgactacgcttgtgatcatgctgattgcaccagtcttggttatggctcctcttgtggtaacatgaatctagcacagaatgtttcgtatgcgttcaatagctattaccaggtaagtaatcagctcgacagtgcgtgtaagttccgggtctctctatagtcagtactagggatcttctgttgggag

SEQ ID NO: 13211 - DNA, 553 bp, Arabidopsis thaliana columbia
tgtcgttgagttcgttgattgcctgaaccaagtagcaaggaaagagagttagcatctaagtgaaggaataaagtttaaagaattattatgggtgaagagaactaacccgagatgagtgatgggcgtggagtaggaatcgctctcgaattgcaggacgccacctatcaaaggctggcaggatggtgtcttttcgagttttgaagcatcgaaagacatttccctctgtttccatcgctgtcagaataaagaaagggagcgttaagtcaataaattaaaacgataaggccggaagacatagtggaaggtaatttctaacccgtgagcgacttggtctgaggaaccagaacagccttagttccggcatctcggacctcagcttcttcccgccgggggtttgaactccgatcggccttttcacctcctgatccagacgaagtagatacggtgactggaggaggaggaccatagagcggggtggtggagatggccgaggagagcgatctgtttgggctctcgtcttatctcttttgggggaggagctgctgcgggttga

SEQ ID NO: 13212 - DNA, 592 bp, Arabidopsis thaliana
taatagagcctagagcaagtagaagaagtcggagagattgcagaaaaaaaataaaaaaatttggacttgatacgacgtcgtttgaacaagttcagcaacaaaagaagaaactggttattgggtatgctttggcttctaagaagaagatgagtttcttggaacccaagcttgaagttcttgctaggtaagcatttcgtatttgttgtttatatctttctcaagtaactgtgtaatgcggtccctcttcaaagctaaagattgctagaacataagacaattggtttgggtagtaatgactacctctttttggtttttcattgattatatggaagcaaattggaactacacattcttacaaaacaggaagcaaataagaaatgggaaagtagaaaatagaacatgttattctctgatcctacaaaccaggaacagagaagaccaagcttattcaaccaaataacaaattaaaagacttagtgacttagtcgttgtacttcgggtttggttttccccgcgtgctgacttctcctctcaacgacttcttcttcagtagtgacaacccatcaataccgccccctaaagacgaaccttg

SEQ ID NO: 13213 - DNA, 491 bp, Arabidopsis thaliana
atggcactcgacctcggggtcgagtggtcggttgaattggtgatgtcctctactcgacctgttggtcgagtggtctcttgagatcttgaagctcctactcgacctctgggtcgagtggtttgtcatgatcaggtccgctccttccagatagctcgtcaacagctccaaatcacctgaaatcaacgcaaatatgcaacatgcatgcaaaactatcctaaacatgcaaagtgatgacaaatgatgtgaaatagtataaaacagtgatgatatgatgctaaaatgatgacaaatggatgctcaaaacatgcaaaatatacacttatcaactcccccaaacttagtctttgcttgccctcaagcaaacaatcaagaacaagctggaggtgacgtttgaaagcggggaccagagccaaagcattagataaaccagatgaaatcaatgtccaagttgaaagttctaagctgcaagaccgaattctacttaaaaacgt

SEQ ID NO: 13214 - DNA, 443 bp, Arabidopsis thaliana columbia
ggaaggtttaaaaaacccacggtaataatagtagggagcattaaagttttgagtaaagatccttgtgatatttccaaccagtttagatccactgtcgcgagtaaacctccaagcacatgaaccaatgaaagaagtaaacatgttaaaaaatcctaacacaacaacagctatgagattagactacagaactgaggcagattcacaagtctagtatattacacactacacaggcagaactgaggcagattcacaacagaacacacactatagaactgtacaagagcacacaacaatatagaactaaggcagataataaatgtctattcctaaaacatgctaagttcaaaagtcaactatgttcagcaatagagcatgagtagctgcagagcacaattacgaacagaacatactataggacatagccagagcatgagtagcaacat

SEQ ID NO: 13215 - DNA, 955 bp, Arabidopsis thaliana
acaaccaaagctttctctacctcattgtctccaagctcagcaaatgccacaactttagtcattggtgaactagaatccagtattctagcaaatctagtagttgcttctccaaggtacccaaactcactctcttctttagtcaagacagtttgaagaggatcctccgtgttcaactcagcaagaagctcattaactagctcatccatgatatctacccagaatgtctgacactcagtggtgggcttagacatcattctttccatgcaaaattcctgagcaatgtcaccaatccgcagattgatcttgctctttctcacatctatcaatgcagcgacaatattcaggaatggtctaccaaggatgagtcgatgtctaggctcttcatcaagctcaatgatgacaaaatcggttgggatatagaaattccaacccggacttgtacatctcagccactccaacagggaatgaaatagaacgatcaccgagtaccagagacatctttgttggggtaaaattcgtgtctcccaatctcttagcaaccgagaaaggcatcaaacttacacctgcccccaagtcacaaagacatctatcgaaagtgtattctccaatcctgctaggcaacacaaaactaccggggtcttctctcttcacaggaataacattctggagaatagcgctacattctggagaatagcgctacattcatgactgatcaacacatgtccttcttcaagggtccttttgttagtcaaaatgtccttcaaatgtttccggtagatagaaacattctgaactaaatcaagaaatggaagcttaacctggagctgcctcataatctcatcaaacagagaatactccttttctctctgtatcttcctttggcgacccggaaaaggcaacttaggcacataaggtggtagcacagtctttttagccttctcttctagggtctgtt

SEQ ID NO: 13216 - DNA, 1174 bp, Arabidopsis thaliana
  unsure (1)..(1174): unsure at all n locations
tgagatagatttttgaaattacctgcgaagacaaatcggctgctatgtaaataagcgaggacgtgacggatttggtaagaaccggccgagatttcaccattcccaaataccatccgatgaatcctgctgtagagaccgtcgaagaagacgaagacgaagacgaacagaaaccagagacacctgtttcctttgctttcccgagaaactgaggcgtacgataaaaaggcctcgactgcaatcgctggatgtttcctcctatcggtaaagggtcgagctttccaaaaggattcgtcatcgttgctcgctgtaatcgaaagatccgagcggcgtcggaagcagcgtttctaaacaatgcgccggtcattgtcgtgtgatggctccgagagttttgggggttcagggaagggttttatatataacggcggtggagaagaagaaacagagctctgtttttttaaaaagtttaaatgccaataaataatgaaacacacaatttgtatatttcgcgagtataaaggtttttctactcgcgtctcgtaccattgcaatcgttcttcataaattagttttgttcttaataaattaattaatcatgccttttctagatacagaattgtcgagatctttcctaataaccgaagtttttgtgaaagctatagtgttacttagcacattgattatatataagccaacaaattgattattatttattattagctaatcactcaataaactcaaaagccaagccaaattattggagaaaataacctttccaatttctatgtcaggcggaggaaagagtgcctgaaggctgaagagcgcgtgaccgtcaaaggtggacggttcaaaaaccaaacatccccaaactgtttctgttctgtagtgttctagggttgtttacacgtcctgttcacattggttagtgtcgacgtcatcacttctgacacgtaaaacttaattcagtgacgctaacctttagtagaagccacgtgttgcgttcgtgtccaagttccgacttttagccactttttatgaactcttttatttttatatatttcgtcaaaaagaacgtagatcattggaagagaagattctcttatttcctgtcggcaatttttcgaagattctaaaccanactatacgtagatgatgtcaacacacaaaacacacaaaa

SEQ ID NO: 13217 - DNA, 618 bp, Arabidopsis thaliana
tgcttgaaagactgtcaaaccaaccctattactgttttcttgacggatacttgggattctttcaaatcctgattcatcccgatgatcaagagaaaaccacctttacttgtccttatggtacatttgcatatcgtaggatgccttttggtttatgtaatgcccctgctacgtttcaacattgcatgaagtatatctttagtgatatgattgaggattttatggaggtttttatagatgattttttgtgcatggctcgtctttcgctacttgtttgtctaacttatgcagggtacttcagcgctgcgaggacaaacacttggttttgaactgggagaaatctcatttcatggtgagggatggtattgtacttgggcacaagatttctgaaaagggtgttgaggttgatagagctaagattgaggtgatgatgagtatgcagccgccaaattctgtgaaagatcatgaggtttttgggacatgcagggttctacaggaggtttattaaagattttccaagatcgctagaccttgcactcagctgctgtgcaaggaacagaagtctgagtttgatgacacctgtttgcaagcattcaatatagttaaggaatctctggtgag

SEQ ID NO: 13218 - DNA, 647 bp, Arabidopsis thaliana
ttctctcagagaacaagaagaccgtatgactcagcttggtcatcagcttgatgatctacagagaggtctgagcttgagagagtgctcagaaaagcagcttagagaagaagttaggagaatcgagcgtgaggttactgaggccattgcaaaagcgggaataggtggcatggacagcgagctccagaaacttctagaagatgtgtctccaatgaaatttgagaggatgaataggctagttgaagtaaaagacgaagagattacaaaactgaaagatgcgataaggttaatgtcaggtcaatggaaacataagactaaggaactcgaatctcaggtacatccatctttttccatttgaacaaaggccattgcacgtttgtgtttgatttgtctaaattctgagtgaaagtttcattctttatgaaacaacaataacagctggagaaacagagaagaactgatcaagatttgaagaagaaggtattgaagctagagttctgtttacaagaagctcgaagccagacaagaaagctgcagagggtaagtatacaagtccataactctaacattcgtgtagcttcttgtttgtgaatcaatagtgttcttatcagttttattgttgttgctgttttgttatgaatggagcacag

SEQ ID NO: 13219 - DNA, 627 bp, Arabidopsis thaliana columbia
  unsure (1)..(627): unsure at all n locations
caatttcaactcttgatggggcatttgtagtggagatatatgactttgccaccttttttgtatcggggaacgaatttggtaattgattttccatattttgtagatgtacactcttttctacttccagctcacgttgcttcgtggggggatcaagatattttaatgatggtgcgcaccattgtatatctttatgcatatgcatttgatgaattcctccccctaaaagtgagaattcatcttcattaaaatggcaatcggcaaaacgtgccgtaaacaaatcatcagtttgtggttcaagataccttattatactcggtgatacataaccgacatatatctccaatctcctttggggccccatttttgttctctgtggcggtgctctaggcacatataccgcacattcaaaaatacggagatgggataagtttggtacttgaccataagtcatttgtaaaggggattattcattatctgcgtttggtctaatctgaaccaaagccgaagcatgcaatatagcatgccctatatagaaattgggagttttgtctcaatattaacggtcttgcaatgagttgcaaccgtttaattanagatttggccatgcattttgtgtatgacatgagg

SEQ ID NO: 13220 - DNA, 1060 bp, Arabidopsis thaliana
tctgttccttgacagcaactgagtgagtggctaacgatcttggaaaatctttatgaacctcttgagaaacccgcgttcccaacaagctcctgattcctttcactgaatttggcgactgcatactcatcatcacatcaatcttagcactgtcaacctcaatacccttttctgaaatcttgtacccgagcacaataccatccctcaccatgaaatgacatttctcccagttcaagaccaagtgtttgtcctcgcagcgccgaagtaccctggacaagttagacaaacaagtagcgaaagacgagccatgcacagaaaaatcaaccataaaatccttaatcatgtcactaaagatagacattctggagaatagcgctacattcatgactgatcaacacagctccttcttcaagggtccttttgttagtcaaattgtccttcaaatgtttccggtaaatagaaacattctgaactaactcaagaaaaggaagcataacctggagctgcctcataatctcatcaaacaaagcatactccttttctctctgaattttcctctgacggccgggaaatggcagctttggcacataaggtggtggtacaacggtctcatcctgctccttctcagggacttttttctcaacttcaactttctcaactaatggttcatcatccatcttcttctcaacatcatcctttcccgagtcatcagaaatggccttaaccttttccttcttcaggattgggttgagctctttgccacttctcagtgagatagcattaacataatccttaccattgttgtagtctttcgggttcgtgataggctttccaggaagaactcccattggtcttgtagaagtagaagctgtctaagctacttgatgttcaagtgtcttaacatgtgaagctagtgactcgaatttcccatgaagatcactgtacatgttatcaaccttgacattaatatctgcagcattctttttctgtccctcaagaatttgctgcatcatgagcttcatctcattgtctcctgaagaagatgcagaattagcacctggag

SEQ ID NO: 13221 - DNA, 476 bp, Arabidopsis thaliana
ccggataatacccttaaaaacaccatcatcaaatttggagatttgagtttttggtacgaagagattaagccatggatagtggaacatcccattggcctttggatttcaggtttagctctccggttcgaactcggtttaggaaatccatatacgtcacatctttctcgtacataaaccctcttacatggtttaaactatcgcttaactcctccatttcctgcataagttaaataactaaagtaaattaatataattgaataatgcataaagatctcccaattatacatgtatgatttatgattgtatgtatgtacggacctcgttgactgtgtattgagaagtttcgtcgtaatacttgacgacttcaaggcagtagatgacacgatgtcgtttgaccattgaggcgatcctcaagtgatcggacggtggataatacgtggatctcgagttatcaggtgggccatggtcaccataat

SEQ ID NO: 13222 - DNA, 516 bp, Arabidopsis thaliana
caaggctaccctaaacccccaactcaacagacacaaaaaggtaaaaggaaacctacaaataaccaatctgttactagtcctcctccggtaagctaatggctgagttattactttttatttagttacaactgacttatcttcatattatacgactgagttattactttttattttgttacgactgacttatcttcatattatacggctgagttataacttttatttagttatctgcatattatacggctaagttataccttttatttagttattgctgagttatatttatacataggcctgagttttcattatttaatgcctgagttttctttacgtttatgcagtcgaaagaagttgtagtggtagagaaggatgctgatattgcagaggttggggttagtaggaattttgatggagaatttgctaaggccactgaaggagacaattctgatattgatttcattgagaagtctcctggttcccgcgtttacgctctacgacggcggcgaggagaat

SEQ ID NO: 13223 - DNA, 535 bp, Arabidopsis thaliana
tatcgggttcttattaatggacaacctctaggcttgatagtaccgggagaggtttaagacaagaagatccgctatgtccttacctatttattctatgtacggaggtacttattgcgaatattcggaaagctgaacaacgaaaattgattactggtatgaaagtagctacggcaagcccctcggtaactcatctgttatttgcagatgatagtttattattttgcaaagctagcaaagagcagtgtggagtaatctttgaattttttaagtattatgaagcggtttcaggacaacaaataaatttttcaaagtcctcaatacagtttggtcattaggtagatgattcacttaaggcaaaaataaaatcaacattgagaatcactaatgttggtggtatgggctcctatcttggtttaccagaaagtctaggtggatctaaaccaaaaaatttctcttttgttagagatatattacaaaataggatgaatggatggccagctaagttttttatcgaaacagagaaaagaggtgatga

SEQ ID NO: 13224 - DNA, 449 bp, Arabidopsis thaliana
tgcagtatcgttcagtctagcgagtccgaaatctgcaacctgtacgtaacaaatcaaatgctctcagtgacgaaaatgatcataatgatttctacgatctcccactaatcattttattactaaaacagcaaaatattaaaattaatttaaataatgacattgcctgagcttcgaattcatcatccagcagaatgtttgacgatttgatgtccctatggataatctttgggtggcctatgaaattcattaaagccaaattagcctaatccgtgattatatagttttacaccaaggaaatatatatttcatgttcaagaagaaaataaggaaataaatgtgatggagtgtatatatactcgcaatcttcatgtagataagcaagtcctttggctgcgcctattgcagtcctgactcttcgtctccattccaaaaccggtaagtttttgcct

SEQ ID NO: 13225 - DNA, 529 bp, Arabidopsis thaliana
aatcaagattggacttggcggaaatatgcagcagacctgagttgcatgttacacgagatgggaaattaccagttttgaaattccgcttgtctaatgaagcaaagaaggcgttgttcgagtgggttgttgctgaagtgaagttcccagatggatatgtgtcaaaattttcaagatgcgtagagcaaggccaaaagttttctggtatgaaaagtcatgattgccatgtattcatgcaatgattactgccatttggattagtagagttgctaccggcaaatattcatgaggcaattgcaggtaataaatatatatatatatatatacatacagtatttaactcaactattacttggtcattattaacttacattaattaaatacatgataggcatcggagtatttttcaaggacctatgtacaagaacactgacaacagataccatagaacaattagacaagaatatcccagtgttgctctgtaacttagagaaaatattcccctgccttttttgacgtgatggaacatttg

SEQ ID NO: 13226 - DNA, 551 bp, Arabidopsis thaliana
taactctagttggtacaaaacatgcagatgatgattctccagcttctaaacacttagcaatgcttgtgccagattttccagattcagaagtggggccgactataactgaatctccttctctaaaacacacaaacagattcacagatttatcgccaatacttaaagatttgaagcatctaaactgccaatcagacccaatcatcatcggacccggctgaacacaagctaacagagttagtttgtcctcaaatatgtagctaagctcgacaaatactgatgtattctccattccgaatagttgtcgcacctttaggtccaaatcccttaaagtgtttaaccccatcaccctcatcgccctcccgtgctatacaaaatccatctaccggcttgtacaacaacaatatcatccgctgaaaatgaaattcaattatcatcagtctctaggcagtaaaaattgaaacattatgagcaattaagcaccaaaatttactaatctgaattccacttccatggtagatccctgagttgaaagcctcaaaaaataatgaaca

SEQ ID NO: 13227 - DNA, 568 bp, Arabidopsis thaliana
tgacttttcctcttcttcagcaacgcatgaatgtaaatgagcaccgtagtcacatttctggcagtagtacaaccacagattatgcggcatagtttcatcgcaaacatcgcaggtaaatatatgatcctttgggcatggagccttgtagatcaaagcgagcgggtgaacgtgctcatcatgcttcatggtctcaggcacagacacacatcgaacatgaacatcgtactggcagatagaacaattgtaagtgaaccccgatccatactcaccgcatgcgtcacaagtatacgttgaattattattctgtggggaatagaggaggatcaaagggtgatcagggtgagacttgtgacggatctcacgtgggagatcgaaacatgacttgtgcaagaagtaatcacactctgactttgtgcacttgaaatatgcaccgagtaggtctaggtcgcaaccagagcagatgatctcatcttcaacttgggctttgtgaccgcgtaatggatggttgtggctcgggtgtccactgaagggcgggaagcattagaggtaatatcttgatttgctatga

SEQ ID NO: 13228 - DNA, 1455 bp, Arabidopsis thaliana
atacaaatgcatagcaaaaacattaagtctaaatatattatgttggtgttaaatatttgtcacatattatattttcaacctaaaatgagatgaattaatgatgaattagtaactacataactcgttaacaatatccaaaattatactaactcataagaattttaatatcattttatctacgtctctttttattgtagaaaattttaatctgcaaaacttctttcacagtttccaccttccaccatgcaaatttgcaactgaacatcattatgtcatatacaactttcacgtttcccaccaagcaaatctccaatgacggcaactaatgatagaacatcaatcattatgtcactttttaaacatgacatgcttttgcttcatttgagtcataacacgtgatatccatttgacattttttcgatcttttatcattccattgttcaattgtattatagtttagattttagaatggcgatgaacagtttacgtaattactgaaacaatgactttgagataaacgtatcggtatatttcaaatatatttgctccaaacaaatcagtaatttcaagaaaagaaaaaaaagtacatacaattttcttacacaaatttcatatttagattacaaatgacacacataacatacacaccaaacattcccaaaccccaacaaaagaagaaaaataaaactagtaagaaagataaacggtacactcaacaacagtctcaagcccatcagtgaactgatgcggctgattctgctgcgtcccgctagatcctgtaaacgtcttcagaatcgcgaatcccctcgcattcacatactttccggtacctcccattactcctatatgcgattctgataccgctgttctgagaaccccaaagaagcttatactatcttcataaccgccgctttcaaacatcgcggtgaaagccattgtctggctagttccgtcaattgcactcgccacataatatccctgcgctttcccgagtaagccagatccgagctcatggccttcagttagttcatcatcgattactgtcattgtcccgaacattagcatctgaagagcagaaccgctcgggagctgaccgccactagcaacagggaaaccatttaaaatgttgtttccgttattgttgttctggagaatgttagctgtggttccgccgagtccaacgaggaaagggacattgttgttgttgacaatcccattgttgttgttgtttgacggaactccgttgcttacaggaaggtttgcgccgttgggtttagcaaatggaagttgcccgcttaaagccggatttgcgacgactccagttacggctctggcagtgggatttgaaccaccgagtatatcatgcataaaaaataccaacgtattgtcaggaccagcacttgcaccaccaccaagagctgaaccagaacctgcaacacaccaccaagagctgga

SEQ ID NO: 13229 - DNA, 671 bp, Arabidopsis thaliana columbia
cctttgatctgctgcgttacatggtttggtgtcaagttcgatgatagtggaggatttggttttagttcattgtcttggatgatagcgagattacctgagttgtttagcttgagaatctctacaccattcagaatagcttcataatactctggattatccttcaccagaggatgcaagtcaagtcgtagatcaggtctgggcccactttcggaaccaacatatattctgaaatctagataaatcggaatccgaggaccaccactcaaccgaatcacgtccatctcttccctagccatctgatttccaaggaagatggagaagacgcgttgattggctttgttcaggtacttctcaaagaaatgaagcctcacaaggtaactaaacccggcatcgactgtaaagagccaggtcaggttgaaattcaggtttagataagtgtcttgggcgttcccatcatgcgacacgtggagtacacgtaagctggcgcagcatacgcgggagctttctcgagtgtagctgatatttacactctggcatatatggactgactccaccaattaagaactcataatcatcagaaagccaccgtcggaacatccctgaatcgttgacctcgtccaccatatgtccacctacgtttaacctgtgaacggtctcggaagcagtggagt

SEQ ID NO: 13230 - DNA, 681 bp, Arabidopsis thaliana
tagtaacgtgttcaccagcctccgaacactctctactcttcctcctctggtgaccttctgcctccgcctttatcggttttcgaagaagattgtctttcttctgtgccaagttacaatcttggttccataaacccttcttctccttcttgctcttttttgggtaataccggtttaccgacttacatgaccgtaaccgggaatatgatgaacaccggtttaggatctggtttttactccgggaatatccatctcggttctgatttcaaaccatcacatgatcaattgatggaaattcaagctgataatggtggattgttctgtccagatccgattaaacccatctttaatccaggagatcatcatctccaggtatatattccaaaccttatatataaataatgaaaggtattgctggcaaacaaattgtgtaatgaaaccagattagtaaaccggtctgatactaaccggttatggggtttgttttcttaatagggacttgacggtgtcgagaaccagaaccacatggtggcacagccggttctcccgcagttagggacggagataaccggtttagacgacccgagtttcaacaaagtcggaaaactctcggcagagcagagaaaagagaagattcataggtatatgaagaagaggaacgagaggaatttcagcaagaaaatc

SEQ ID NO: 13231 - DNA, 451 bp, Arabidopsis thaliana
cagaacactaggtgtgatcttaacgtcgagcttagatccgtgacccgccactacctttgatgtgtatgtagagtttggcgtgccaacattagtcaaggttctgttgaacgttacagtgaaggtggtaccagatcctgacaatttggcagacattgaaggatagttgaggtttcttggtaggattttttttgcttcggagcaagtgacggtttcaccagagatgactttcaggacttgcgaagtgtagttcatgccgcagagaaaggcgatgtggtctgatttgtctaattcatagacaagtccaggatttgaagcggctatcgggtcgacatgtccagatccataagcaaactctgtcgatgcgatgccagttccagtagcattaacaggccaagctgcaaatattggttaagaaacgaaataagaacagagcgacaaagggtactttgtg

SEQ ID NO: 13232 - DNA, 918 bp, Arabidopsis thaliana
agacaatctttgatttgtatgtagagttggcggtaccaaggttggtgacggttcttttgaaagtcacggtgaaggagctattagattccgaaagtttagctgacatcgaaggatagttgaggtttctttgtaatgtttttccactgcaaatgacggcatcacctgaaattagtttaagggttttcgaagtgtagttcatgccgcagagaaaggagatgtggtctgttttgttcaactcatagacaagtccaggatttatagcggctattgggtcgacatggccagctccataagcaaactcggtcgattcagccccagttccagtagcattcatctgccaagctgcaaagattcattaagagacagtataagaacagagttgtcaacacacgttacttgcgatgcaagaaagtaaaagttggacttttgtttaccggttgtcatgatggcagattggattacggaaggagaccaatcaggatgaaatgtcttgatgtacgcagccacgcctgtaacgtgtggacaagccatagaagttccggacagtacagagtactttacacgtcttttatcgcgcctgtcctcagatggtaaactcaaaggtgaatacgcagcgagaatctccactcctggtgctgatatatctggctgcaatccatccaccaaccattgtctctcaggccaggaaaaaaaaagaaagaatcaagagcataaataatatgataccttaagaatatcaaccgcaatagtgtttggaccgcgggaagagaaagaagcaactttaggagataactgattaaagattgcctcagttttaagaacagcactctgcggggacctgagaaagcaaacacaagggtatcagaggacaaagaaggagaatattaagagtaatgaaatagaaagaagactgctagg

SEQ ID NO: 13233 - DNA, 352 bp, Arabidopsis thaliana
taaaaagattaaagttgatcgattgtagattcttaatactttgaatttggtgtgaaaaatgatttgaaagtataataaatcatttattttagtctataaagagatgcaaaagatttgttaaatgtatacgttccataacagaaagggaaaaatgtgatcaggggagacatatcaatgtaaaacgtaccatgataccaaatgaaaagccggcgatgacggagttctcaatggagacggcggcaagagcaagagtgctaatatgtccggcgaaaacttgagtgacggctccgagagagtattggctcatcgttgtaaaaatggcaggccagctagtttccatagctttctagac

SEQ ID NO: 13234 - DNA, 475 bp, Arabidopsis thaliana
taacggccgccagtgtgctctaaaggaatttctcgttccatgcggattctttcgcctggcctgcttctttcgcatcccactgagcatagatttcagacgggatttcgaacggcgcatatttccagcccagttgttcgcgggtcagggcaatttcagcgtcgcccagcggcgcaccgtgggagtcgtgggtaccggctttgttcggggaaccgaaacggatgatggttttgcacatcagcagggaaggtttgtcagtcactgcgcgcgcttcttctactgcgcgtttgatagatgccgcgtcatgaccgtcgatgtcgcgaataacgtgccagccgtaagcttcgaaacgcattgcggtgtcgtcggtgaaccagccttcaacgtgaccatcgatagaaataccgttgtcatcgtagaatgcaatcagtttacccagcttcagcgtacccgccagagagcaaacttcgtgggagat

SEQ ID NO: 13235 - DNA, 1998 bp, Arabidopsis thaliana
atcggtaaacgtagttggaaagtggtggcgacgtcgagattcgggatgttccggcgtggctttccgatgaaggttcttactcgtattaattcggggccattccgaatataacaggtgtaaagatcaactacacggataaaactcccgcgtacgttgcgccggaagatgtatacacgacgtgtcgcctgatggggacaaagacagtcctgagctaaacctgaatttcaacctgacgtggctctttgaagtcgatgccgggtttgcctatatagtgaggcttcatttctgtgagacgcaaccggaagtcaacaaaacgggtgaccgcgtcttctccatcttcttcggatatcaactggccatgcgtgaaatggacgtgtttcggctgagtggtggttttcggctaccgatgtatctagatttcaaggtacttgtcgacgccgacggaactagccagagacctagtcttcgagttgacttgacaccttacaaagaggactatccaacctattacgacgctattttgagtggtgtagagattctcaagctgagtaattctgatggtaatcttgcggggcttaatccaattcctcaactaagtccaccaccacaatctataacgccactaaaaggaaaaggcaagtcatcacatgttttgccaataataattgcagtggttggttctgcagttgcgctagcgttttttgttcttgttgttgtcctcgttgttatgaagagaaagaagaagagcaacgagtctagtgtagataccacgaacaagccttctacgaactcgtcatggggtcctcttctgcacgggacaggctctacaaatacaaaatctgcctcatctcttccatcagatctctgccgtcgattctccatctacgaaatcaaatccgccacaaatgatttcgaggaaaaactaatcataggagtaggcgggtttggttctgtctacaaaggacgaatagacggtggagccacacttgttgcggttaaacggctggaaattacatcgaaccaaggtgctaaagagttcgatacagagctcgagatgctttcaaagcttcgacatgtacacctcgtctctctaatcggatattgcgatgacgacaacgagatggtacttgtctatgagtatatgccacatggtacacttaaagatcatcttttcaggagggacaaaacctctgatcctccattgtcatggaaacgaaggctagagatttgcattggagcagctcgtggattacagtatcttcatactggagccaagtacacgatcatacatagagacatcaaaaccacaaacatacttctcgatgagaacttcgtcactaaagtatctgactttggtttatcaagagttggtcctactagtgcttctcaaacgcatgtctccaccgtcgttaaaggaacgtttggttacttggaccccgagtactatcgccgtcaaatcttgaccgaaaaatccgacgtgtactcttttggagttgttctgttggaggttttgtgctgtagaccgatcagaatgcaaagtgttccaccggaacaagcagatttgatccgatgggtgaagtcaaatttcaataaaagaaccgttgatcagatcattgactcagatttaaccgctgatatcacttcgacctcgatggagaagttttgtgagatagccattagatgtgttcaagaccgtggtatggaacggccaccgatgaacgacgttgtttgggcgcttgagtttgctcttcagcttcacgagactgctaagaagaagaatgacaacgtggagtctctggatctaatgccaagtggtgaagttggtacgaccacggacggagaagatgacttgtttagtaggactacaggacacgttgggaaatcgaccacgaccgatgactctgttctagttgttggtgatgagaggagtggttcgagttggggagtattttcggagatcaatgaacctaaagcacggtagatttgatggcttggtaa

SEQ ID NO: 13236 - DNA, 381 bp, Arabidopsis thaliana
caagatacatacatacatacatacatacatacatatatagagagagtttgactgtgtgtctatactaccaagtgtagactgtcgagcggatttgtctctgtactcttcttcctcaatgtggttctttagttattgtgttcagaaagatgcagccagaagggccttttcaccttctccacatctacgatgaacatccttcaacctatccgctgatctacaaatcccactgctagctccaatcgaacgaggcaacactgatgttgcacgcctagcgccttccactcacaatctgcagttccccattgatcaattaatggtatcgagaacacttgcatacttggacattcataagggcacttgacatggttttcctgttgtacc

SEQ ID NO: 13237 - DNA, 1302 bp, Arabidopsis thaliana
tcgattttggacaactttgtgtatattatatgctttcatggagagatagatgtttttgaatggtatctgttatgataattggatgaaccatatttcctatatctctcctgacatcgaataattcagatattaatgcttgtgttcctctctatatggaacttcaagtttggctattctgttacattcttacttttgcacaactctctctggctataagatttaagaatcatctctagctatctgggttctaaactattgtttcttttgtgtattgttgtagtatggcaggatccgcaccggaaggaacacaatttgatacgcgtcagtttgaccagaggctgaatgaagtgtaagtcctaagatctttagtttcattactcgtttttgatgagattttttttgtatttgctaatcttattgtttgtttgggtgcagtctcgatggacaggatgagttcttcacctcatatgatgaggtccatgagagctttgatgccatgggtttgcaagagaatcttcttaggggtatctatgcttacggtaagtgaagaaggtttaaagaaacaaccttttgtttgttatgttgggattcctattaactttatcgtatgtgctctttcctgtgattgattggttgatttttttctaggtttcgaaaagccttctgctattcagcaaagaggaattgtacccttttgcaagggtcttgatgtgatccagcaggcacagtctggtactggaaaaaccgccactttctgctctggtgtcttgcagcagcttgactatgcccttctccagtgccaggctctcgttttggctcccaccagagagcttgctcagcagattgagaaggtcatgcgtgcccttggtgactaccaaggtgtcaaggttcatgcctgtgttggtggaaccagtgtccgtgaggatcagcgcattctccaggctggtgttcatgttgtcgttggaactcccggtcgtgtttttgacatgcttagaagacaatctctccgccctgactgcatcaagatgtttgtccttgatgaagctgatgaaatgctctcccgtggtttcaaggatcaggtttgttatcttcttcgaagtttgaatctagactctgtggttatctccgatattgactcggtttagtgcagttttgtggtgaatttgcagatctatgacatattccagcttctcccaccaaagattcaggttggagtgttctctgcgacaatgcctccggaagctttggagacacaagaaaattcatgagcaaaccagtgagaatcttggtgaaacgtgaatg

SEQ ID NO: 13238 - DNA, 494 bp, Arabidopsis thaliana columbia
gcggtggggcggagtcaacacgctgagtggtggagctctggaatagttattgcggcggcggatagttgcggtagtggtgggggctgacgttgaggctccgacggtttgaggcggctgcgtcagaggaacttgaggcgctgccgccggagtgaagtcgtactgctgaggcagggaagctggtctccaagcggtgtggaccctccggctctctgtgtaacgttggcgcgtgtgtcttcctctttcgtgaacctccacgaccgtcgttaggcatggttgaagagagacgatgagatcgaagaaagaggactatcgaagatagagaagatgattcgattcgaatcagatctgagaagaagaagaggtgaagaactcgactgggtgtaggtagatatgagatgagatggatcgaagaataagttgctagagaagatcgtagatgatgaacttgaagccgaagatcttagaagaagagttttgtatggatgaaatgagaa

SEQ ID NO: 13239 - DNA, 606 bp, Arabidopsis thaliana
tcatgactggtagatctttcagcatgccgaaggttttcttgaacacctatccgcaagatcagagttaggtcacaaggcctatactgaacaagtttcaaccttcttgccatagaaagtagccacaaagaataacatttagctgacagaggctcctagatcgcacacgcaatcgctgaaagctaattccccaatagaacatggtagagtaaaagatccaggatcttctaatttttcttgaacaatcctcctatcagcagctggtgatggattagcatcacattcatcatctgaatgctgattgtccttccaagtatctgactttggtaatcaatgcctccactttggcgttctggtcattgtaaatgcagtccagcttatggtgcaattcaattaacgtcttagcaatttccatgcagctagatgcttgtccctgtagcagttgttgtaccatctgcttcatttcagcatcaggagcagcaggaccttggtgttgctgaggtacaaacccaggtgttggttgcacttgtagttccctgaaattgctgcttgggacaaaacattggttgtaaggacaaaaggtttgtctgacttgttgtgttgtggaga

SEQ ID NO: 13240 - DNA, 594 bp, Arabidopsis thaliana
tagtaaagagactttataagaacagagtttaaaacagaggttacttgtagggcaagatactaaatattggatttagttttcgcttaccggttgtcatgatggcagattggataacggaaggagaccattttggatggaaagtcctgatgtacgcagccacacctgcaacgtgcggacaagacatagaagttcccgacataacagagtactttacacgtcttttatcgctctcttcctcagatggtgaacccaaaggtgaataggctgcgagaatctccactcctggtgctgatatatctggctgcaatccatccaccaaccattgtctctcaggccaggaaagataaaaaaagaatcaagagcagaaataataatataccttaagaagatcaacagcgatgaagttaggaccacgagaagagaaggaagcaactgtaggagctgtctgattaaagaatgcctcagttttaagaaaagtcccttgcggggacctgagaaaacaaacacagaggtatcaggacaaagaaggagaatctagagtttttgcgagaagaccgttagctaccttgtggagttaatgtaagagacgagaga

SEQ ID NO: 13241 - DNA, 512 bp, Arabidopsis thaliana
  unsure (1)..(512): unsure at all n locations
cgccagtaaaggttgctggagctgaggaagctgtcagccatggtgtccgcggctgaaacactctagccgtctccaacgcatctgcctcagtgtctcatccctcgtttcttaagatcaataccgggacctctactgcagcaggtcagtcagataacaatcaggtcgctcatgtgtctgggccatctgcagttgttcattttgatggtgcaccgtcctctccgaagagagctcggacccagccggaggtgcatctggcggctgagtttgtcgtgagcgaccagggggtcgntccctcagagaggagaagatggaacctgcggctgctattccggaggcagattcatcgcttggagcagaggagggaggagctctccaaaaaggtgatggacctgacttcgactgcacaaggtgcgaagaaggcggttcacgatgctaaggttgagctggctactgcgtattcgaagctgctggctgggatcaaggagaagtgggtcgcaaaaaggagtcacggt

SEQ ID NO: 13242 - DNA, 412 bp, Arabidopsis thaliana
tacaagctaagataagagttccttattacctggagaagtaacaatctctttcaaatggatgacattttcatgatgcagcttcttcagaattttgatctcccggatagcggttatcggaaactccatgcaaacaatgaaaacggaaatataagtcatacgaaactcacaaaaatttgcaacttgtcaaagctagtactggtagttcaaatgtagcttaccccttctctttcattgtccatacggatctttttcagagccacgatttcaccagttttaatttctttagccatgtacacttggctgcaaaaccaaattttaatatatgaatctaaacaccatcaaaagagacagcttcagaagtttattgcaacatatatatatatatatatatatatatatatatatatatcta

SEQ ID NO: 13243 - DNA, 439 bp, Arabidopsis thaliana
acctcgcggtacttgtttcataataattagttgcaaagaaccagaatattgttcttggacaattaaagcaagtgcacagtaccggcctcccgcttgccgtgctcgtagatgtcaaccgagtatttctgacggtacaagaccatatctgcttctcgaatggttgtcaattccgaaaaagggtgtccaaacgcaagcaactccaagaacttcatcgtgtatggcccgcaatctcctgtagttgggttttgagcaacggtaggacaacgcacatactcaaaaggttcaactgagtatggagaaatcaatacatcctggcacatcgctctgactaaatacggcatcatttcgcaaataggagtcattctcgccttcacagccgactcccgcgtgtgcgatattaaagcgtcatacacagttattagctgttcattaaggttga

SEQ ID NO: 13244 - DNA, 550 bp, Arabidopsis thaliana
tcatggatgcttttgctggatacaaccaaatcatgatgaaccccgaggaccaagagaaaactgcattctacacagagcaaggtattttttgttaccgagtgatgccattcagacgtaaaaaacgccggggcaacttatcagcggttcgtcaacaaaatctttgcgttatagatcgggaaaacgatggaagtgtatatcgatgatatgttggaaaaatctatagaagaggaggaacacatagcccatctgcgcgagtatttctggtagcttaacctctataacatcaagcttaatccagccaagtgccgcttcggagtgagatccggtgagttctgggatatctagtcacgcatcgcgagcattgaggcaaatctgaagcaaatcgaggcgttattgggaatggcatcgctcaaaccaaacgcgaagtgcagcgtctaactggaagagtcgcagcccttaaccgattcatctcccgatcaaccgacaaatgcttggcttttcacgacgtgctctgaggaacaagaagtttgaatggcaactcgatgcgaag

SEQ ID NO: 13245 - DNA, 500 bp, Arabidopsis thaliana
cttcttgatcgaatgtgtcattgtacccttggaaggcttccgtgttgccgatcgtctcgcatgcgttcacagctcagttttgattctttagaagttgggccatcatgttctttagctcagacatctcctttgagtcggagtccttagaacggatggtcctatcaaaatccgttgaagcattactgttgctggttgccaaattttgaatgagggcacgtgcatcgtcgacgttcttagttgtgaagtcttgctcgccgtatcgagtgacagttggaatttggcatgcagtcctttatagaatatacttatgagcttaccttcggggaaaccatgatgaggataatcacattcgtagtccttaaatcgttcccatgcttcatagaaggattcgaccagtccttgttggaatccttgcagcttgttcctcaaagagttggatcttgacttcgtgtagaagtgatttaggaaggctgagcttccggatgctctcggtcttgtgg

SEQ ID NO: 13246 - DNA, 498 bp, Arabidopsis thaliana
catgtatgtgctgaatactcaaaacaaaaatgtcaaatccgagtttcaagcttgatgataatgccccaactgtaagctgggctgaatcaaggagtggaggagaaggagacttttctgcctctcaggtttacttctttagaatctatcttacaaataaattatagtagcagcaacagtaaccttaccaacaaaatgtcactaccaagaaattattatcatagagacgtgttctgcaaatattcttctttctaaacaatgaaaagctgtgtggaatgattgcaggtcaaggcattgtacatcaagaatttacctagagatataacacaagaacgtctaaaggcattacttgaacatcacgggaaaatactgaaagtggtgatccaccagcaaaaccaggaaaggaagacagtagatacggatttgtgcactacgcagagaggacaagcgtaatgcgagctttgaaaaacactgaaagatatgagattgatggtatgttca

SEQ ID NO: 13247 - DNA, 517 bp, Arabidopsis thaliana columbia
acaaaagaaatgcaatggtattaacagtgaaatggagtgatacctcagtgtttagacgaagaggttctggacaaactcgtccaggcggtcttgtgtgtactcaggatcatgggtggaagtgctggggttatactcggttgaccggtcgagcatgtaccccgagtataactctttgcggctcgggtcagcattcagaaccaactggttcgctataccgggtgggcgtgtgttgaagcggcggtctgagaaggtggagctcctcccacgctcataagatgaggctcttggtgggtcaaaacgaacgttcctttgtgccgccacactcatcgagttgcttctcctgaactcagatggaggtggtggtaatctctgccttctttggacctccagaatttgaaccgccataccgttcattgccctcttcatctttctcaccttctttttcacccacaaatgaactttctctgaaacttccgtagaccctttagaattcccatctcttgtgtacttggccggg

SEQ ID NO: 13248 - DNA, 1808 bp, Arabidopsis thaliana
ctacatctatatctctgtctatatttgtatatatacacaaataaaacccaaattctcattagaccccacattctgaaacccaaaccccacacttttagagaaatgagtagtcatgatacataccaaaaactcattttgttttgcctatccatattctttcttcaaaacatattgaagaatgtggagggcttggcatgtaactggggtacacaagcgagccatccactaccaccaaacatagtggtgaaactccttagggacaatgggttcaacaaagttaagctatttgaagctgaccctggtgcactcagagctcttggtaaatccggtattcaagtcatggtcggtatccccaacgatctcttggcaactatggcatccactgttaccaacgcagagctttgggttcaacaaaacgtctctcaatacatctctagatatggaaccgacataaggtaatttgcattgcagttcaataggccattagctaaaacatgtttttaagtttgtcaagcttggatttttaagctaaaacatgcttaagcttctgaagagtagacttttaaactaaaaacaaccttcgaaagcttagacttttaagctaaaaacatgcttgaagtttctaaagattggatttttaatcggtgatcagatatgtagcggtggggaatgagccattcttgaagacctataataacagattcgtccgatcaacatatccagcgctgcaaaacgttcaagcagctctagttaaagctggtcttggtcggcaagtcaaagtgacggttcctcttaatgccgacgtctacgaatccagcgatggtcttccttcttccggcgattttcgatcagacataaaaaccttaatgatctctattgttcgattcctagctgattccgtctcaccaatcaccttcaacatctaccctttcctctctctcaacgctgatccaaatttcccgcgcgaatacgccttcttcccaaacggaggcggcggcggtggagctaagcccgtcgtcgatggttcaatctcttacacgaacgtcttcgacgcaaatttcgacactttagtctcggcgctggagaagaacggatttgatgcgaacaaaattgaaatcatcgtcggagaagtcggatggccaaccgacggtgatcagaacgcaaatcctgcaatggctcagagattcaatcaagggttattgaatcgtatccttcaaggacaaggtacgcctcgccggagaatggcgccggaagtttatatattctcattagtagacgaagatgccaagagcattgatcccgggaaattcgaaagacattggggaatattctcttatgacggcgccgttaagtatcctctgagtctcggtaacggccgtccgttggttccgactaaaggtgttcgttaccaggcacgtgagtggtgcgtgctctccactcaggctgcgggtaacggtgctgccacttggcaggcttctgctacgtacgcgtgtcaaaatgccgactgcacctcgctcgggccgggttcctcctgcgccgccttggacccgaccgcgaatgcttcttatgcgttcaatatgtattttcaaaaaatggatcatcgtcgtggctcatgtgattttaacaatcttggggttgttactaagatagatccgtcaagtggttcctgtaggtttcctatcgaaatcgacacgagcaggcagcagatgtcgaatccgccaccgaggaattcaggtgcatctgaagcaaagtataggttgggggcagccgtggtgatggtaatctgtttggtgttctctgaatgggga

SEQ ID NO: 13249 - DNA, 1082 bp, Arabidopsis thaliana
tgagaagctcaggttcggattggtggtatgaagatatctcttatcttagtgtagatttgtttaaaagactcatcaagacaatggaaacaaaaggtatacgtgctgaaagtttagccggcgctatgatgtactatgcgagaaagtacttaccgggtttaggacggtggcagagtggaacaagtgacagtagcaaaagcagaagaagagtagtgagttttaatttggcaaaagcttcttcaccatcctctatgcctcctcttgatcagattgctttgcttgagaccattttaagtcttttacctgaaaagagaggaagatctttttgtaagttcttgttaggtctccttcgtgttgctttcattttaggagttgatgggaactgtgtaaagaagttggagaaaagaataggaatgcagttggagctagcaacgctcgataatcttctgattttgaactattctgattcagagacgttgtacaatgtagattgtgtagaacgaatagtccgccattttgtatcatcattgtcatcatcatcctcacagttacctgagttctctcctccatctttggatccagtgacatctccttctccagcaccgttaaaaaaagtggcgaagctagtagatagctacatggcagaagtcgcttctgatgtgaatctgaaaccggataaaatgcggtctcttgcagcagctcttccagaatcttcaagaccgttgtatgatggtttatacagagcgtttgatatttatttcaaggagcatccatggctatcagatagagacaaggaacaactatgcaacatcatggactatcaaagactctctatagaccgttgcgctcatgcttcccataacgataggttaccgcttagagttgttctccaagtactcttctttgaacaaatgcatctcagaaccgctcttgcaggtggtctaaatgttgcaaacaccgaaacagctcatgcagtgacgatccctggtggaagaacaggacaggagatagttcagagagatggttgggtgactgttgtgcgccaaaaccaggttttgaaagttgatatgcagaaaatgaggtca

SEQ ID NO: 13250 - DNA, 611 bp, Arabidopsis thaliana
  unsure (1)..(611): unsure at all n locations
tagtaacgtccgccagtgtgctctaaaggccaccatgaccaggccgacgacaatcagcgacacaatggcgacgattttgatcatcgcaaaccagaactccatctcaccgaacattttcacggtggcgagattgagcgtcacgagcagcactatcaccgccagcgaggcgacccagtcggagagatcggggaaccagaactgagcataagccgtgatcgccaccacgtctgccataccggttacaacccagcagaaccagtaagtccagccggtgaaatatcctgcccacggcccgagtaaatcggaagcgaagtcactaaaagatttgtattccagattcgaaagcagcaattcccccattgcccgcatcacgaaaaagagcataaaaccaatgatcatataaacgaaaatgatcgacggcccggcaaggctaatcgttttgccagaccccataaacaaccccgtaccaatggcaccgccaatggcaataagctgaatatgtcggtttgtgagattgcgccgtacgacntgttcagccggagcctgatcatcggcaacgacttttacctgatctaccatgtttttttcttcctgtacctgtctgtgttgtc

SEQ ID NO: 13251 - DNA, 602 bp, Arabidopsis thaliana
tagtaacgtgcgccagtgtgctctaaagggggcttattaacttcccacctttaccgctttacgccaccgcaagccaaatacattgatatacagcccggtcataatgagcaccgcacctaaaaattgcagacccgttaagcgttcatccaacaatagtgccgcacttgccagtcctactacggggcaccagtaacgataacggtgcaacccgccaggtttcatagcgtcccagtaacgtcccccagatcccataaccaacaattgtcgccacaaacgccagatacatcagagacaagatggtggtcatatcgatagtaaccagactgtgaatcatggttgcggaaccatcgagaatcagcgaggcaacaaagaagggaatgattgggattaaagcgctccagattaccagcgacatcaccgccggacgcgttgagtgcgacatgatctttttattgaagatgttgccacacgcccaactaaatgctgccgccagggtcaacataaagccgagcatcgccacatgctgaccgttcagactatcttcgattaacaccagtacgccaaaaatcgctaaggcgatcccgccaattgtttgcatgcag

SEQ ID NO: 13252 - DNA, 541 bp, Arabidopsis thaliana
aacaccagagtatatatgtgtaacaagggaggtaactgaagcaacaaaattaggattgcaatctggaaacatagggtggttccatataggaagtatgacatccagaacctgagactgcagatttcgcacaaatgtctcaggttcccttggtacaggaaaaagtccaatcgacaaaccaactgaggctggctgcacaagaagcttgcgtttgagaggttggagataaaagatacgttgagttaacaaaatagtccagcgctcggcaatagcttgcagagtatctaccagccacttactgtgagaccatatatttctctcacctggcttctcattctcagtactagatgcaggaatagaaaacggcactgtccaaagcaactgacttgtagcttcaaatgtggtgagaagttccttaaacgttccatggacataaaaactattcaccatagctgtaaaacagaccctccttcgagtatcaaatgaaaggaaagtgatatcatctaccacttttccaaggtaccggcacttcactgacagagat

SEQ ID NO: 13253 - DNA, 467 bp, Arabidopsis thaliana
ccattagcctggatgctcagaacaaggtcctcaaatctctcgatatgatccattggctgctcatgagataagccatggaaaggacgctggccaactaaagcaaagtagccaggcttcagctcataatcgttcctctagaatggtgggggtacaatcgctgatcaattagcatagaacaggtatgacctgttgaaatccccaagagtacgacgtggttccgcagctgaaggaataggtgcaggaatctggtgttggtgtcgatcgacacctctgttgtgtcattcgacaccgactgcatcggcgtgctgctcccgatggtgtcgatcgacacccagttggtgtcgctcgacacgtgcccttctccatctcaagcagctaactgcgcattgaggcgcgcttgatcctcattggcgtcctcaggtaggatgagtccatgatcatccaatctctgaccagcctcattgtag

SEQ ID NO: 13254 - DNA, 627 bp, Arabidopsis thaliana columbia
ggtaataaaatcgctgaggaatggtacatcctaggacgtgatggtgtggacataacggtgaagagatgatcaaacggttgatatatcacaggttggataatcgggtcacgtgctttctcccaaccggccgtgccagctccggctccgtttacgatgatgacgtcacctgttggtaagagtagcatgtctcccataacacgtggcaatggcatggtttccatttcccaacttggactctgatcggatagttttagcctcccgcatgtggaggtggcacgtgtgaatccacgtgagaagccgcctttaggagagcctccacataccattatctcaacttctacgttagcatcgttggtatcatctaatggaaatagtatagaagaaccactgcttggatagttccttggatcaccacctggaatctctggaaactctttcacgattcggttctttttgtaatcgaacacaatggatcttgtgttagcgaagacaaataagtttccatcaggtaaaagatgtatgaacggatataagttgttctcgttacttccatctgaagtttctctaagaaactcaagtcttgagcttctagaccgagaatcatgtcggggaaaaagttcatagttg

SEQ ID NO: 13255 - DNA, 557 bp, Arabidopsis thaliana columbia
tcgttatggtccacttacggccgggcggatctgggttttacagacttgtcaacgatttaggtagaacgatgatgatattaaatgagcacgaggcaagtgaatcttgtttatattttccattatattttacccgtttttccctacaagaaaccccaacacccttaagggagatctcaagtacctctctgttttagtaagtcacagtgctaaagtgataatggataacatagaaccaccctttagtggaaacatccatgctgagaccgaagtaaagaaggaggagaagaaaaagatgaagaaggaatcggtgtcattgatgggtttgtttagtgcagctgataatgttgattactttctgatgtttcttgggggtttaggcacgtgtattcatggcggtaccttccgctcttcttcgtgttcttcgggggaatgctagattctcttgggaagctttctacagacccgaatgccatatcttctcgcgtttcacaggtttcttcagaaaccgatattctttctcttggtttttggacataaagtcataacacttttgttat

SEQ ID NO: 13256 - DNA, 1649 bp, Arabidopsis thaliana
tccccctctagcgatattactagataaaatttccaattctttttgggggaaagtaataactaactactaggaaacgaaaacctctagtattatatatacgcatcataacgatagaacaacactatctctcgcattctccataatcacacaacaaacatcttcttctaacttgtgagagtaattctgtagatcgacgtaacacaatgacaaacatcaatcgcttatcattgtcgagaatgttcaatgctgtacacgagttcctgaatgaggagcctttggagattcctcctcctccttcacgtggcggctattcctacttccacatccgtacaacggagatggatttgcaaaggatgttcaacttcatgactggaagcgaagatttgaaagacgacatctcagtattagacacgggaatgcttgtggatggcatcttttttgacgtctgactccgattacttcatggtcatcacaagaaacaagaacggttccaaaagcctacagaaactcatgaggatgtcagatgacatggacgtcttcttctttgtggctatcatgcgcctcttcatccatgtcatgatcgacaaatacgcctcctacgtggcgatacaggggatgagaatttttaaacaggacaagagagagttgatgtatgatcacattcttcgatacgcgcttttcctggcgcgtgaccagtatggttgcattgcgctcaacgaaatcataaaagagttggacgatccttactatagagacgagctcatggacatagtctcaaacaacgctcttttgctaagcaacgatgcttatggcaactttgtggtccaacacgtgcttaaactacatgactcccgttgcacgggtaacattgctgataaactatgtggctactgcgttgagctctcgtttaaaaagtatggaagctacatcgtggagcgacttttggaggtgagggacataccaatggcaacaattgttctggatcttttagcgtgcaagacagagatgttgataaggttggcgaggagcgagaacgggaattttgtggtgtgcaaattactggaattaacaaatgacattctcactgctgatctattttacagtttggtgaataagctcaggccttatcgctttctcttgcataggtttcctgaaagcaagattgtagccatcttgggctcaatgcgtgtcccaaactagttaatgctcgttatgttttgagtgttctattttttctttattttttttttaaataaggtttgttgattagtgaaagtctctagtagaagaaatttgtcaatttattttggttttaaagatccaaatttgattctaactaatcaaacataaaatattgcagcttctatctattttacagttcaaaaatagtattacatgatatgtatatagacgaacaagttacatagtaaaagtctatttctttatgatcaattctcaaatttgtgtggtaattagcagagacgagtcgccaacaaaaataaacaaataacaaatcttgcatgaataataaccacaatcaaataatttacataaccaattatctataaggaagagtattgagtttataaactaatgtatatgttaagagtcacaaaactataaaaaaaaagaggccaattcttttgcaa

SEQ ID NO: 13257 - DNA, 2164 bp, Arabidopsis thaliana
tgcgtcgagctctcgtttaaaaagtatggaagctacatcgtggagcggcttttggaggcgggggacgtaccaatggcaacagtggttctggatctgttggcgtgcaagacagagatgttgataaggttggcgaggagcgagtacgggaattttgtggtgtgcaaggcactggaattaacaaatgagatcctcacggctgatctgttttacggtttggtgaataggctcatgccttatcgccatctcttgcataggtctcctcgaagcaagattgcaaccatcttggactcaatgagtgtcccaaactagttaatgctggttatgttttgagtgttctattcaaacctcaacttatcctagattcccatttagcagttttcttgtcagtattgttgattgaaaagattcatggacaatctcataatttgtcatatgctcagtaacactctgaggaatttttgggatattggatactgacaatcatttcccttcacatttaactattaggttaatatagttcagcttttccctgcatttatcttcagagaaagaaaaaagaacaaatactagatcacaatccaataagttagtaaacatatattcataaatgttcaaaagtcaaaactttgtcttgtggttttcttgtcacttttcaattgacagaaataaagacatttcttctgcttgcttccgttgagaatctatgcattttgtgcctagtcaaattatcttatctaaagcgtgtccaagagaggtaaaagccgagcagagtaggtcatagaaactccattgtcatctgcaggagacttcaacataaacaaagaagaaagagaagtaagctcattcagaatacacataaattaaaacaatgccatcattgagaaagtcaaagaagttaaactacatgcaactagagcatttcttgatttagaatatgttttataataacttgttcataccactattccaaatgctcagaataagagatatgtgcacgtatgtaaagatagaatatccaaactgaaaacatatgaccttgactaattaaacctcgcattaaacaacaccgttgtatatgaaagaatctttcttggctattctttgattgtgccatccatgtaaaggtcaactctgcagttagaaaatacaattctcatggaaaagaatctgaaattcacaaagtaaggcgggagagaagatcactgatgttctacatggctggagttctaagatcactgaggttctggatgataatatgtgtccaggtgttgtctttggtgctagctcaagaccgggatgaatttgtgtaccatgacttcagtcaagcagacctgcatcttgacggcatggcaagtatcgatgatggccgattgcatcttacaaataatacaactaagagcaccggtcatgctttctggaaaattccaatgaacttcacaacatcaccttccagttcactttctttttcgacagagtttgtcttcgcaatctttccattgctaggtgacggtcaaggaatggcgtttgtggtagctcctttcatggacatcaggtatagtggtgatgcagcctcatacttaggacttttcaatagaaaaaatgataacaaaacagaaaaccatatcctggctgtagagcttgatactaattcaagccctgaagcaattgaagatagtgataaccatgtggggattgatattaacagtatcatctcagaagactctgccaatgctagttactttagcggtacggagggaaagaacataagcttccggctagctagtgaaaaaagtattctggtatggatagattataatggaacagagaaactactaaatgtaacggtagctccagtgccaactccaaaaccagcattgccttacttgtcaagctccatcaaaccaagaaagcctctcttgtcaagattcatcaatatttcagaaattttcaatgggacaatgtttgtaggtttctctggatccacaggcacagtcaaaagtgaccaatatatccttggatggagtttcaagaaaggttgacaagcagaaagccttgacttgtcaaagattttggatcctcctaatcgacctccaccaccatcctctccaccaccacctcctccgccacctcccactccgccaacctcaaggtctaaagactctaa

SEQ ID NO: 13258 - DNA, 545 bp, Arabidopsis thaliana columbia
gatgttctctggttgattaaattgtgcctgctaaaacgtctataggatacacagaatgggctcaaaagccctgtatcagtatataattagttagatggattgatgctgtgagccttgtgattatgtatgattcgttgaacctttcttagatcattgttgattgccattggtaaatatttgtaggttagggccggcttttcaagatggggaaacgaaagggtctacaatggtagatcgggtgagatgatgcgctctctgatattcataggcccaactttctaccagcgacttgtctcacatgtcagagaacaaagtcaagttcaggaacaccggaccagatccaccgctcacacgccagccagtcgcagaccggaataggtgtggcgggataagatttggagatatggagcgagactgcctaatagctcacggtgcatccggtaatctgcacgatcggctcttcactctaagtgactcttctcagatgcacatctgcaggaaatgcaagacctatgcgaatgtgatcgagaggactcaggcagtgg

SEQ ID NO: 13259 - DNA, 581 bp, Arabidopsis thaliana columbia
  unsure (1)..(581): unsure at all n locations
gtctcagataagatatcgacccaatgctccgttggttctcaaaggaatctcttgcacattcagggaagggacaagagtaggagttgtcgggaggacgggaagcggaaaaagcacattgatcagcgcattgtttcgcttggtagaaccagcaagtggttgtatattgattgatgggattgacataagtaagattggccttaaagacctgagaatgaaactgagcatcattcctcaagaaccaactcttttccgtggctgcataaggacaaaccttgatcctttaggtgtttactccgacgatgaaatatggaaggtgaaataacaaacaaagactgagatttccaaatcaaaagatataaaatctttctgataaaaccattctttttgcaggctctagagaagtgtcagctcaagacaacgattagcaatcttcctaataaacttgattcttcaggtaaatggtaaaaaagctgtaatattttcatttcacaaaaaaatgggtttgatgacacttaggtttatgtnttttcattggtgagaagtgagtgatgaaggagaaaactggagcgtgggacagagac

SEQ ID NO: 13260 - DNA, 557 bp, Arabidopsis thaliana columbia
caatgaagtggttgttgtgtctgtcaatgaaccctcctctgatgtgactgacaaggacattaatgattttgttagttaacagcacctgtcattctaagtgcaaacactatttttttttcctttttaatataatgtgaccacaagttaatggtgtggttataatatacttaggcatcttggttgggtggatcatatgttgctggagctgaaccatcgtctggattgttgagtatccctctggctgggggtgctaatgtggagttcaatttggaaaaggtaatattcttaattccatgaaaaattgtatgattttatgtgggagaggttgctgtattacctgtagatattgtgattttcatatgaagaaggcacatgacttttgtttctctgggcaggaagcagagaggaaatttgcattgaaccttttgggtctatatcagaatatcagacaggcagtcagcgtttatgacgatttatctcatggtattgacagaactgccgaattaacggttggacgctttggtggtatcgatgtaagggcatttttgttattgggt

SEQ ID NO: 13261 - DNA, 534 bp, Arabidopsis thaliana
ccgcaaagagatttttcacctaatgaggagcaccaaaggaaacttggatggctctttcatggaagagtaaatgctgggtaaaactgcgtgaccactgaacccaaacccgaatatcccaatagcgacgggtaagttagcgagatcaatagcttttccacccgtgtgaaacccgactccatcaaccgacccaacccagaagagacaaagagccagcaagatcgaaacaaagactcctccggctaaaagaatggaacacacatattaaagaatatatgaacgaatctcgaagctatattggaaggatcttatgatcatttatatagaaaatggaacctgagagataggagagtaagctaaggtctttgagccaaactgtaggaagaacaataagagtagctgatatagcaaagatctgagaagaatctagagatactccaacgatgtttaatgtaatgttggggaaactctcgataaattatcgctcatcatgattatatactcacacaacatacgtataactccatgtacagaagt

SEQ ID NO: 13262 - DNA, 600 bp, Arabidopsis thaliana columbia
gatgtgatggtgctccttcgtaaagggagatttgcagttggaacgtacaacaaggtaaagcctcgcaagtatggcccgtttaaggtgttgcggaagatcaatgataatgcttatgttgtggctctcccgaaatcaatgaacatttccaataccttcaacgtagctgacattcatgagtatcatgcagacgggggtcctttatccagaagagacttgaggacaagttcttcagaggtggaggagactgatgtaggagagatttagcagttttacatttcttttcatatttccttatttcaagttttctattttgcttagagttttctattttatgatttggtttcttctctatatatagaaagaccctaagttttttgctcgacacgttttatcattttaattaataaaagcagagagtttttctctaatctggtggattccaaagtttcaactttcaaattcgacgcttgcgaacttgattcatgtttaggcatagtgattgctattcctagaggttccgactccgtaagtattttaattctatataaataaatgaagaaaaaagtaatcataattacccaaataaaacagtttgtttat

SEQ ID NO: 13263 - DNA, 365 bp, Arabidopsis thaliana
cctagcacaatcggtgtgagagctaacgcgtatttggtcattggtactaccaccttaagtaagagaaaaagaaccaatcacattttagtaattatatatatgtcgagacaaacatgtttaccgagttttaaagttatatctcaccgctgtccaaactgcgattttagatgctgtgtactgttgtggcatgtttagtgtaaactgcgattgaatggcctcaccaaacatactgtagccgcaaatcgccacggcaatgtaaaagaatacgcagaaaccaaaactgcaataagaaacagaggaatgcgaattttgacctaatattatctgaagtccattataagtaaccttaatcatagagatttttc

SEQ ID NO: 13264 - DNA, 1309 bp, Arabidopsis thaliana
tttttttcatgtaaaattcagacactctgtggatctcttgaccggagttacacctcctatggtcagtttcatacaagggagaagtactgagacatcattcagtagctccatcgcttccttatacaagagacgtccaacctctattgcaaattcgtttgtgtcttccacaagcaaacaaccgctgctctctgagaaagacgatgtatcattcctttcatctcaggtcgggttatccaacaccgatctctcgtatggagaaccaaatttctgctcgtttccccaatctgttctaaatggtaagacgtagtagtatcgatattgattctgtctcaaaagtctttagggtttaggcattcggttcggttgaatagattttatcgtcataacaaaaagaaaagtttcaatctctctttaagttgaacctatttttggtgaaggaatcaatgtcctttgtggaataagtctactcacaatgccttacgcggtgaaagaaggaggatggctcgggctttgtatactcttatcctttgctatcatcacttgctacaccggtacctcctcaaacgatgtcttgagagctcttctgatctccgtacctacccggacattggtcaagctgcctttggatttaccggccgcctcatcatctccgttagtcatatggaaatcatttacatatatacttaacatatctccaaactaatatatagggttcttgatctctcatgagagttgcagatacttttgtacatggagttatacgtatgttgtgtggagtatataatcatgatgagcgataatttatcgagagttttccccaacattacattaaacatcgttggagtatctctagattctcctcagatctttgctatatcagctactcttattgttcttcctacagtttggctcaaagaccttagcttactctcctatctctcaggttccattttctatcataagatccttccaatatagcttcgagattcgttcatatattctttaatatgtgtgttccattcttttagccggaggagtctttgtttcgatcttgcttgctctttgtctcttctgggttgggtcggttgatggagtcgggtttcacacgggtggaaaagctcttgatctcgctaacttacccgtcgctattgggatattcgggtttgggttcagtggtcacgcagttttacccagcatttactcttccatgaaagaaccatccaagtttcctttggtgcttctcattaggtgaaaaatctctttgattaaggttacttataatggacttcagataatattaggtcaaaat

SEQ ID NO: 13265 - DNA, 518 bp, Arabidopsis thaliana
aaattttttggtttttctatgccttagataaatgcagactcaagaatatatacaatgcaacacacacttcctgagccctcccccaaacttaaatcacacagtccactgtgcgaataaacttggaagagtgtactcaggacaaatccattcacaggaacaaaatgaagaaacaaatcacaacagatgatataatacaatggtgaagtgaggcgcttacctcagtcgaagaatgaacgtagttgttcgttaatggctgcctgagattgctctcaggccatagacgaaccgccttgttttgtatcagctccagcaggtgggtattcgacctcatcagttgtgtggcggccacaccgctctaagggtactcgacctctctccttctgttgcggccagaccgcggtcgagtgatctcctcgagtgaatgagacatgatctgctgctggatcgagtgagtgtcgcttccttcttctcttgtggtccgggactcgaatgacgaatgcctggccgggacatgtgag

SEQ ID NO: 13266 - DNA, 1255 bp, Arabidopsis thaliana
  unsure (1)..(1255): unsure at all n locations
gagctgtcaagttcttgtatttggccaagaaaccattcatggcatcatctcctggctagaacactgtcatgcctcctcctaaactctcctgttactacataagcacaatccaaaacccggtattaatctctcaagatcaattcgctctatcttgaagttgacttgattcagatagtgaagttgaaacttttgtagctactcaattataatggctagtgtgagttagtggagacaaattattgttactattcatatgcgaaatagatgaaccatttttaaaaatttagttaatagaatatggtttcatacatttgaactggaaaactaactaattatgttccgataattgaggtaattaagtctatatgtttgactatatttgctaattgcttacgaaacagtcaacaccttttgacctttttctttttgtttcaaaaccaatgtggcaatagctattggctacaatacaacagtacaatcacatgcatcttttctgaataagtaacttctcatttaacaacggaaattaaaaggataatcattttagatagagctactaatcagtgttaattatgtaagtagtaaatatctgatttctttttttaataatttctaaatttatacagacacatgcatctacttattgattatttatgttataaatggaaaacagaaaactaatacttttactaaaatcagggttagtagtgataagtgtaccaattacatttattaattagtacacagccacatgcatataattattgattaattaaacagaagattactaattatcgtaattaattactaatcaggggtttagtatagtacctgataggtttttgaagctccagggttagtgagaagagtctcagcaaacactttgcatccatgagccgacattattccggtaagattcatctccgccggagcaggagtcggagccgccgcagtctccgacggtaaaactctactgatctgaataatggagatgttatacggaacttcttcaatagatttaacaaagaaagaagacagatctccaccgtcgagaccaaacccaactttaccacctctcagatccgttatgttaacgaatcctgaggttccaggagcagctccggtggcttgaaacagagtagcggcgagacgagagcgtcacggatctggtggagttttttggttcgaagtaactaaaaggacgtggagggagagaatgtntttgagagttgagagtgtatagcctttagaggtt

SEQ ID NO: 13267 - DNA, 571 bp, Arabidopsis thaliana columbia
caaggcgaagtacaatgcaatcgttaagctctgagatgctgagctggccaaatcggcatcaaagcccagaagagagggaaaaggtcgcgggatggaattgattcaaggggcaatccttttcattcagaccgagaaaactaggccggagatggaatcggatatcaaagagtatgaaagcaaccttctccttctggatcaaacccacgacgaagacttttctgaggaacaagaaaggtccgtattcgaagctgttttagtagagaagcgaagtcgtctggctgctcttacctcttcatcattcaaccctcaacagttcgaggagttctttaccgaattgcctcctttgagcgagtccggtttagattgggctggtgagttttaacacctcaaactttgacaccaaaccaaaataagttatacttgcgttttcctaattcgagatgattgtctcaggtcccagtgaacccgtggaacctgagatatctgtcacgtcggtggaaactcctgaaccggtagtcattcgccagaggttccccatcacgaacacgaaacagtggtcacgaggatgatg

SEQ ID NO: 13268 - DNA, 584 bp, Arabidopsis thaliana
tagtaacgtgcgccagtgtgctctaaagtatcggtcacgccaatagcaacgttttgcagcgcgggttccagtgcagtgcctgcattacccggagcaacaaaaacagtctcaaccagcggcgactgggccgctttccaggccagcgcgtgctcgcgccgccgttaccaatcactaatactttcatctattgctccattaatggcggaagtggcgcatgtcggtgaagagcatcgcaataccgtgctcgtcggcggcggcaatcacttcgtcatcacggatagaaccgccaggctggattacgcaggtcacgcccgcagcggcggcggcatcaataccgtcgcggaacgggaagaacgcgtcagaagccatcgaggaacctttcacttccaggccttcatcggccgctttaataccggcgatttttgcggagtacacgcggctcatctggcccgcgccaatgccgatagtcatattgtttttggcatagacgatagcgttggattcacaaacttcgccaccttccagcagaacagcgcatcacgcagttcctgttcgctcggctgacgtttggtcacacgcgcagt

SEQ ID NO: 13269 - DNA, 526 bp, Arabidopsis thaliana
gtgcaaatgcgtcacatggcacgcttatatcgatttcggttaggtggatagcatcacagatggatgcattcatataattcctgtagagaaaccacaacaattaatcattctctcattcacagtactaaacttcaaccatctaacttaaggccttaaaagaacttcaatcattgtaccatcaatcaaatcaagacatcaaacctcaaggtctaaagtctcaaacatcgcatgacacgcttatatcaagacataaacatgtgtttttagaaaaagaacaaaacccttgtggaaagaagatgcaaaccttaacaactcgccgcctcctatgacaaagaccttctcaatggacaaggaatagggctcagtggctagaagttcaagagccgattccatgctactagacaccagtacattctcatcaatggcaatgttgtggcagctagactttgtcaagacaatattgagccgaccaggaagaggacgaatctctagaggagtagatcccatgattttcttccattatagt

SEQ ID NO: 13270 - DNA, 621 bp, Arabidopsis thaliana
  unsure (1)..(621): unsure at all n locations
atcccctgcaggttgagcttgcacaananatanaaanataaaatatcttcattgttattcttcattacatctcttctactagataaacttcagcttcagacagagttggtttccctctttctcgcgctggagatgaatctgaaacatcaacataaccttcttcctgtacattataatgtaatattagagcaaagaagaaaaccatcatctagtttgaaagtaggaacattagtttatagtattaaagatgttgtgtttatcttgtttagagcatacctggttttcatccagatcatgtgcaccaatgtctcgagaatcattgatttgatcctgatagaatatgtcaaaaaggataagtaagtatttgtatgaaaaaattattgaaactgatatgtaaaaaacataaatttttgcagagatggacataattataatattacatatatttgaaaaaacctcagttggagtgggagaagattctgattgtttgtcaggtttggaatttgtatcataaattggatgggaatatattaccatagcctgcaattatgagattggttttggaaatatattagactatctttcgcaaatatacaatgaggagactattataagtgatat

SEQ ID NO: 13271 - DNA, 534 bp, Arabidopsis thaliana
agtaacgtccgccagtgtgctttaaagtggcttaaaggcaaactactgcctaaatcagaatccagcaggattttatagataatatctatttcccatgaaagtattgaggctatttgccgttctttttcttcttcggcgttttccagtaacgagaagatacgatagttttcatcttcctttgaggcactactgtcactaaaggtaaacgcgcgagtcatcacttccatcgcgatatcaatactgttaatcgagaaatggtagacctgaagtttttctgcggcggaataatccgaagagaagatcaccggatagaggatttttttcagcacccgaaaccccatctcgacaatttctaccggaattcctatgcgggcatgcacttccgcgacggtatgctggatttgtattagcctttcgacatcgtcaacctgggcagaaagcacgttaataatccagcgttccatcgcactcttcaactgccgctcaacttgttcattactcaagaattcttcggcatgcgggtcgatgcggaca

SEQ ID NO: 13272 - DNA, 829 bp, Arabidopsis thaliana
  unsure (1)..(829): unsure at all n locations
ccttgcccacctccaccatctccaccaccaccgcctcctccgcagccttgcattacttgtgtcacagccccagcaccgcctcctccccagccttgcattacttgtgtaatagccccagcatcacctcctccgcagccttgcattacttgtgtagcagccccggaaccgcctcctccccagccttgcataacttgcatcccagcaccagcttcaccgccgccagtaccgccggtgataccatttgtccctacgccgatttttatactccctccattgccgcctttatttcctgttctaccaccaccatctgtgacgccttctccggtgctaccccttcctccaccttctgcgcctcttccaccaccattatcttcctctcttccctcaccacctcttccattagttttatcaccaccaccacctctacctggcggcacggtttcacagccaccatttacaatgacaccgcctcctcttttaggtggtggcgctccgggaaccacagattcacctcctccgcctcttttaggcagtggcgctccgggaatcactggttcccctcctcctcctcttttaggcggtggagctccgggaatcactggttcacctcctcctcctcttttaggcggcggacgtccgggaatcactggttcaccccctcctcctcttttaggcggcggacgtccgggaatcactggttcacccctcctcctcttttaggcggcggacgtccgggaatcactggttcacctcctcctcctctttttggcggcggactccgggaatcactggttcacntcctcacctctttttggcggcggagtccagg

SEQ ID NO: 13273 - DNA, 587 bp, Arabidopsis thaliana columbia
ctcatagagagcaaccagcttgtttgtggcagctatcgcctaccgaaagcaaaaccgaaagtcacaactagcgtaaagatataaattagaaggagacagttatcgataattacctggccctccttcgccatcatgtcagcataggccgccgcctcggccatgttcttcactccaggaacctggcagttcctccctttgatatggcgaacgaggttcgctaacccagcctcgtcctcaacgatcgggtgatcacgatcgtgtgtgtaagaccagtggaaaggcctacttcccgcggatcctccgccggagttggacgtctgcctcacttcctgagaccggtttgaagaccggcccccacctctggagcctcgtcctccgccatgggacttgcccgaggatcgcctatctgcggacgcagctgctccggagtaacagccgcagttccatcctctcctctctaggagaggcgacctctggtcgtcacgaccaactcagcgccggattcactccggctgggtcgaccctcttcggagagacggtgacatcagacgacaactgtagatggccaaatactgagcgctgattgt

SEQ ID NO: 13274 - DNA, 1008 bp, Arabidopsis thaliana
ctgcaagtagagtttttaacaaactcattgcaaggtttcgtttcaagtgtaattccgagaaggatgtgtggaacagaaaaaaactcatatccgaaacctaaaaaaaagcactccttttctatcatttgattcttgtagagattttgatttcctaatcttggtgtttatatacaaacttggatgttgtgtgtgtgcaaaatgaataaggcattgtgtaattacgtttgtagtggatataattgcaaccttaccgtcttagccattttaaccttatctggtacagcgttcgcgtttgcgtttgcgtttgcgtttgtgtttgcgtttgtggccaaaacgcaatcatttactttttaattgattttccgctccattgattttaatctgacgaccacagcctttagcttatttgtgtggcgaagagaagagataacattcctaagcaaatctcttctctctcccattcgtctccaaagagattacagttttgagcatttctcatctctcgaagctcttctctgtgtgtgtggcgatggctgctaattcgataatggcttcctccaaacccctaatctccctgtcatccaaccaacaaccaaaccgagtccaaattcccaaattcgccaaacttccccaaattcccaaatccctcacttcctccaccgatctccgtagcaaagcactatcactctcctccgccaccgccaaatccttagctttaatcgccgctttcgctcctccgtcgatggcggaggcgatggagaaagcacagctcttcgatttcaatctcacgcttccgatcatcgttgttgagtttctcttcttgatgttcgctctcgacaaggtctattactctccgcttggtaacttcatggatcaaagagacgcttccatcaaagagaagctcgcgagtgttaaggacacttcgactgaagtaaaggagctcgatgagcaagccgccgccgtgatgagagcagctagggctgagatcgccgccgcgcttaacaagat

SEQ ID NO: 13275 - DNA, 456 bp, Arabidopsis thaliana
tatggatgtctccaacacgatgctccttgtagctgttgttgcagcttactggctatggttccagcggatctcaaggtggctaaagggtccacgtgtttggccagttttgggcagtcttccgggtctgatcgagcagcgtgaccgtatgcacgactggatcactgagaacctccgtgcgtgtggcggcacttatcagacatgtatctgcgccgtaccgttcttggcaaaaaagcaaggtctcgtgaccgtcacgtgcgatcccaagaacatcgaacacatgctcaagaccaggttcgacaactaccctaaaggtcctacgtggcaagccgtgttccatgacttcctcggccaaggtatcttcaactccgacggtgacacttggctcttccagcgtaaaaccgccgctcttgaattcaccaccaggtacgtacttaccttaaccggtccggaccgggc

SEQ ID NO: 13276 - DNA, 415 bp, Arabidopsis thaliana
cttctctaaaccgagacgtgaccattgcgacaatatcaagactccaaccgagtcaggactcgctctctccttgctcacagcttccaccaccgatctgacgtactcgtcaccgactcgctccttcgcttgtttcacgagcatcgtcgcgtagttaatcctttctccgtcaagtctttcacggtggtttgagcacatccgacgacgaatgcgttcccgtagaacccactgggtagactcggtttgactcggtctctaatgttgacgctaaacaaaagcttaaggacctgattcgatggcaagttcagtgatctcgcccagcttcgacatacatgtgcagagagtacctcgaacgatgtgtgtttagaattgaactctacgagtcgactcgcgagtttctttagctcgttaagtttct

SEQ ID NO: 13277 - DNA, 599 bp, Arabidopsis thaliana columbia
gacaaaatgtctgagagtgagaagaggtaattgcgtggaggagacaaaatagcgttcttttgtgttaagcgtaaagcagccgaccaaagtccaaaagacaaattcctgatttttgattagtttggtcatcaaaatattaattactcttgtctccccctttctctcattattactctttgtttttcctaactcccatatgattaaaaattgattattgtgtactcgattaatttatacaattatttgttcgtagatttagagaatctagtgaatctactaatcggtaacaatcaactaaaaatgtttcacaacaaaaatagactttcatgcttcgttcgagttcgaggtgtgaaatcaataatgggccgagaaataaccaagtaggcccaaaagaggtgcgttgatataagtagtgggctcagtcagctgaaagtaaggtctcgaatcaggaaaatcgtcggtgatattaggcccacaacgacggcgccaattagcaaattaggattaggattattgctgaagaaataacgagatccgtctttgcaccgtatacgatcaggatggtcccaactgaaggaaccgagctgccacgatgatga

SEQ ID NO: 13278 - DNA, 816 bp, Arabidopsis thaliana
ttgtaataattaaataaacacacgacccattaattaacatcaacctctacatcctaagaaaatccaaatccatgatataataatctaattacatacaaatatatagaattttataacacacgtacaccatttaattatgatcaaccaattggtcttagtttaatttaataacttcctcttcttcttttctcataccattaaccttatcattcctcacctgatccaccgtaggaccataggaccagctacacacaacgtagtagatgacattaacgaagctcaagatcgctaaaacccaatagtaatagtcatagtgacccttgttgatgttatcttcaatccagctcacattgccctgctttgagctattctttaccgcatttaggatcacactagccaagatattagccactgccattcctagaccgaacaacgaagctgcgatactcgacatgcttttaggaaactcggtatagaaaaactcggtctgtcctatcccggtcaaggcctctgctaaaccgtgtagtacatactgtggtacaagccacattgctgagatgctcactgttgagttggcatcgtttgcgagtccttggcttatcgcggttttccttctgtaatgttcaacagttgcggaaaccgccattgctaagaatgatatgaatagccctaatcccattcgaatcttgacattgactctaactggtctgcctcggatctttgaagctaaagggagaattgcgcggtcgtacagaacaacccatgagattaaggctatgattgtgaacatacaaacgatccagctgggatttggaa

SEQ ID NO: 13279 - DNA, 420 bp, Arabidopsis thaliana columbia
tgactcagacagacgattgcccgtcaacaatctgtggctcatcttcagactcagcattgttatcttggtcatgctcgttctcctctaacgatcttcccatagtttccttggtgaagaaatacgtcaccaagattccagcaatgcaaacgccaccaagaatcaagaaagccaatctcatacggtttacttcgggataaatctggtttttatcatcgctttccatcttcttggtagcccacaagaacccaacagtgcgcacaatagccccaagcttacccgcggcagcagagatcccgagacgcgctagcctatacctagccggggaatgctctgcgggaataataaaagttgtagtgttgggaccaacatttgcacagaagaaaaacataccgtagagaaccatgaaggccttagtattat

SEQ ID NO: 13280 - DNA, 540 bp, Arabidopsis thaliana columbia
cgccacacaatctaagaactgtctgaaaatgaaaaagtccatttgaagtacgcatataagataggcagagacctatgttgcaaaaataattttcataatcaaactaacttgaccttcaaaaattcagggcagcctctggacaaatagtcgtcaagtgtcttgttttccttttccaaaacatcaccaccagtgaagagaacgaccaaatagtcaacaattttactgccaaaaaggagctgtaacttgttaagtgcggcctcttcctcttttaaaatgtcagtccccacagatagtactaacaccacagcatgtaaccctccatccgtgagggtaaggcaattgatgatctccttgttcatataatccgtagacacggacaaatcgaagagacctaaatcacgaaaccattccacagccagacttttacgaactttataaaggcaagattccgcaacacaatctaaccaccttaaaatcagatattatgaccaaaaatcataatgaacattgtgtgctcatgaaaagagacatagcctcact

SEQ ID NO: 13281 - DNA, 476 bp, Arabidopsis thaliana columbia
tatcagtatgaataagtttcttatttatgtttccatattttttgggttaaaaaaaatttgaattgatattactaagaaaaagtcatgaaagagaatgttgctaattgttagtagtattttgtttttggtctaagaactatattacattttggttaatgtgaaaactgacataagtatagcgagcgtattttttcttctttttcaacttcacctaattcgatcatattaatactgtggaagcgcaaggtatactcactttgtactctctgtgcataatgattagtaaatctaccaagtcaatgttaattattaaacttgattactaacaaaaaattatatgtgtaagatgtgtttaacaacttcaagaataaggatggaaagttcaaggagcacctagctgaggatgcaagaggtcttttatgcctttatgaagctgcacattggagcacccatggtgaagacattctcgatgaagc

SEQ ID NO: 13282 - DNA, 583 bp, Arabidopsis thaliana columbia
tgcaacaatattattcaattatataaatagaaatcaaaaacatacatcaacagcattaaggagttgctgaattgtgtttcgaggatactcaaggcagctatcactctttttagaaacaacaatctccaactttgggattctctcacggtatgtcaagagaattccatcctgaggaagtctgtttagaacatcaaaattgttaatttatataatttcataacatagactgatatcgatacacattttatattagagttctgaaacttacgtccttaagaaagcatcgacctcaggaaactgaggattcacaaagacttgtgatgcatcaaatgagttagataaattcctgacacctgacattagaacaatgtgtaaaatatgtaatttatgtttactttatacaaagatacaattgagagcattggattgataagtttacctttgtaggattttatcttaacaaaccggagaacacaaacaacaggtcgagcaccagcctcgttacatcctctgtaaacttgttgagcaaaagtacccacaaggtaactccaatgcgctcatcactgtagaaatagataaatat

SEQ ID NO: 13283 - DNA, 489 bp, Arabidopsis thaliana columbia
tatccgctcacaattctacacaacgtacctagaagtagtaatacactgatgcaatgatgcgtgaaatcacgttgatactctttgaaacgaacccaagtgatataaccgaatttttaccggttttggagtccttttgttatatgtagagtcttttctagtctttttcaggtctttacatgtttgggatgcatttggagattatggagcattctagagcaaaacagacaacttaagctgcaaaagcaatcaagagacaaaaattaacgtaggtgtcgatcgacacaacccctagtgtcgagtcgacaccaatacctaacggcaattcaattgcgcaacttattgatgttttgaagatttccaaatttggcccagaactttcccttctttctaaagaaggcctatcacgttttaggtcatatttatagtttttaatattcctgggcataataaccggaaccaaaaatccgaaccaaaccgaatcaaaatttt

SEQ ID NO: 13284 - DNA, 298 bp, Arabidopsis thaliana
cactatagatgatataatacaatggtagaagtgacgcgcctacctcagtcgaagaatgaacgtatagctcgtcaatgggtgcctgtgaaagcgcccaggccatttacgaaatttcttggagctctatcacgctccagcagagtggctgctcggactcaaccagtactagcggccggatcgcgcacgactccgcagcgagacgtcacaagtcgacagcaccaccaggaagagcgacttaccgtagaccccccctgccgcaagactcacgaggctcggatgatcaatacctcgcagggac

SEQ ID NO: 13285 - DNA, 550 bp, Arabidopsis thaliana
tttaaaatttcaagtaaatcatcttccgatttaaaaagaaactgaaatctttcttgtgaaagcgcaacacctcgaacccttgagtaaagtctccagattctgggcatgtccaatatccaattagacatcctttgatgagaagggttcagaaatcttcctaaaagactgcagttattcctttctattgagcaaaatttttcttgattaggcagaatcagaggaacatcctccatgatggacaattcttgtatggctttatccaaatccagattcatgatacacaaatgagcaagaccctgaccttttctaagaagaaccacttcgagaaaaccaactgaactgacagactacaccacagcttgatagaactgaactactctgaaaacaaacttctacaaagaagaaaaacggatgaaaccacgaaacaaccttgactagcaacaaagccgacagaacacggagaaatcttcggactgtggatccctctatccagacagaactagtgtagagggagaagtttttaacccaagtggattgggacggcaagaga

SEQ ID NO: 13286 - DNA, 725 bp, Arabidopsis thaliana columbia
gccagtgcatgtacgtttcatgatcacgtttttcctgtaaacgctgaagttgaccatcaaataatactgttcgtgtacataaactgctgttaagcttggattcttttggttgcttcaggaggtagcttttcttttatggaaagaatcatgggatatggggaaaaacccaatggctagcaaaggatctccattgcacgagtccgcgcataaaactaatagagaaggctagaaaccttttctcccaaacaaaggaacacactttcgagtctaaggctgctgaggaacatgcaaaactcctgaagtaataattgcaagccaaaacttgattttcaatgtttctttgctcttcctctcatgatcttttttggttacgtcctttaggatacaacatgagctagaagctagtacgaagcaggctatctttgttgattcaagcatcaatgatactatacgcacatgtattgtcctgggtaataaccgtgctgcaataaaagtgaagacagaattcaaggttctaattggattttaaccccttctgtgcaatggatgactgtaagaacgcgatctcaccactgtactgtttgaattttcaggtcagtgataaaagatggtattggcttaaagcatttgtctcgctacaatcaaagactgggcagcgcttgaaaagttttcgaaggaaaagagaccaccaatgggtaagtttatacagctcctctatggattac

SEQ ID NO: 13287 - DNA, 518 bp, Arabidopsis thaliana columbia
accttactttacagttttcctcttttatttttttttataagaatggagcattgtatcaaaatagaaaatcgagtagattttgttgcatttttttttttttttcttcaaacaccatttatattaagttatcgggaagagactctccgctagagagagccatttaggaaccaatgggcttacatgggaaaaaaggctattgcgagcccgagctttcttagctaaacaatctgctcgagtattagaactacgagaaagaaatctaatacgaaaagaagggaaaaaacaaactaaagaacgatatgaagccaattccgctgcaaaagtcagccaatcgtcttggttatcaaggatagcaatcaagtctgagcaatccgaagcaaaagtaccagaagtatcaccaatagagatcatgcactccattgcctataacaaagagttaaattccgcatgaagcggtgataaatttcgacgagtgctcttaaggccaaggtggatgaccaagtcttgtcgaacaagta

SEQ ID NO: 13288 - DNA, 412 bp, Arabidopsis thaliana
tgcacacccaaaattttgtttcttagcttatagaacaggctagtaattgtctttcacttattaatttgtttgtgatagatataagagcctgactttttttgttttttttatagatacatcttgattctagtactcatggagaaacactgaaatggctggcttatggtccacgtagttgcgcaaggtcatttactggttacatagtgaatgggcaacgattttacacgagaacaattgacaagaaaacatagaatagtggtgttttctatgaagcgacaacagtttgtaggtctagtgcaaaggacaattcacaagtgatggatttggtgcagtattatggctgcataacagacattatattgttggactataatgtcttctatgttcctttattccgttgcaactaggcagt

SEQ ID NO: 13289 - DNA, 546 bp, Arabidopsis thaliana
tagtaacggtccgccagtgtgctctaaagcagctgtcatgtgcttatctttaatcagggctatgatttcctgctccagctcctcatcttcgagcagcataatatgcccttcaaagatggcttctttttcttcaccgaacgtttcaccagctttcgttttgatcgtttccagctgggctgatgccttggcacgaccgctcagaaaacgttcaacttcctgatcaacctggtcggcagaaatttttttccggtcaatgacaatttcgtcttctttcagaagcagagctttaccgaaagcgatacccggggatgctaaaatgcctgaaatcataaccctaccttacttgtgactgatttttaaaagaacccgggaaattactcgagttccgccatcagtttaaccagatgttcaaccgctttctgctcgtcttcgccttctgcggagatagtcacaacggtaccttgagtcaggcccagagtctgcagtttaaacaggcttttcgcgctggcgttttgccgttggaagtcacagtaatttcagaagtga

SEQ ID NO: 13290 - DNA, 553 bp, Arabidopsis thaliana
tcaaaaggatctgcgcgtttctaaacgggtttttcatgacataaaattttaacccaatggcaaacttgttattcctgaaaacttcatgcccacctcattaagtgtacgtctcaaataatatagtagatcacattaccccgtttctgaattgagttccctccggaaaattgaaaaactgttttatagcggtaaaatttcccatcgacacgattataacctctagtaaaactgcaaacttttttttttgtcaaaaacaattcaattagttgtgtctgcctggacagatctcggtattttatgtggtggtcaatgtcgcactccatctattatcatttctttacaaagtgtcttaaggccaacaatccacatggatggagctagtttatggatggagacttatggagaagaaagaggatgggtacaaatcgatggggcttactgggctcagccacgtccgcgagagagtagtccacgttgctcttgttgcaaatcccgagcacacaaaggaacgaatcgtcccaaatattgaaagaaaaggtgttcgtaatgtgtt

SEQ ID NO: 13291 - DNA, 600 bp, Arabidopsis thaliana
tcggtaccggggcacctctagtaacgtgccgccagtgtgctttaaagccatagccgggagttcatgttggcgcagacggaagctttcacgcgtcagacgtttaatccgattgcgttcatgggcgcgtcgaacgtttttcttggcgactgtaagaccgatacggggatgccccagcgaattcaggcggccgagaatggtaatttgcggcgtgccagcccgttgtggctgctggaagacgaatgtgaattgactgggagttaacaagcgtaactccctgggaaatgcgagcttaaccactcaggggttagctttattacttagaaacggtcagacgagcgcggcctttagcacgacgacgtgccagaacctgacgaccattttcagtagccatacgagcacggaagccgtgagaacggttgcgcttcagtacagacggttgaaaagtgcgtttcatggcgatttctacctaaacttgaataaattcaatggctttattggatatccgccgaaaaatgaaacgatggacaccgaagccatgggtgattaaagaggccggattgtaataattgtacactccggagtcaattctctttccttatt

SEQ ID NO: 13292 - DNA, 649 bp, Arabidopsis thaliana
ccgagtctctccatggtctcaggatgagggtatcgagttcctaaaaactcgttgcgtttcagtagtttgtagtactcgtttcgagttgcgcacttctctgattccaaatcatcaccacctccattctctgtttgatctgcttcctcaggtgaagccatttcttcctcggagtcttcatctaccagttccaaccttctccccacgggcttctttcatcgagtgatatcttccttgttccttgagaactcccttgtagaggccttactcgaccttcgggatcgagtgttttcggcgggggagttgaaagtttgttcttcttgcatgcatcctcgtcttggcttgattcgctgtgattgatctcgaaacttgctcgttctctcctgctcgaccctatgggtgatggttcagaaagtcttcgagctgctgcatgtgaagaacgtgttgggtacctcttcgatggggagagagctatgtttcggatccttgacaggagcgtgcgcttgtttgtcattgagaacgagagactcaaaggttaggagatcgagtgatgaagaaaatagatggggatatgctgagttttgataaaaagagaagtgcagagaagggatagagagagtatagaatcgagatgctttggtatgagtgagag

SEQ ID NO: 13293 - DNA, 622 bp, Arabidopsis thaliana columbia
tatcatattcatatcaacttttttttttttcaatctttgattgtagggtgaaagacgaatttgtgggttataaaacaaaagctcaaatttcactatgacccgcagcagaaagttcttaacgaaaaagatgttgaccgagaaaatgaatgaagcgagccaagatgaagacaatgttgcattgtcgaacaccaaagaaacggagaagaagcagaggaagcggaagaaggattgcgaggaaaagaataagaagaagcgaaagaaggattgcgaggaaaagcatgagacgaaggaaatggagttagcgtggaaacctgaggattgtgctaagccattaggcgaagtgagtaaggttactgggaagggaaaaaagaaaaaaagtcatttcaaaacattcacgtttcgaggcaaccaatatgcgctggtgagtttcgttttacgttttgatttattactttaaaggctttgacatattaatttttaaacctggtttgcaaaaaaaatcaaaatacacaaacctatatatgtggacatggctggtccaaaaataataaaaacatggcgaatttaatatttattgtctttctaatatgtgttttttcatttcaattataataatatcaaa

SEQ ID NO: 13294 - DNA, 564 bp, Arabidopsis thaliana columbia
atctcaatcacgccgggaggaacaaaaagcgccaccagaggatttcccggcggcaccggcggtatctcagctctgcacaatggacacgtggacttcttcatcaaccacggatcgatgcaatcgacgtggaaacagtgactgcacgccgttatccgcctcatcttctctccctccggcgcatcttcgagacaaatcgtacaatacggtgatgaatgtttttcctccgccgcggtttttctccatctccggcgatgttggaccgtgaatgtacggtaacgacgccaagaacggctcgcgaggaaacaagcgaatctgaagaagagacggagagtcaagacgacgacggaggcgatgatgacggattcggcgatgatctgagagaatctaatcacagtttcaataaacattctcgagaaaatgtttggagactatggcacaagtaacaatgctctgctttgtgtagtgtctatatataaggttttatcttgatgacatcgacggtcatgatttaatcacgtgggagaatttggattaattgaacggtgatgattagatgtacagtag

SEQ ID NO: 13295 - DNA, 502 bp, Arabidopsis thaliana
caacagatagagctacaacaaaggcaaggtgtaaggaacctaaccctagccgacgttgacgtgaagaacacgaaaactctagagagtgtcccacgcgacgggaagacaatgggagaaattgttattaaaggaagcagcctaatgaaagggtatctaaagaatcctaaagcaacatctgaagcatttaaacacggatggcttaacacgggagacataggtgtgattcatcctgatggatatgtagagatcaaagatcgatccaaagacatcataatctcgggaggtgagaacataagtagtattgaggtcgagaaagttctttacatgtatcaggaagtgctcgaggctgcggttgtagccatgtctcatcctctatggggtgaaacccgtgtgcgtttgttgttctaaagaagggtgaagagggattggtgactagtgaaggagatctcattaaatattgccgtgagaatatgccgcattttatgtgtccgaaaaggtggtg

SEQ ID NO: 13296 - DNA, 494 bp, Arabidopsis thaliana columbia
ggagtggctcaatgttttaaaagtaaatctaatgggaaacatattaggagaatatgaaaataaagaccagatgttgcaaacagaaaatgatgattttgttttaatgactacaatagaagatcttgtactcgacaatttgacagaaaatcgcaaccctataaacctcaatctagatgtcggagatgcccagaagatggattccgatgtaatttatcgtcttctgaagatgaagaacaagaagacgaagaaaaatattagttttatgtttatgatatttacttaagttattatgtttaaatatgcaaacattttaaattattttgaaaaattatatttgactaagtatgtttactatgtttaattatatttttatgtataattctgaatatcaccaggcccaaaaacaccaagcccaaacccaattataagaatttaaatatgcgacttattgttgacattttagcgactgtaacaatactattgggccataaaaa

SEQ ID NO: 13297 - DNA, 514 bp, Arabidopsis thaliana columbia
ctgagtttgagagacggatggtatgggaggaaattagcgttgtggcttcttcttctccgctgatttttacccattggttgctgatgggagactataatcagattgctgcatcgtctgaacactattctgtgagtcagtcaaccttttcccttagaggccttgatattttccaagagtgtttgagagataatgatctggctcatcttccaagccgtggagttttctatacctggtcaaatcatcaacaagctaatcctattctcagaaagttggatagagccttaggcaatggaatgtggtttaactcattctcaaccgccattgttgtctttgagcctccaggtgattctgaccattctccttgtgttattcatttggtaaatcaatctgttagttcaaagaagtccttaaagtatttctccttccttgcgactcatcattcttatctgtcttctattggagatgcttgggagaagaagactcttattggttcttgtatgttcatgttgaggga

SEQ ID NO: 13298 - DNA, 984 bp, Arabidopsis thaliana
gggaatgggatgtgaatgatccagcgacggcggatggattcacggtgatattcagcaaagctggtgaagataaaaagacgggacggagttcgacgaagacgaattcacagaggaaacaagatggtgataaaccagcggtcaagaaatggctctgtttcacttttgcttaatcttttttttttgtttgttgagtaagttttaatcctaagagaatgtagctttgagccttatgagccctttgacaacttttgtgttagaacatttcatttcgtttttagttatctaataaaacaaattctgaggttttgtttcttaatgataaatctctgcatttggtcatttggaaatcaacaaaattgtagttgttgattaaagaattgcaaaagtcatacaaaaaaggtctcttagatattgaggtgaacacaaactcttgaacatgttcaaaattcatacaaaatgtgttcttccttacaaaacctttctttaatctctattgatttggtctgtagaacaatgttcttgtatggggtttattgagaaaacacagaagatctttcggttctttagagaacattttgcggaaagattgttgtttttagggctttgccacaaacttgtacagaaagcaaagaaaatactgtgttgaggccttgagggagagaggctatcgcacaaactgactttgggctaccattcaaaagcccaataggcccaatgtatttctacggtttttcctattcgctaacgtaagcaacagactaccatgcgccgtcctctgtccattttcatcacaacggacaaaatgcatcttcacccacactttgggccgatattaacaagcccaataggcccaatgtcttgccacggtttctctcatttgctaacgtaagcaactagagtacacgagtgtaactactatacgccgtcctctgtccattttaacacaacagagtcacaaaaacctctgcaagaccctaaagctaa

SEQ ID NO: 13299 - DNA, 669 bp, Arabidopsis thaliana columbia
atctttgaggaggcgcaggagatactttccttagaacctatatgagaattcaccaagttgagaaacaaagcatatgagagaaatgagaggatcgatcagtgaaggggaagattacctctagcgtgcattgggagacgtcagtaggaaacaaagactcagatagagaaaatgctctaccaaacatgtcaaaggcaagagccatggaatcccataagcgattctgttgaggcagtttcttttccacaagtaaagtaggagaagggtcttgatttgagaaaccataggataaaactaaatcctggtgtaataaaggaactacgcgcacaagaaacttgactagatgaatgttctccggatgcataggggccaaacgtctgggaaaaggaagaggagattacgaataaggtttaaacaatgtcagcaagattgtgagaagatatataataaccttaaagtctcgaagcattggatcacaggttcgattctggagaaataggcagcggaataaggtgaagaaggcatgggttggcgaagaagaaactccaagacagaagcaaaagagtgaagaaggagcggccatgacgaagaatttagttggaaaagtagacgagcacaaacatcgtgaatctggattaataaaaaggaggagagatcccattaataacaagg

SEQ ID NO: 13300 - DNA, 571 bp, Arabidopsis thaliana
tagtaacgtccgccagtgtgctctaaagcaaccaagatatacaaaccactctcacgcgccatattcaattcggcaatcgttttaaccaacatcagcgcaatgggtagcagtatggtgaataacgttgcgcctaatgacggtagtgttttttcatcgcgaactttgagatctgcaaactctgtgggtacaggtttaaagggcagtcgttgacccagaaatttaaggaaaagtgggccaccgatcagtgatgccatcagcccaaccagcaaaccgtagacgatcaccgaaccgatatctgcgcccagcttattggcaacatataaagcagccggatgtggaggaaccacgcagtgcactgccatcaatgcggtacatagcggaatggcaagctttaataatgaggtattggtttttttggcaattgaaaaagccagaggaatcaatagcacgacgcccacttcaacaaacagcgtgatgccacaaatcaggccaaccagcaccataatgacatcaactgaaagccagcggacgtctgaagtgtcagaccaattctttctgcggccccggatac

SEQ ID NO: 13301 - DNA, 549 bp, Arabidopsis thaliana columbia
attgtcatgggtatctatctttcgcctattagccatctgatgaaccctagagttgcccttatcaatgaatccatccttagaacttctattagatttatttgtatcccttgttgattgcacttttatttacctgttatttgtatcccctatttgtatcccatgttgattgcattgaggtttcttaattttgtcacctgttggttctactcgacccaatgatcgagtagggctcttaagtcgtatttttatttgtttgaatcctggcctaggattgttactagaaacacaccatcattataatctggcttgacttaatagtttctgtacacatcttgattgctagcaatacagtggactggattgacaccccctatagctgcatcgacatgtttgtgttttaggggaattgaactgaatcacacattcaccataagcagacctgaaaaacctgcttatcaattgggtccgtaaactttgttgcataatccttcgttatggtcagtatgtgggaactattctcaggtcgtggctgtagagaaaattttgaag

SEQ ID NO: 13302 - DNA, 286 bp, Arabidopsis thaliana
ctaacgtccgccagtgtgctctaaaaggttgctgcgagcatgaggaagaaaaacaagaactagattgaagttgttgagttcttagtagatttcttacgagatacaaaactagtcgcccgacattcgagcacgtattcagcaggtgttcttttggagagacctccggagacaggtaagactttgattcccaagacaatcacttgagacacacgtgagcaactcaggagcatctcaggtactgacgttggacaaatgtgtatcgaatcgtgagctagccgtgttcgct

SEQ ID NO: 13303 - DNA, 629 bp, Arabidopsis thaliana columbia
gattggaatagaaaagctcagctctgttgaagtcgcctatggtagctggtttgttctgcagatggtgtagaacgacaccaacagatggtgtcgaacgacaccaacagatggtgttgaacgacaccaacagggtgtcgatcgacactgtcgttgaaatctgccagctgtttgttgcgttcccatcttgtagtttccctgtcataggaaaaagaagaaagaaaacgtgtgagaaacaaaagaaagaaaaataaaaacttagtctaaattctacacctagtctaatggtgaatcacagagaacttcggcaaccgcggcaaatttgatataattcaatttaatcctaagaccactctctcaaataaagaggtcagttgcagcacttagggatcgaattcacaaagttctcggatcacgcaggagactaatggctaatcaaattaagctaagtaaaatagtaaagaaaataaaagaaacaaaaagtaagcaataacattatgagttgtgaaacaagataataaaggcgttaggcttagggtatcacagaaaatagatgatagtagatctagaaatagctagattattatggacccgttctcgactcaactatgattttagagtaccggtagtgt

SEQ ID NO: 13304 - DNA, 539 bp, Arabidopsis thaliana
tccatcctggacttccttgacatcactcaactcaatgcaatccttacacattcagcaccagactcatcttttgtgtctacataaaatgcatgaccttcaatggtgggatttttctttgtccccttcatgtcaaactccaaagcatagtctccaatctgcaggttaattgtgtttcttctcacatcaattatagctccagcagtgtttaggaatggcctaccaagaatgagaggatcatgtggttccttatcaagttcaaggacaacaaaatcagtagggatgtaaaagtttccaactctaacatgcacattctccgccaaaccgactggaaatcgcacagagcgatctgttagaatcatagagatccttgacggcttgcaattggtgatacctaggcgttttgacacagaaagagatatcaaattaactccagctcccaaatcacaaagacatctatccaacacagactttccaatccggcaagataaaacaaaactccctaggtcaccgagtttctcgggaatagtagttgaagggat

SEQ ID NO: 13305 - DNA, 495 bp, Arabidopsis thaliana columbia
ttcatagtcgttaacaaatcttaggtgagaccaacatatctttctctagcttcgttatcaaatagcctggaaatttttttatcaagaattaaaatttcattttatgtttataaatatatatatatatatatatatatctctcgatggctaatgaggttttgaatggtgtgaattgttgatagttggggaatgtatatgtatgggtgatgtgggtgtgtttactggtttattagtcgagtacttcggtagattagttggatcgattgatgattttgagttagctgcggggtagcgggtggagaggtgatggtagaggtagtgtttggagggtcgatgctggggcatagaagtacctatcagctgatcttgtcagtaagtggtgagaggtggaatttgtagtttgttgagtaagagagtgtgtgattagtgactaatttgaaggagttgtggagtttgggttaatctttgatgaaagatgaatggttgaatggatat

SEQ ID NO: 13306 - DNA, 869 bp, Arabidopsis thaliana
tttcctgatcaaaatcaaaatgaaaaaggagttagatagctcagagaagtaccaattttacctgatcacttcagttccttcatctgaggaaccggcgccgctaaactaggaaaatccagaagcgtcaagaccgaaccaaatccagacagctgcataaacatccttctgggtacatgtacagccgagaccgaagagaatccaacacgactaatcctagaaacgctgttccttgattttcccgcgctgataaataaaataaaaaaggttcaatctccagcgaccatactctcaaatcgacggagatagaaaattatgagattccaaaacatacgaatctaccttaaggccatggatgatccaacgaaaggaagagaaatctccatagccatcgccatcgccgtcgtcgtcaacagtcttcttcttcttcttctatggatagtggataagaaaaagagtgagagatgagattagctacggagcaacccaccactaaacttagtggacctgtgggacccacactgcttatgaattttgttgtgaaaaaaatacgcgctacggtaacgcgtgaggatctatttttccttctttttttgtttattttgtttattttgttaaatacatccggttcgatcaaaccggcgatttcaattttgacttgagaattcagattagagcatagccgatcattggtgttgagttcttctctcttttttttctagcagtttgccctttcaatgctctagcagtttgcttttacatgtctcaagattagtagtagatctacagatgcgaggagaaaatcatcaacggatttgttttttttcacacaaaggaacaacaaaatcttgacaatgttgagagagattgaa

SEQ ID NO: 13307 - DNA, 494 bp, Arabidopsis thaliana
attttaatattatttataatgtttgtttaatatatatatatatatatatatttctctttcttttcgcaaatgcgaccaatctgaggatgtcacgtcagatgatacttatatcaaaaacatcactggactgaaccccatcaaggtcattctaattattttatcaatataaaaataatttttggacttgtgatattctataaatatcacctatgtacatgatctaacgaacaagagattgaggagatggatgatgtaactccagacgaacttgaggctgtgtcagtattgttacgactaccaaaccctgttttctttgatcaagaagaagaagaagaagacgaagaagaagaatatgatgaagaatgcgtatgtgaggatgatttggaagtaaaatcgtgtatgcaaacaaatgataataagggtaagaagagaaaagtcgctgaggtagacaattccgaagaaaccctagagtgcatgcgcggttgggagcacta

SEQ ID NO: 13308 - DNA, 439 bp, Arabidopsis thaliana
gagctcgatatcttcttatttttggctactgcaatccttttatatttagtatgtttgggccattttgtgttagatataactctttttgttttgttttattttgttttttttttttagacggagtctcactctgttgcccaggctggagagcagtggcatgatcttggctcactgcaacctccacccaccaggttcaagggattctgattctcctgcctcagtctcccaaatagctgggattacagacacatgccaccatgctcagctattttgtatttttagtagagatgggatttcaccatgttggccaggctgatcttgaactcctgacctcaaaagatctgcccagctcagcctcccaaagtgctgggattacaggtgtgagctaccacacttggcttgttttagatataactcttgtaagcagaaaattgaagtt

SEQ ID NO: 13309 - DNA, 535 bp, Arabidopsis thaliana
tggagcttttaagaacgtttgcaacaagtgttacctctggccgtgtgctaggcgagtaagccaaatgctctaggtctctcatttgtacgtgtgctagtagtgtacacagtcacgtgtttcaagttcgtttactgtttggtcctatgtatttatatctgtttcaatgatatttcctatttcgaagtaatgtttcaagttctattatgtagtttgactctgtttcatataaatatcctacttgcaagttgtgtttctgtttctgtttcatgcggtttggttatctcgattaagaataatatatttataatttctcaagataaacatttattgactaattacattagaactatatctttcaataaatgtaagtatatatgtcagtacattgacgcaagagttccacagttgtgacagacgtacaaagggttaataaatacagtttactccgacgtgacatatatccaccagaatttaatatacgaattcagggtttcatagacatacacgtgttagattgacatcaccacacaaatat

SEQ ID NO: 13310 - DNA, 616 bp, Arabidopsis thaliana
tagtaacggtcgccagtgtgctctaaagactgggaatagtcccctatgaactttataattcctaccgtgactttcttaacttaaaagagataaaactagaacatccgttaccttcaataaagctttacatttcctataataaatcttctttaaataatttggtgttctcccgatttattgaccgtctaaatgagagtttttgatatataactacagacagctactataactttcatctatttattcacagcgcgaatgaaaaataaaacactctgctttacagtgtttactttataattaacagacttatctcactgatcaccctgtaacgttcagagagcgtcttcagatgtctatttataaaattcctcttccgctcaatattctggaagctgcacgagagcgtattacctggacactcaacaccctaccccggcgtttgtgtctcattttctggcggcaaagactctggtttaatgctgcatctgacagccgaacttgcccgacaaatgggcaaaaaaatctgcgttttgtttatcgactgggaggcgcaattctcttgcaccattaactatgttcagtcctgcgcgagttgtacacgatgtcacgaagagtt

SEQ ID NO: 13311 - DNA, 511 bp, Arabidopsis thaliana
gcgcttgattgataacctatactcatggccatacacagaaaattgcaagaatcccaatccttcacaatccaactcatcagaggtcataccttggtagagctctacttgcagcgtggaaagaaattgtattgtctcatcttcatacgctacatacggataagccatcagagtgtccagatgacaactctggtacaggtgttgaacatcttccaacaatccgagttgtgcaagtgaggtcgagtaaggatacctcgtgctacagaactcgttcagcttgacaagcctaacatattcctcagcaggcaatacgtcgggcttgtgcagaagtctggtagctctacgagtctgttcaggcatgtactcgtcttcctgatcttcgtctataagctcatacctctcagtgatcgctctcttccctcgggctatctcagctttccttctgaagctttcatattctctttgttctctctctggccttgaagatgttgactctgtctcatccatgttgtag

SEQ ID NO: 13312 - DNA, 556 bp, Arabidopsis thaliana
gggacccttcccaccttcaaacaagaatctctacatcctagtagctgtcgattatgtctccaagtgggtagagggtatagctagcccgaagaacgattcagcagttgtatgaaactcttcaaatctatcatcttccctcgttttggagtgccacgcataatcattagtgacggaggtaagcatttcattaacaagattcttgcgaaattgcttcttcaatatggagttcaacatcgagttgctactccctaccatccacaaacgagcggacatgttgaggtttccaacatgcagatcaaagagattcttgagaagacagtgggaaaataataaaaaagagtggtcttataagttagatgatgcactatgggcttatagaacagctttcaaaactccgcttgggaccacaccttttcatcgttctctatggtaaagcttgttatgttcccgtggaattagagcagaaagcagcttgggcagtcaagatgatgaattcaacatcagatcagctggagaaaggagacttattcagtcgaatgaggttgatgagatcaaa

SEQ ID NO: 13313 - DNA, 322 bp, Arabidopsis thaliana
gatctgcatcttcagtgctagatcttcgggggatgctaatcttgccgcgacttgctgcgcgatgttgcctccagcgctatctcctgccaagaatattctgccaaagtcacattgcttggcccacaagttatcgtgtcttgctttgttgagccaaagaatggcattgaccccatcttcggaagctgctggaagagggttctctggggctagacggtaatttacagacataaccaatcacctctagcgagcggacaatctagccaagcactcgtggtaacacgaccaagaagccgagccgacgcagaatcctccacctgtggaa

SEQ ID NO: 13314 - DNA, 443 bp, Arabidopsis thaliana
ggcgtccctgttgatggttttcttgtcccaatctagaagaaagagagcgttggaaaaggtcaggcattaatggttgtggacgtggatgcatttcttgcttattcctggggccgtttcactttcgagatgatgattaagtcgataaaagagagggaaattaaacaataagcaagtacttgttttgttgttcaggggttggtgtatgctctgcaattggttgtcttataggctgtaccggctaggcactgtggcgcttttagaattacccttatggcacagcttagtcagttattctcgcagttcagataagattcggaccgccacttctctgaaagcatggtgcttgctcctccctccttggagctcgtccattcgttgggtgatccttgcttcacgttcgagtgtttctcgtcgtttaggccggtgagtgagatttctgctca

SEQ ID NO: 13315 - DNA, 534 bp, Arabidopsis thaliana columbia
ctgtttttgaatctatcgtcatgggtatctacctttcgcctattagccatttgatgaatcctagagttgcccttatcaatgaatccatccttagaacttctattacatttatttgtattccctgttgattgcacttttatttacctgttatttgtatcccctatttgtatcccctgttgattgcattttagttcttaattttgtcacatgttggttctactcgacccaatgatcgagtagggctcttaagttctcatttttacttgttcgaatcctgacctaggattgttactagaaaccaaccatcattataatctgacttgacttagtcgtctctatacacatcttgattgctaacaatacagtggactggattgacaccccctataactgcatcgacatgtttgtgttttaggggaattgaactgaatcacacacatctagtataagtaggcataaaaacatgtatatcaatttggcgccgttgcaattcattgttgcattgttacattcaagatatcagaaacttttaag

SEQ ID NO: 13316 - DNA, 705 bp, Arabidopsis thaliana
tcaccgtcgatagggttattacaatgttgaagagaatgattgtttcagatcctggtatgagaatccgatgtgcttgcttagctattgttgatggttttcttgtcccaacctctcattatcctaagattgttaacgtcacgccaaaatggttgtggacgtggatgcatttcttgcttattcctggggccgtttcactttcgagatgatgattaagtcgataaaagagagggaaattaaacaataagcaagtacttgttttgttgttcaggggttggtgtatgctctgcaattggttgtcttataggctgctccatccattcaagatggtcctctaattgacgagactattgagtctgattctgaaggtgcggaagacgatgttgaagtggcccctcgagagtctgtccctttcaagctcgggaacgctaaagagttagatgagaaatgttcgataatgctcttatatattaattttgttaaccgttaccacattattgacggtaacgagatagttaatcattaagttttgttttatgatatctacttatcgagtctaatattattatttgtcgtgtttttgcagattcatgttgctaacatcattttgtcctaattatgtgcaggatcaggcggaagatttgtcttggtctgatgatgaggaggatgagaggggtgatatcttctaatgttgctaatgagggttta

SEQ ID NO: 13317 - DNA, 560 bp, Arabidopsis thaliana columbia
cggtaatgcttttatccgctaaccttttaactgttatctgattagagacaataagctgatcattattttctaagtctttttttagtcttatcaggtcctattatataacttatccgttaatattgataaacgttaacagagtatacaagataatcagatcagtagtcactaagtctattatgttaacatactcatcggatgttgttttctcttgttttgcagattcgtgttgcttcaatcatttgtcctgattatgtgttggatccggcggaagatttgtcgtggtcagacgatgaggaggatgagagggttgaaaatcttctcatgttggttaacaagggtttgattttcaagaacgacatgtttgacggtggatgtttcccatcccagatccaattggcatctaaaaagcaaaagcgtggggctaagtctaatgctactcggaataggaaaggagccaaaacatctaagaaccatggtggggttcggtccaaacctcgaagacacacacctgaggaggttgggagttctgaggctgtttctatggatgctatttcccg

SEQ ID NO: 13318 - DNA, 452 bp, Arabidopsis thaliana
gagtctatgacgcagacaccactggaccagcgatatcgtctgacggtgagatcagtttccgtcagttaaagacgtggatagtagagaacggagcgacgacggtgcatgatgagatgatggtcggagacgattgctacgccgggacaacttggatcgggtacggcagtgtgagaagagcatattgaccaaagtgagatacgctaagcagaagggtctgcttgggttacttttcatagcacgttggaggtggcgccatctcgagactctttcgttggttcgatcgtctccttaccatatacatactttcctttttttccttcgtaccatatactttattttatgtatgaattggaaatatactaagatttaacatctgatccatataatagatagcacttggagtaggacgataattaataacatttaggaaatttgatgaattgaatttggtt

SEQ ID NO: 13319 - DNA, 481 bp, Arabidopsis thaliana
cagctgacactattttgttttgaaaagagtaaattcattgttattcattataggagcttgttttgtagcagaattcaacacagtatataatttcagatcagaccaagacatggccttccatcacagtaacggctttgcctctcaggagaaccctctgcttctccttgtctagatgaatccttatcgttccactcctactcgaagcctaagcaacatttccaaaaactcaaaatcattcactaggaagcactaaacgctactttaaatttaaagagataagagagattacttggtaggctaagaaatcaaacttattcatcttgatgctccagtaatgtgccaatgcacaatgtgcacttccacaaacagggtcctgaaaaaggcgacacatttcaggcagaagaaatcatattctttggtgttttgttcaatcctaagagcaaagactataatgtaagttgcagctactcttttacctcat

SEQ ID NO: 13320 - DNA, 906 bp, Arabidopsis thaliana
aaataagcaaataatatattcccaataataatatgcaaacatgatttatttatttttgtacaacaatacagaagcaaattattatcaaacaacaaaaaaaataaaaaaaaattaagcaaacgtggtatcattattacttattcttgcaattaatataaggcagcaaacgtgtttgttgatctccttcacttgccatttacggagccatgagagccaccttagaagcttagaaccaaatttcggatcattccatctctgtaatatcccatgcttgtgacgctataaaaacaaaattcaatatatcaaatttcctactgttataaattatcgtccaattcgtgctatttattacatggatcggatgataaatcttactatatttccaactcatacataaaataagtatatggtaaggagtcgaacctgcactagagagttccgagttgtcgtcacctccaacttgccacgagaagtaaccaagcagacccttctgcttagcgtatatcactttggtgacgatgctctcctcactgtcgtacccgatccaagttgtcccggcgtagcaatagtctccgataactatgttatcatgcaccgtcgtcgctttgttatctactatccacgtctttaactgactgtaactgatctcaccgtcatctgatatcgctggtccagtggtgtctacgtaatatccgtgattcttggggtctgcgagagtccaggcccagccatagtatggaaaccctaacactgctttctccgcaggaagtccggcatcaatccagtccttcacgcctgagtctccacttggacctaaccataaaagtgagaacagaaaacttaaggtgttggatgaagatatagtgtgtaaaataatgaagaaatagtaaagattataccgtcgga

SEQ ID NO: 13321 - DNA, 535 bp, Arabidopsis thaliana columbia
taaagaaaatattaaacaaccagcaggaaccttaacagattagaaaatgacatattacctccgcctatttgcaaccagcaccacttgagaccatataattatagaaagataaaatttcatccacacttgcctcaacattagaagttctttcagggcaatgagaacgtgaattggttcggagaggattaaaaccaaattcaaccttagttgcattagaccccaaatcaccaggatttgatgcactgacattaccagtaggaacagtctctttcggacgattaaacccactatcaggatccttcgagtggtcaccttctattatagtgtttttggtaaatcaatctgtcaccgcggaaatgattgctttcccatgagcttcaagcttcgcatccaacaaacgagaaatagcgtccatagaaacaaccctagaactcccaacctcctcagggatgtgtctttgagttttttaccgaaccccaccatggttcttagatagtttggttgcttttcattccgagaaacattagacttagca

SEQ ID NO: 13322 - DNA, 519 bp, Arabidopsis thaliana
ttatttttgtctaaccaagaaacgctattccataaatgattacaaatacacctccaggctcaatatttaccacaatacaacgatttgcaggaggactttggaggagggcatccggatcccaatttgacctatgctaaggagcttgtggcacgaatgggattaggtaaatccgacacaggaggtgaacctccagagtttggcgccgctgctgatggtgatgcagaccgtaacatgatccttggtaaaaggtagcttactgacgttttcaagagagatacatccatggaactagtataccaagtacttttaaacttaaagtatctcttcatttgtaggttctttgtaactccttcggattcagttgccataattgctgcaaatgctattggtgccatcccgtacttcagctctggtttgaaaggcgttgcaaggtattatacagctgggctctttgtttactgctagtagaattctgtgtatacaactcttttaatatatctctttcgtggatcattttgt

SEQ ID NO: 13323 - DNA, 966 bp, Arabidopsis thaliana
catttatataaaaaaattgaaaatttgaatatgatttagtcgagaaccgacttcaaacaagtaacggattccctggtgcttcgaaatggatccatcaactggatctttgtactcgaattcatcagcactggcgacgcttgccacgttcgaacgaatacctttcacaatcctgaataaaatcatgagacaagaagaggttagaaaaacagagtaccaaactgatgagtacgtgttcaagtatcacaggaaaggatttctgagacgtggcagtgtgtgtacttgttaacttcaggaattgaagattgccatttgaccaactgctccatcagtgccatagccttacctgcgtctccattctttagagacaacttctgagatgtcagtaagggtaccgattctccatataatatggtataattacaatcaccaaacttagcaacttttacctcatagtcgtaacgagtgtaatagtgacgaccgtagtagcccaatgctggcggacaatgtcttcaactgacaccagtttagcgttaccgtcaatatttcccttgttcttgtgagcaagtatagacatccatgcaagaactgcccatattccgtctttctcacggatatgatccgagcctgtgaaagatctttctttcagaactgtataggttgttttaaagttatgaacagatgtgtgagtgtggaaatagaaactgaccagttccaaaactttcttctccacaaacagaacacatcccagcatccatcagattaccaaaaaacttccagcctgttggaacctgatatgtgatttaatagagatatgaaattaaattatgtagttaggagaaaagaagctggatagaagttgcacggtgacatgtacctcaaagaacttcaaattcaagctttttgcaacgacatcaagagcagctgaggttggcatgctcctaaaacaagaagtggaagttcaaaata

SEQ ID NO: 13324 - DNA, 584 bp, Arabidopsis thaliana columbia
ggctttcttctattatggagctgcaaaaccaccttgtttgaatggtgtcgtgaattcgcaagaacagattcctttagtcgatgtaagtgtgaattaagcataagcctttgtgatcttatgtaaagtagtttcttctctagtctgaagaaaatgtatgaactgaagaagtaatcaatcttttgaatgtgaaatatatgtttttcgaaattgctatttatagaacatgataaattttatgagtctcagaagcagaggcttcgcgtccgtaaacacttgatcaccatgtttctctctcttgcaacgtgctctcttctccctttctctctcgctctctctcaatctcccaccatctctcatcctcatttccccttcatggttggttttgttccgatttccaaatttcttcatttggcaaattcttttgatcttcttccatggattcggtaattattgaaccagatgagcgggaggcgttggcatcgcttgtccctgctcatcctcttcctccaccgtaagacacattcctatgtcgagcaatgcgaacagaagctgcaccatccaatccgcaaatatagccttgatga

SEQ ID NO: 13325 - DNA, 1158 bp, Arabidopsis thaliana
gttgacttatttaataaaatgacatattcaagattaacttgacatacatacatatgtaaatgtgagtatgcgtgtgggtctatataaatacatgagagtaatcgtgtgaatacaaccattacaattgtgtgactatcatttaaagaataaagcaaacacatgatccaaagaagatagatagggagacaaaaaaaaatcaaggcaaaaaatgggtttctctccatcctcttcatggtttcttcatcctcagcttcatcatgttgtttccaagatgtcttactttgatgcttttttgttctatgtaaatacatctctctctttaacaagaacataaatacatctctgatctctctatctctctaaatatatgaactatatatgcttttcttctcttaagaaaataagttatcatatcgcttttataatttttcttattattttgttaatttgatcgtttaaaaaaaattatatatacagattgtgcacttagtggacaagctaggattgtggcatagatttccagtgttattaggagtggcttacttggggttacgaagacatctacatcaacgttacaatctggtacatgtcggtccgatcaacggtcagggttacgacaccgatgagttctgttatcgtacggctgacggcaagtgtaaccatccctccgataacaccatcggcagccaaggcagcttcatcggccggaatatgcctccctctacttctcagtacggcgtaagtttttttcttgctctccttcatattcacaatcactttttcacaacatgcaaattaattttgtacttttgattaaatctataaaataaagcgaagtgatatataatatagcaaaagtaaatagtagtggaatgagacactagaaccaaattttgtgacgcatttctttttaatcactacttaccggtggttgaaaattgaaatcatgatgtaatgttcctctgctttttattttattttgtcagcttttgattgattttatgtgtttgttgatgcaataaagtttttttgtcaatacttttttttccctgaaaatttagaaaaaaaaatgttggagttttgttattattggagtggatgcacctcatgatagccaccctaattggattagtgttggttttgcatgatacgtaattc

SEQ ID NO: 13326 - DNA, 982 bp, Arabidopsis thaliana
atgggcatatgacaaacccatgccaaaggcttcaacgattgaaagctaatagtcgtatcgagtgtaatagtgacggccatatgtagcccagtgctggcggacaatgtcttcaaccgtcaccagttttgcattcccatcaagggtttccttgttcttgtgagccagtattgatagccaagcaagaactgcccagatcccatctttctcacggatatgatccgaacctgtcgaaaagcttctttgtgagttgtgtagggttgttacggttttaaaacatgtgaagatctagcaatagaagctcaccggttccaaaactttcttctccgcatacagagcacatcccagcatccattagattgccaaagaatttccagcctgttggaacctaaaatatagaagtattagagcaatagactatgttacgtgattgcaatgaatagaagctagagaaaagcttcacaatgacatctacctcaaagaacttcaaacccaagttttttgcaacgacatcaagtgcagctgaggtcggcatgctcctgcaatacgaatgtgaaagttgagaatttaatgagaaaagattgttactatctataataaacaaaaacgtatgacaccaaagtccagcgttttcaatctatgaactggagtaaacaaagaagaaccgggatgcatacctagcaacaccttttaaaccagagctgaagtatggtatggccccaacagcatttgcagcaattatagcaactgaatccgaaggagttacgaaaaacctgcggagaagagatatttttggttaacggggagagtggtatatccgctccacatctctgtgatctcacttaaaagagaattagtctctgctaccttttaccgaggatcatgtttcggtctgcatcaccatcagcagcggcgccaaactctggaggctcgccaccagcatcatcagttttactcaatcccatgcgtgccacgagctccttag

SEQ ID NO: 13327 - DNA, 541 bp, Arabidopsis thaliana columbia
tttctcgtctaccaaacaaatttgcgtctagttgatctatccagcaatagattatccggagacattcctacctggctgttggagaataatccagagcttaaagtcttacagttgaagaataattccttcactatctttcagattcctacaatagtgcataagttgcaggtcttggatttttcagcaaatgatatcaccggagtgctccctgataatattggccatgtgcttccaaggctgctacatatgaatggatctcataatgggtttcaagggaatcttccatcgtccatgggtgagatgaatgacatttcattcctggacttgtcttacaataatttctctggggagctacctagaagcttattaacaggttgtttttcattaataaccctgcagctctctcacaacagttttagtggccctattcttccaatacaaacgagactaacttcattgatcgtattgaggatgcataacaactatttacggagagatcggagtcggtttgcgtaccttggttaatttgtcaatatttgat

SEQ ID NO: 13328 - DNA, 613 bp, Arabidopsis thaliana
ttttataaaacttaaaatgaaatttgcatgtcaaaaaggaaatgatcatcttttctccctgatgatacaggagaagtgattagcatccactcaacaagcgagctagaagcaaagacaaaggctgctaagaaggcatcacgtctgctcatcctttacttcacagccacatggtgtgggccatgccgatatatgtctcctctgtactcaaacctggccacacagcactcgagagtcgttttcttgaaagttgatatagacaaggccaatgacgtggctgcttcttggaacattagcagcgtcccgaccttttgcttcatcagagatggcaaagaggtggacaaagttgtcggagctgataaaggttcgcttgagcagaagattgcacagcactcttcttctaagtaatgttttatctcttctctcattacactcctctcgcttgtactgtatctttgcaacacaatgattgtcccgtaatttaaaagtgtagcataacttttaaagtacttgtaattggttagatgacagatcagatcagttgaataagaagagttaagagagcagagatactttaagtggtagtttgctcgctatcggttggatatacaggatg

SEQ ID NO: 13329 - DNA, 418 bp, Arabidopsis thaliana columbia
gtgattggtttagatagaaatgacttacattgttgaactgatgtttgcttttcatagaagaatacaaagtgggcaaaactggatgcgcaccatagcaaaaagcatataagctcaaagcagtagggatcccactccaatttatcaactttcctttttgatgaaacccaatcccatcaaatgcgccaatccaagatattgatccaagcgtcacagtcgtagctaaaacgccactcatagaaacatacgacaagacgccgagattatcccaccatagagttggcataatgacaaaggcgacggtcgccatgaaagcatgtttgccattcaatctcaatccgatcatttcgatggtaaaaccgggaaaagattgtgaagattgtcgccctcgaggatcaagaaaccagtggtgactagatag

SEQ ID NO: 13330 - DNA, 839 bp, Arabidopsis thaliana
taatggaagagaacggtaaagctattgcaacggcgctagatttcatatctataatcagaagctgttcaaggaaacagaagtatgcaagcatgcttacaatgacaagaattggaatatcttgccatacattattgaaccgtgaaatctcgatatccctggctgctctagaacggttttgagaatcctgcacacgtagaagggtaaccgggagatttctcacctcttgcttacacacatcacatgttatgttccctttaattgtaaaccatttgatagtgcacgttttgtgggcaagagctagttcccctttgcacatacattccatcttaaaagcttcttcatcttcttccatttcaaccatacagattctacacacagcttcttcttcaggaacatcttctccaccatcatcattttcatctgaacacatatcacatagtttgttacatagagtcaaaatatggcatcacaaagatatgtctgggaaggtgatttgtaaccgtggagtttactcaatttcgatgcctgcgtcatctctagtctcttctcatccccacgagacggagtaggaatcacgcggaaaacacttgacggctttacacttccatctttgttgaagaatgtggggacagagcgtgtacgacgaataggcagtaaacgctcccctttctagtaaaaagaacagtaaaatcaagtatagcagaagataaacagcttctctaaagctaagacaaatggaaaatgaatcaattcatcaactgaaatactcaacaagataatctcccttattaatggtataccaagttttgtaagatagaatcctgaccatggatgtaccg

SEQ ID NO: 13331 - DNA, 723 bp, Arabidopsis thaliana columbia
acatcctactaaagactttgattttttgttgtagaaattgcataagttaggagcaagaaagttcttcatcaacaacattaaaccattaggttgttacccaaatatagtagctaagacggtaccacgaggaagccgacgaacgtataaaccttgctataagcatttacaacgaaaagcttagaagaagcctgcctgttatgaagaaaaaattaaacaacacttcttttttatactctgattacttcaagttcatgttgggactaagaggaccttcgaccaatcgatatagttcgaatctattgaacacgacaggcccgtgttgtcctttagattatgatggaagtttaacttcaagttgcaagcgcaggtcaaaaacgtgtaaagcaccagattctactcatattttctttgatccgcgtcatccgactcagttggcgaatttcatgtactccattgcgtgtttcgacgagagaactatttgccatgtcgtgtgatttaaatttaacaccaatttagttgttgtttatttctttccgcatgacttcttttgaacacttttctaccaagtcttgccgttttttgaatattgaattcaacgtgattgctttttgaatatcaatgttctataaataggcactcaagcagtcgaaactcaaaactctatagtgagaaaaaaaaaaaactcgtgtacgcgaatttaagtggagaggcttatttggctgg

SEQ ID NO: 13332 - DNA, 567 bp, Arabidopsis thaliana
cctctagtaacgactgattggattaataagctatctaaaattaggattcttcatgatgttgtttggggaaaattgaaattatgaatagaattagaagttttacagaatcatttgatacaattgtgtagttattgatgaatctttatgtattgtgtattctaaacgttgttttgctttgtgataatttgcaggcaatatttggagtctatgttggtcatggaggagttaaagcggctgagtgtccagctaagaacttagataagaacattgtagaagaagtagttggtaaaagacacgagttggagatagctgaagcggtggaaacgtagttacttgactacagacacaacgtttcttaaggaggaaggttttaagggtggttcatcctgtgtcacggctttggttagcgaagggagccttgttgtgtcaaacgccggtgactgtcgtgctgttatgagtgtaggaggtgtagctaaagttttattttctgatcattgtccgtctagagatgatgacggaaaagaattgaacacgggaggatatgttgatatgttcacgttgtggaga

SEQ ID NO: 13333 - DNA, 549 bp, Arabidopsis thaliana
aacatatcctcccgtggtttcaattcttttccgttcatcgtctctagacgggcggtgatcagaagataaagccttagctacacctcctacactcataacagcacgacagtcaccggcgttagacacaacaaggttcccttcgttaaccagagccgtgacacagcatgaaccacccttaacgtcttcctccttaagaaacgacgcgtctgttgccaagtaaccatgtttcaccgcttcagctatctcagactcgtctctcttaccaactacttcttctacaatgttcttatctaagttcttagctgcaaactcagccgctttaactcctccatgaccatcatagactccgaaaatcgcctgagaaattatcacaaagcaaaacaacgtttagaatacacgattcatcaataagcacacaattgtttcatatgattctgtaaaacttctaattctattcagaatttcaattttccccaaagaaccctaattttagatagcttattaaccaatcaatgtagatccacatgataaccctaatttgagctgtaa

SEQ ID NO: 13334 - DNA, 515 bp, Arabidopsis thaliana
taaaattttgattcggaaagatataattttttaactttgctttcgaaaaaatctaacacgtgttttagtttgttttttttagtaagccacagggagaagaatgtctccctgcattttattaagaaactaaagaaaagaaatcaagttcggacatgcctcggaaacgcagttcctcggtcattatcctctacaatcatcgccacaaagggcggaacaacatctaacatatgaaaacctaaaggtaaagaaaaagcatagttcgctaacccgtccacaagacggttagcttccctatacacgtgagtaacccggactaaccagtccatttataagaagccatggcacaaacgcaccaggaacgacaacgaatgagtatcactaatccccgtcgttaagaacccaaccaccaactctgaatcaacctccaactcaacccgtgtaaactcctctcccaagccatatagagtccgtagtacacccccataattccgctaatggagctgaacaaacaccta

SEQ ID NO: 13335 - DNA, 525 bp, Arabidopsis thaliana columbia
gaatcacgacaagatccatcaatgcacgtatgaactactgatggatctaaccatcactaagtactctccctcaatataatatccaacaattggaaaagaccatagattaatggttgtttaatctcttattctcatcttcatgcataaacctatatttggaaattttaaatgtgagagctaaatcaagttaccttgcaagtactcaaaaaacactctttttccatgctcctggtcaggtatgtaaaaaccataggcatatgtccattttagaactcgtctgcattcaactatctatgatcgtagagaaaattagtgagcaaaatccaaaagtctcagaaaggccaagggtggaatggattttacctgtaaccatgcttctataatgaacttcagttgtgattcaggctgacactgtatgtcactgagcttctcaatctgcgaagtccatagaacaaaagctttagtgaacccaacactgtaataagcaagaaaaatcatcgaaagttgaggtctcatgccaaaata

SEQ ID NO: 13336 - DNA, 396 bp, Arabidopsis thaliana columbia
tgtgatgtagcagaatattaatcacgtatttttgaattacaggtgtatggaggagaagctagaatctcaacattaagacaagtattcccaagaatggaagacaaaagaagtcttgcatcttctgaagaacgagctcgaatcaagggcaaagcttctttattagctgcacttgactactacgttagtatgcacagcgacattttcatctccgcatcacctggaaacatgcacaacgctcttgttggtcatcgaacattcgagaatctcaagacgatcagaccaaacatggcgttaataggacagcttttcctcagcaaaagcatcacttgggtagattttcagcaatcgcttggtgaaggacatgtgaatagacaaggacagatccggttaaggaaa

SEQ ID NO: 13337 - DNA, 605 bp, Arabidopsis thaliana
ccaatccttgtgctatcgccacaagctctacaggaggcggtgtcgcgactctaccaaaggcaatgtacgctacagaagcagtggaccgcttctcgatccaagccaagcaaccgtgagggtcgtgcactagcgttgatgtttgcgatggagaagataataaagcgagaggaccgatgtttaggtaacgtttgaattccgatctgaaatcatttgtaaacgtaggatccaattcttcaaaggaattgatgaaaacagcagtggcacgaggtaaagcaagacccatttggtgcaacgttttagagaaaacagagtctaagttcccaaacacaacgccttcttgtgtgtctttgactctgatcttctccattcctgagataaaccctattgtctcctccatacgctcacctacttctgaaaattagaatggagacatttcttttaaaaatccctcgggggattattgtggaacaggcaggtttacttgccctataaggcatctatagttgcaatattgaaatttcagtggaatcgtaaagcaagaagagatttgtgtatactttgacacgacgttttcctgatggcactgtgtagagatgacagtgacg

SEQ ID NO: 13338 - DNA, 494 bp, Arabidopsis thaliana
gggaattcaatgcctccactttgacattcaggtcattgtagctgaagtccagcttatggtgcaattcagataacttcttagcaatttccaaggagctagatgcttgtccctgtagcaggtgttgtaccatctgtttcatttcagcatcaagagcagcaggaccttggttttgctgaactgcaaacccaggtggtggttggggctggtagtttccctgaaattgctgcttgggaacaaaaccttggttgtagggaacaaaaggtttgttctgaccttgttgttggctgtggaggatacacttggtcttattagcaacgttggtgctgcggtaggagaggttagggttgttggtcttgaagttgttataccctttgtagtcacctgattgttgttgatgtagctaacttcttctaactggttaccctctccatcttggacttgatactgctcgtcctcaacaagaaagtgcatatgcttctgctggctaagtagaa

SEQ ID NO: 13339 - DNA, 556 bp, Arabidopsis thaliana columbia
tgcagttaaattttccaacaaagagaaagagagaacatcactatcacagtcacttgaggccatcttccgtcccatcacgctcgtgtcttctttgggtttataccaaagacaattcaattgaataaaacaatctccttccggtaaaagagaggcttccgtccatgaaaagtaatgaacatcatcatcctcaaagaaaattgccaccttcattttagaaccatatactccacatcccatagaatcaatagacgagagcaaatattccaaccatggtaatgagtaaacatcaccatctttagacaatgttagcgtcataagaaattcaattcgatctagaattctgattccatcaagtagattgattcctccattgattccgggatcaaaaacccatgtagaaactccataccattgggtaagagtacattcaccggttaatagccggaaattccacggcaatgaacaagcacaccggaaacaaactttctatgaagaaagacaacttggttccatcggatcaacattataagatgggagcggcaacggatgtgggatg

SEQ ID NO: 13340 - DNA, 485 bp, Arabidopsis thaliana
cataattagctactggatgccgggagaaatgtcagtgctgatagatactaaacgccctcatgtatacattgacagtcaaatgggtctcgatacgttctttttggttcgtggtgggtatcattctctcaatttgttcctctctttcattactaccgtcaaggcgtttggaatactgtctctaggactcacagtgacgtttctgaaactgaccgtgtgtttgatagtgctacaaatgttgatgaaaataatgaggatgcagatgagcaagccgacgttgaagacgatacaacagatcaggatgaagtggaggagggcaacgaagatgatgatgggtatgatgattatcatggtgaggatggatatattggggaaagtacctctatcctaccatagacagtagtgaaggtattggcgaagaatacaattacaacagctggaacgatgtaattgtagaaaaatatggaataaaaaatgttgaggaagac

SEQ ID NO: 13341 - DNA, 539 bp, Arabidopsis thaliana columbia
gatatatgaagccttaccggtaacatcactgtagaaagcaacaagagaatcaagcattcgggttcctcggtatcgtgcccgcattgtcgaattcaaaagtaagagagtgggaaacccatgaactccatacttggaaagggtgctgcagcacaacaaataaccaaaagatcatcaccaaaacagaaccaaaaggaattcgtttgagaccagtttaaagattatcacctaggcttaatggatgattccttaatggcaaaatgaggaatggaggaatagagagaagagataacatcgaaactcggtctaaatgaccttgagaatggacaccatgatgcatagaaaagcaaagccacataatcacacttgttcttatgaatcatatccaatgctatttgcaaccaacgctcatcacccttcaccaacatttgatgacattcataagaaacgaaagatagattctttatcaagcagaaaccctagaaattgaaatccgagctctaatttaaattcctcggtgacacaacaaaacgaggacgctc

SEQ ID NO: 13342 - DNA, 614 bp, Arabidopsis thaliana
  unsure (1)..(614): unsure at all n locations
ccttatgtctatgcgctccttgtagcgtcgtgaatctcgtcgtactcgctgtatacaagctccctcgtggactctgccgccgcgcaatccgccgtatacgacggaaacgattagcgaaaaaggagtttgtagagagtggaagagagtttggtagaggagggagttctcaattcgctgttcacccgttagagagcagagatgaggaagaagaagaagaagaagaagatgaggctgtgattgcgttggagaaggagatgtggagcagattttacagtggtggtttctggcgaacgtttctcaagctgaaacggcgtcgtctcccaaaaacaattaggcgatgatttttttttaagtgtagatttgattcaatgtgtaatgtaaaacgaatgtgaattggagatcaatgttgataaaatgtgtgttttgtgcaatggtcaagtgtgccttttcgatttttctgtggctttcaatcaaatcttttgaattgtgactatacaatgtgacataaacagtaaagaattgatgatagctanaaactagagactatgtattctcttagtcgaataagctaagcaagcatttggaatctattgggatgatgattgagattgaga

SEQ ID NO: 13343 - DNA, 446 bp, Arabidopsis thaliana
tagtaacgtgcgccagtgtgctctaaagattgtttcaaattaaagttaatttacaggtcaggcagagaattatctcaggtatggatggtatcgtaattcatcataacatattcatgaagcgaaactgagtcgtcctagcaatacctcaataggttttgacaggcaatcactatctagtgatcaccaaggccaacagcgttcttgaccttatcgccactgcacatactatcagcacagtgacgatcaaaaagtcgtcaaggttacttacatagactgaggggtactgccgtggccctccctgtcgctcacacgctggctcttgtcaaaggcctgctgggtggtgcttttctggtcatcgggctggacgccgcgggagatgcggtcggtggtatcggtgtaggtcttcttcaacctttcctgggtggacttgctggcgtcgggagtga

SEQ ID NO: 13344 - DNA, 504 bp, Arabidopsis thaliana
gagagtctactgaggaagaatttggttaaacataaggtagcgactccttaccatccacagacaagtggctaggtggaaatctttaacagggagataaaatcgattctagagaaaactgtcgggatcaccaggagagattggtttgtaaacctcgacgatgcgttatgggcgtacagaacagctttcaagaaccccattggtacaaccccgttcaatcttctttatgggaaatcctgtcacttacctgttgaactggagtacaaagctatgtaggcagtgaaacttttaaattttgacatcaagaatgctgaagagaaaagattgatacagctcaatgaccttgatgagcttcgtctagaagcatacgagagctctaaaatttacaaggaaaggaccaagtcgtttcatgacaagaaaataacttcaaaagattttaaagttggtgatcaagtgttgctattcaattctcgcttgaaactttttcctctcaagtctaggtggtgt

SEQ ID NO: 13345 - DNA, 500 bp, Arabidopsis thaliana columbia
actctagaccatgttgattttaatccaattacaaatttacaatcacaaatttatccaatcttttagtattgattttcactcagccagatcgcgttaggtaagtcatttgaacaggagataaatcagataaacaaaaatattatggctttgggataaccaaattattcaacctattcagaaaaaaaaaaaaaaccagccaatgaacgaattcgtaatgaaactttttaatttttgggccctaaaatttaatgggccatgtaactacccaatagccatagtctctttttattctatttttttttcaacgcgaaaatgtttttattttggtctgagatgatttgactgtaaaaccgcacagtttttgaaagaggcgaaattcgagcaagtgatcccgccggtgaagatcgacgacggcgaaggcataacttacaaaaacgcgacggatgcgttacggagagcagtttctttctactcggctttgcagtcctccgatggccact

SEQ ID NO: 13346 - DNA, 300 bp, Arabidopsis thaliana
  unsure (1)..(300): unsure at all n locations
cnnnnnnnnnnnnnnnnnnnnnnnnnnnnctaaaggctgatcaagcaaggttcggggacaggtaacggacaatgggtgcgtgaacgagcaaccacgatcaaggcaggcgacaaggccgaagtcgaaggtcatcctatcgacaacgatgaaaaggtccagtagctgctcaacataccacgcggntgtcagtgccagtgtaacagactgacaattggacgcaagacggtcgtcgacctctagcccaatgtcaatgagcgcaagcaccccgtgggncgtctggaccgggagactccaggagtc

SEQ ID NO: 13347 - DNA, 483 bp, Arabidopsis thaliana
taacggccgcgaccgccagtgtgctctaaaggagtcgcaagattctgacctcgttcttctgaccgatacggtgcgcacgatcttgggcttggagatcctggtgaggattccagtcggaatcgaaaatgatgacagtatcagcggtttgcagatttaagccgagaccaccagcacctgttgagagcacaacgccgcccgcaacaccgcctgctgaactgccgagctctagaaccgcgcagtgaccacctccacctccagctccaaccggatgttctccttctctaattcctcgatccgcccagatcgccaccaagacaccgcccgcacagcttccccaaccgcacttaacgacgtcaacgactgcgatgaaatcacggaggattctatcgagcagttcaaactttacagcggtacgcagactagatcatttgtgcctcgcccagggtttacttgatcttccactgctcaaacacaaagggatga

SEQ ID NO: 13348 - DNA, 565 bp, Arabidopsis thaliana columbia
ccaaatgttgcgacggtaaacaaggagggagagttttgggtacaagctgtaactttagatatgagttttacccttttcttaggacttaaaacattttttgagaatgatgcaagccacacatttctcttgacaactttccttttttgatacctttaattttttgggtttttgggttttcactccactttcgtttttgttcgttaggtcctcgttgtacctatgaatatcaagctttattcattacagcctttaattttataattagtaaagagatgatataatgtatatcgtctcctcttttttttttttttttgtctcctcttttcatattcttatattcgggatatttttgagagaattggtcaaatgactataaattagagaataactattaatatgatcatcaaatgtgttctagtaacttaataactgtcttatggaaagttttgttagcaccactcacatacatcatcgaactttcagcataccacaagcaagacttctctggattatcgacaaatatgcgattttttttaagtaaacatttaaactttgactttttcat

SEQ ID NO: 13349 - DNA, 425 bp, Arabidopsis thaliana
gatccccgattttcaatactcagattaacaatggctatttactccagagattttcgttgtattttaaattagcccggtttcagtctcagcaacaaaatcatcgtcgttctcctagtgaaggaaacggttcagccactcagggtaatctccaaaccccaatcaattccaacaatcaagcagatggtgcttctcctccgcctgtcaatcaatctcctcgtggttctgccaatcagtctcctcgcggttctgccaatcacactactcctctagctgctcggttcaatgacctaactatagaagagttgcttgctagccctggtcgtgcagggttgcctagattagaccctaatcgacctcctggtactctctggtaagccactaggctgtgttcgtcttcacaatgacttgattgcatagtattgtct

SEQ ID NO: 13350 - DNA, 436 bp, Arabidopsis thaliana
gctagccgattgcgtagtcattcactcaggtgcgataaatgcaaacgacacgcacctactcttcatcaacctcctgaggaaatgtcctcgatctcttccccttacccatttatgaagtggtccatggacgtcgtaggtcccatggaagcctccggtgggaagaagagactaaaaaacctgctggtcctcaccgactattctaccaaatggtttgaggctaaagccttccaacaggtaaccaagaaacaagtcgaggacttcctatgggaaaacatcgtatgccgacacggcataccattatgagatcgtcaccgataacgggactaacctcacctcgggaaaaatcaaagcattttgcgacaagtggaagatccgtcttaccatatccaccccgtgtcccacaaggtaacggacaggcagaagctgccacaaagtt

SEQ ID NO: 13351 - DNA, 488 bp, Arabidopsis thaliana columbia
ctctctgttgtcttcctctttgtcttctatctcgctgcggtgacttcagatctagagtctgaccggagagctttactcgctgttcgtaacagtgtccgtggccgtcctttgctatggaacatgagtgcttcttctccttgtaattggcacggagtccactgcgatgcgggtcgggtcacggctctccgattacccggatctggtttattcggttctttaccaatcggtggtattggtaatctaacccagcttaagactctttctctccggttcaattctctctctggtcctatcccttcggatttctccaaccttgttctcctccgttacttgtatcttcaaggtaatgccttttccggtgagattccgtcgcttctcttcacgcttccgagcataatcagaatcaatctaggggagaataaattctggggtcggatcccggataatgtcaattctgcgacccggttggttaccttgtatttggagag

SEQ ID NO: 13352 - DNA, 530 bp, Arabidopsis thaliana columbia
gtaacatcataacatagaaacaaacaaaagaaaagaaacatacctttgccttgagcttcgactgagatggttttctccatagcttctcgatatcagtattgagatgaaacacatagagtatccagcaatgagaatactcttcaagaccctcaagagacgcaggaggaaccaaagccggatcaaagatcaaacatgccctcgcaagagaaacaagcaatggctgcctcggtgtcccgttcctgcaaaaaccaagaagtagcacttaagaagccaattattttaaaacagtataaagctcccctgaaactggaaagccatgaggatcatgttacctagtagagaagcaagactggatagtgccaataggtcgcatcgggtatattgtgctgtgtaaatcatgtgactcagtctgtgctaacgcctcccgtaaagcctacagctttcaattgcatcaagagagtgaacataaatccatagagattcctccaatcttgacaagtatcaattttgatgtgcatttgaatgatttg

SEQ ID NO: 13353 - DNA, 581 bp, Arabidopsis thaliana columbia
agttggtttattgggattactctgccatgaaggtcttgactttggagtatgtaccaggttcgtgttgaaactacccaatatattggtgtcgtttgataaagtatgtagcggtataaacactcattgatttctgtgattaggtgttaagatcaacaacttggacgccttagctgcacggggttttaaccgttctagaatcgcatcacgggccattgaagcttatcttatacaggtcaataacaagatagcaaaacagttcttgaagtccatgtcttcttttttttcttatggttcaaacttatgttcatgttttggctgttttagatactcaaaaccggcttctttcatgcggatccgcacccaggaaaccttgcaattgatgtagatgaatcaatcatctactatgacttcggcatgatgggagagatcaaaacatttactcggaagagattacttgatctcttctattctgtttatgaaaaagatgcaaaaaaggtaattttttcttgcaagggttaatctcaatctgaaaataagaaaactaactcaatgtttttacaggtcatgcaaaaccttataga

SEQ ID NO: 13354 - DNA, 584 bp, Arabidopsis thaliana
ggctcatggtctaaagagtcttgtttctctccatcagtctcatgatctagatctgccacgtgtccttcagattcagcggagacgcggaggaagtgtggtgcaaaggctgacgaggtggaggcgtaggcgacggagacggccggtgaggatgaatgtgaccgtcgatacaagaaccacatctactctcagcccatctctccatatcgtaatctccataccctaagatggttttgccggagcaaagccgtccaataacactagcgagaacacaaagaacggtgacaacgataaagacggcgataaaaggaccaatggtggaatttccagcggaggagacggaggatgagtcttgtgaaacctctgtagctggtggtggttgccagtacaatggcattgacgccattgttaacagaagaagaagaagagacactgaagttaatgtgaagaagaaggatctcaaatttgccttttaaatgaattttgagaaaatatttaatattaatatattttattttatcttccaggaggagagtttttcaaaaaatgaaaatggtgaagacagtgcattaacctgcaagagagag

SEQ ID NO: 13355 - DNA, 722 bp, Arabidopsis thaliana
atgaattataagtcttgtaaaaatagttaaattagttaaataatttaattataaagttatattttgaatttgaaaatttaaaatattattaaactacgataactacaaaatatggcaaaaaaaacttacaactcatacaaaattaaaggtgaattttgaaagtcttttaaaattatttattctttttttttggaaaatgtaaattctcttataaattaaatgttcaggtaaatttataaatatagaaaatttaaaacaaaacaataattgttgcatggattataacaagagtaatatatgataattaaaaataaaaataaaaaaataagagtaatattacacgcaaagccaaaatataaaaaataaataattcaaaaaaaccttaaagagagagagggtttatctttagattgagacactgttcgggatccctttcccagtaatcccaccttctctcgtataatccgtagtattcgggtacaacaatgtgtacggtatgttaaccggtccggttctgttcttgaacctcttgtcattgtttcttcgtataatattgttctctatcagctcaagttctttcccaaaccgcttaaacgcctccaaaggctcatcatccgccgtccaattcggtgaatctctttgccctaagtagatctcgtccgttgaatgcatagacaatatctctatgatggagatccaagtagagtctgtactgcggcgtg

SEQ ID NO: 13356 - DNA, 539 bp, Arabidopsis thaliana columbia
tgaatctgtttcatctcatggtcgggttcaactattcccgatatagcttcagacccagaaaagggcattctcaaagtaagtttctttcactttcacctaaccaaatgaaacccaccattcttctcctaaccggattggcttttgcttgctccttattattctcgtaaatggtgtctttttattcagctccaagaaaagtttaggcttgacatggatgatgaagcatgcatccatttctttcaagacctgattaatgaaagcgtaagtgcgctgttcccgcaaatggttgaaaccatacacagatgggctcaatactggcgttgaacccacagggtttaacaacacaaccatgttaactcctccagtttagccgaaaattgtagatgcattatacttttctcacgttaataacactgaaatgtttgattactgttctatgcttttacatctgcgacatctgcggtgatacattatctgtaaataacgttaacgttgaaactagatacgttttacgttcattcatatatttgcgaaattac

SEQ ID NO: 13357 - DNA, 405 bp, Arabidopsis thaliana columbia
ccatcatggcaaaaaccgtgttttcgcaacagtgcggtacaaccggatgtgcagccaacttatgttgcagtagatatggatattgtggcaccacagatgcctactgtggtaccgagtgccgaagtggaccttgcagctcctcaaccacacctatcccaccaactcctagcggtggtgcaggcggtctaaacgctgatcctcgtgatacaattgaaaatgttgtcacaccagcattttttgatggtatcatgagcaaagtcggaaatggctgtccagcgaaagggttctacactcgccaggctttcattgcggctgcccaatcgttcgacgcctataaaggaaccgtcgctaagcgtgagattgccgctatgttggctcagttttctcatgaatctggaagtaagt

SEQ ID NO: 13358 - DNA, 714 bp, Arabidopsis thaliana
attactttagaaacaaaacaaaagtgtggtcttttaggaatgattattgatcagttcatagtttaaaatcttgtgtttttatcgtaaaagtgtggaccaggatttacattatagctttttggagttgttggagatggtcctcatggtagcttatcctaaatgtatcattgagaatctcctctcgtgattttgtaccgtcgtcgtagtcattaattcctataaaaatattttggcaattaacaaagagaggaaactgtttaattaatagattaaaaaaaacaaattcgtaaaatattcttaccgttctctttgatataaactatagggttgttgtatttatctttgatgtagttaagaacttttcgtaaaccttcaggatgtgattgaagtatgcctcgatcttcctgtttttcaaaaacaagcatttatcttcttattagaatctttggatcaattaataaaaagtaaaaataattgcaacgttgattttgtaacaaaactagtcaaaaatgttacgtacccctggtccgaattggtgattactgtgatttgttactgttcataaacagacaaaaaaaactagtttaggaattttattgaatctcatacaaagagaatggtcgtacggatgttaacattagcaatcttacctcgccattggagctgatgatcggttacgaatcgcggacgagcaggatcggcttgtggaatatg

SEQ ID NO: 13359 - DNA, 930 bp, Arabidopsis thaliana
ttatatacgtcaacttttgtggttaaagataagctgtttcagttttattgaacttgaattctctaattcagtgttaattaatgattttacgttttacataatcgttgcacttattaccaaatttatatttcacatttaaatatggctagtttcgtttagcatgccccaatttgttatcactcgtaagaaatggaaagtggaaatcagaatatgttatgtcatttcagctttgtgattcggttcaaaagttatatatagaaatttagttgatttaatcaatttcatgaaaaagcataatttcaacagttttatctgataaaatttgcaagaatcacttgttggttggtcgacctccacatgtaacatcaagacaatggaatcggtgaagggacaaataacgtgtcttcctgatataatgacacagtttcttacaattacaaacctcaaattttcttacaaagattgtcactacttaaaatgtgcatcatataagattttcctaaagcacttccaataatttataatctggtttgacgaagcgtgcataatattagatggatattgtagcaatagtattgtctctgctctttatcttctctctcttcttctttttctacaccaccggaaaatcatgtcccggtggagccaagaacccaccgggtccttcaacgctgtctctgcttcgtaacatccttcaaactgttgaaaaaccgcatcgcacatgtgcgaatcgcgtaagcatctacggaagcgttatgagttttaagcttggctgtttgaccacagtggtcatatcttcaccggaaacagcaaaagaagtgctgaaaacacatgatcatgtcttgtcttatcgagtctccagtgacccggttcgagccgctggtcatcacgagctttccttgctctggatatcatctgcggcgaggggat

SEQ ID NO: 13360 - DNA, 535 bp, Arabidopsis thaliana columbia
gctaagtctttcgaagtctaaaacgagatcgttccgagccgtgattaagttggcctcgagtcatgatcgagatgcttggtctgcggtatttgaaggcaggctcccgaggtgttttggagcccgcctcgggatgattttccaagtcttattcccgaggcgttccgaggtcgggtcgggggatcactttatgagactgcccgaagcgttctcgatatcgcctcggtatggattcttgacgagaactccgaggtgttttggtccggttcgggttaattcatcgatggttcccgaggcggtgtggtcggctcgctatcctgggtcaaatccgaccccaacagtttgcctcgacaatctcccataaactacttcaaaagctaaaccaatcttcatatccggcaaagaggaagccaataacggcggaacgtgatggacaccggctcaaacaatccatcaactaccgagatccggccaaagatccccaaaactagccatctaggctccagcaaggagcaccgttaactctcacaaagtggtg

SEQ ID NO: 13361 - DNA, 578 bp, Arabidopsis thaliana
gttatagtcagttaaatttatttgttatgaagttttgataagtgattttatttttcagttcgatcgaaggtcgcttggtgagaagttacaagaggagtttcaacggcttcgcagccaggctcactgagtcagaacgtacattaattgccggtgagtgttattcgattttgacacaattatgttgaaataattttataggttttaaacactcaaagccttttgtggtttctttagaaatagagggagttgtgtctgtgttcccaaacaagatattacaactccatacgacgacgtcttgggacttcatgggggtgaaggaaggaaagaatacaaagagaaacttggccatagaaagtgatactatcatcggcgtcatcgacactgggatttggccggaatccaagagcttctccgacaaaggctttggtcctcctcctaagaaatggaaaggtgtttgttctggtggcaaaaacttcacctgcaacaagtaatttactcttaattatataattgctctctaaagattagtatcgtcggtcaaaggctttgactcaaagctagagatatacttagaaaat

SEQ ID NO: 13362 - DNA, 555 bp, Arabidopsis thaliana columbia
acctttagcggtttgctttgcaatgactatcaacaaaagcaaaggtcaatctttgaaaagagtaggaatttttttacctaggtcttgcttttcacacgaccaactttatgttgccatatccagagttacatcaaagacaggattaaagattctgattgtggatgatgaaggtaagccacaaaagcaaaaaaaaaatgtagttttcaaaaaagtttttaagaatctttagtttccatttgttttttacttttgttggattcttatcatgtcagtcttatatctacaatattcgttgaacatttgctacttcaatataagaatttacactatcaaatacagatgttaaccggtgttacttaaattatctatatatcaaccatatcacacaaatacagactttctacttgcttaaagattaagaaccatgtaccttttcaggattgttgttgattgagaggtttcttaagaatagtatcgattctatgactgcaaccatgaaacatccattgtcatggccctaaacttcagaacaaccttactgcagtgaaagaacaa

SEQ ID NO: 13363 - DNA, 520 bp, Arabidopsis thaliana
taaataaacattaaaattaatactaaaaaattgataatgatactcatagagtatcaactatgtgcatgctcttagggtcgaattccacaaagctctcggatcacacaatagactaaggtatcaaattttttttttgtgcaaccgtttttaataatagtaaacaaggctcaaactcccgtgaaggaggagacgttacaggataatagagcagctttagctagtgagtctgcttgagcgttctctgaacgcggaacaaagtgaaaggaaactgaaaaaaaactactaacaagctccgcgacatcggctaagataccgtctaactcatttgcatgaccaccagaattgatgagaaggacaagttctttacaatgcgagaaacaggccagccttggaacacccgatgctaaagctgcagaaattccagcgtttaaagcaagtgcttccgccactagagctgaagacacaaagggtcttgaagaattgcctttaagaagcacaacattatggaggtccttaatga

SEQ ID NO: 13364 - DNA, 502 bp, Arabidopsis thaliana
tagtaacgtccgccagtgtgctttaaagcggttttatcttcatcgttgataatccggcacatttccagcgtcgatacgcggtcaatttcagccgagggctgttcgagccttcagtaatcatcttttcaaattgcatcggtggtgaccttactatttacgatcaaataattgcagatgtatggaatcatatatcccgaattgacaggcttaaaggaatcattgagtctacactcgcagatgtgtaagagcgtcataagaacttaagcggaatttatgctgccagcccaggagagtggaagatgttgtacctgacgaaaataagcaatgcgtggagtgaattcaccgaaaacgagcaaaaaatcgctgactttctgcaggccaacgtgagtgacgctgcaatccgtttcttcacggcagatggcgaaacagctcggcattagccagtcgagcatagtgaaatttgcccaaaaactcggcgcgcaaggatttactgaattgcgta

SEQ ID NO: 13365 - DNA, 591 bp, Arabidopsis thaliana columbia
gattatgtttatttcagaaatggatcacattacaaatggaatggtatccaaggcaaaccttagagatatttgcataccgaatagtggaacaacacacactattctaaaacaaaaaaaaaaattctctcatttgaaatcaacaaaagttattgttaacacaatatcaggtcccatagacttaattgaatggaccggtaaaacaaattttgcattacttaacgggacaaagttctcgataaataatgcattatttttaccaaattcaaaaagaaatttgttgagtttcaaagatatataccttcatggatatgacactcagtgtgcaagtgagaatgaaaaaaagtacatgtatatcacttctgaaaaattgggaaaaagacacgttttggaaaaattaccaagactcccatcaggattgcatcatacatacattaattcaataggatcacatcttgttatcaaaagagatcatgatgatttccattgtggcacgatcgccttggtccccaggcacacgatgatcaaaaaattataaaagctccatggacatcaatgaaccctaagagtttatcaagaaataaaaggcatgtg

SEQ ID NO: 13366 - DNA, 124 bp, Arabidopsis thaliana
agtgattctcctgcctcagcctcttgagtagctgggactacaggtgcgtgccaccacacccggataatttttttgtatttttagtagagatggggattcaccgtgttagccaggatggtctcaa

SEQ ID NO: 13367 - DNA, 524 bp, Arabidopsis thaliana columbia
aaaaccatgtgagccaaaaagtaattttatatttcgtaaaaatggtatatttttcttaggatttattgtgtgtatattgagataaaaacaattttgtttaggtaggttttacccctttccgaccgatgaaatcagaaatcttccccgatgtaatggcgccgagcactgctcccatattcaatatcgatccgaaaaccgaaaactagattccaatagagaaaaaaaaataaaaaagattaagcaaaatattgttaaacatgcatctataaacgtagaagacttaatcaatttaatataaacctgggaatatgataaattaagctcttccataatcccaaactgtgttggagcggagtatcccacctattaaaaaacaaacacagattttctcgtatcaaaaagattaatcgtcacaaattcttaggttctcatcatcttttatttccaaagtaataggtgtcgtaaaagaatcttacgcatgttccaaactcgtaggaaccgcaaacggcaatgatcgtgcttag

SEQ ID NO: 13368 - DNA, 608 bp, Arabidopsis thaliana columbia
catttatcttgataagatatgatggtgtttagatatatgttacctagaagatgatcctctaaagagccattttgcatgtattcatagacaagaatccgttgatcaccgtctgcgcaatatccgaccaaattgacaaggttttgatgatgtaagagactcaacatcatggacttccacaagaaactctctgttcccttggtaaccattcctgtctagctgcttaaccgctacaacctaaacacgcaagaatcagaatcaaaccactgagcagaatatgatggatcgatgttgtatgagagagaatgttataagtacttgttcccgggtttctacctgccctttgtaacccttccaaacccgccttcaccgagctgattatcggggttgaagttcttggtagcgacgcaaagctctctgaatgtaaaaatatgagcactgatgtccctttaccgagttttgctatctcctcggatatgtatcttcgcctactgctatctgcaggtatgtgcaaatacgcctcgcttcttttagaaagaaaagcttttaagggatttgagaatgcatataatgaacaaggttagaaaatgggacctgctttaaagagatgt

SEQ ID NO: 13369 - DNA, 554 bp, Arabidopsis thaliana
ccatcatagtacggtcgagcagactgaatgggccgtcggtcgagtgatgcggtcgagtatatattcgtcctttgcccttccaaccaaattttcatactcttctggattctcagctactttatgctcatctaaaagcttctggtacctcaaagtctccaagtgtaaatctccttccctgctatcctttgtcagggcactctgtagatgatctgtttctcctagctcttctagcattttgtcagctaacagatccaactcttcaatccagaaaatatttccttctattgtaggcttcttcatggtgttggtgatatcgaagatcatcttgagatctttcccgaggttaagatcgatctttcccttcttgacatcaatgataactccaactgtacctaaaaatggccttcccaatatcaaaggatctttgggctcttcatccatttctacaaccaaacagtttgtacgtacttcgaccacgcctatcatgattgataagtcttctagcagaccatgggaaattctgacagacatgtaagctaggatcaaggatatat

SEQ ID NO: 13370 - DNA, 549 bp, Arabidopsis thaliana columbia
caaaacacattttgtcttatacacaatcatgctaaatttaagcagcctagggtttttgagtgttgttagagaaactaccagaaagaacaggctgaatgttgttgatgacgatggtgagagccagcaacggagtcagctgcttcacgagtactctcacttcttcatcatctgagaacattgctggatacttgtctcgcaacacaatgagagtcactgatatcacaattccgatcgatacagaagttatcatagccactatcaataagaactttgctcttcttgggtgttcagctcctagctcattcgactctcttacactgcacatataacacatcattttttccaatcattaagcttttttttttcttttctgttaagagactttgtgatatacctcacagccgcattgaagccaaaggcaccatgatcggccatcccaatatgttcatgctataaccaaaccgttaattccgttcctaaccaaaacagaagctttcacagggacttagaactcaccatatcgaaagagcagctacagagacttgaggg

SEQ ID NO: 13371 - DNA, 389 bp, Arabidopsis thaliana columbia
aggaagctcctcttccaaagataaaatcataggttccttcgatgtaacaattcttaaagaaatggttgcctctatcgtcgcaaagagtgtcttgaaaaccatagaatctgcagttgtagaaagcagccttatcgccgttgattctcatagctagagcttgtccttgtgtaccaggctttggcattggagaagtgttctataggagatagaagatttaattaggtccaactaatccgcaacatagtatgtatactagtaactgagatctaaaattgtatacatgcgataatgtataggttggctgcagaaaatttgatggccagacgattagcgtggcactctgcacggtgccgtatttagcggctgttccggcataagtcaagttggtt

SEQ ID NO: 13372 - DNA, 529 bp, Arabidopsis thaliana columbia
tcgttgatatccgcggtacgaagcaacatatacgaatggctgtctgatgttcttatcagccaaaacgggacattccggtttagaggtccttggtttagcaccctcaactgcgttgttacctgcgacccaagaaacgttgagcatcttctcaagacccgtttctctatctacccaaagggttcttacttccgtgagaccatgcaagatctactcggagacgggattttcaacaccgatgacggaacgtggcaacgacaaaggaaagcagcaagtgtcgaattccattcggctaaattcagacaattaaccagtcaatcattgcacgaactcgtgcataatcgacttttgccggttctagaaacttccggaaagattgatcttcaggacattttgttaagactaacgttcgacaatgtatgcatgattgctttcggggtcgatccaggctgtcttagtccaaaactacccgaaattccttttgcaaaagccttcgaggacgcaacagaagcaacagttgtgagatttgtga

SEQ ID NO: 13373 - DNA, 1447 bp, Arabidopsis thaliana columbia
tttgaacaacaagaagctgcgcgacaatggtactcctaagccagacgcgtctatagccagcaaaggccacctaaggtcaaacaactttctgatatctccttatttgttgtttataagttttttattttgtttgaatgtgtcaattaagtgtactccttggccagatccttaagttgataatgttttgcagtgtttccgatctactcgactatatcaacccaagtcataacgcaaaaggcaaagagagcgtggcagcaaagaggaagaactatattctgaaggtatgatttttatttctttgatatttctccactttaatggttagaagtgcttaaatggttggacctatgttgtgtagctaaaggaaaaatccaagcaaagcaatgtttctgaacacttggtggaaattccgagagaaaagcaaaaggagatgtctgaagaggatacggaagaaactggatcagaagaaggtaaatcaagcgaagagaatcacgagacaattcttgcaccagttgaagaaccaccttctcctccagtaattgaggacgctactatggataacagtaatccaattacatctagcgacgtttcaaccgagccacaacaccctgatggtagtgaagatggatggcaaccggtgcaaagaccgagatctgctggatcatatggtcgcaggatgaagcaacggcgagcatccatcgggaaggtatatacatatcagaagaagaatgttgaagctgatatcgataaccctcttttccagaatgctactcagcagaacgacaaatactacattctcaagaagcgaacagcatcatattcaagctatgcagatcatcattctcctggtttaacaactcacggcaccaaatttggcaggcagatagttaaaaccttcgcgtatcgggttaaatcgacgcagccgtcttctggtaacgctaagactgctggtgaaacttcagaagaagatgggttgaagacagatgcttcttctgttgagccacctactctgtctagtactgtgcaaagtgaagcctaccacacgaaaaactctgttgtaagtcttggaaaatctccatcctacaaggaagtagcattggcaccacctggttcaattgctaagtatcaagtctgggttccacaagcggaagtttcagataagcaagaggatgatgagatggagaaaaaaactgaacagggtacatcaatggagcttacaagggatgagcaaatgataacagggttagaggaagaggtaaaaaaggaaatttctgcagacccagaatctaacataacccaaggcgaagaagagatcaaagtagagttacacccatctgaaggagtactcggaggaagtcatataaatgaaaacgacgaatctgggggtggaattcaggttgaagaacaagtcgaagttgaattgataaacgatggtgtacagatatga

SEQ ID NO: 13374 - DNA, 471 bp, Arabidopsis thaliana
aatcatatattacgattcttcactaatcactaaaaaattatatttctaagtttaaaatatcaaatttattcaaatatttagtataagaactaaataaaccgattgcccgcggtaaaccgagttaaaacctagttgtcatgaaagcctatgacttaattctattaacaaatgcatggcaaaataaatcaagaacacaatacaaaaaaaagtaaggaaatgggaactaaactaaccttgagtctctcaaccagaagctccaacttgtaattatactttggtacatcatccgcgaaagaatcatataaagcctcctcaagagcaagtaccatctgaacaacatcctttcgactggtccccgtactttcacaacacatgttcttaagtactacttctaaaagctccaacaatgtcttgtcacgatccaaagcactggatggtaacgactctaacttctccgagatcgggttagac

SEQ ID NO: 13375 - DNA, 562 bp, Arabidopsis thaliana columbia
cgatcagactagaggatccccatctgcatcgtagctgccaagtagcaactggcaaaagaaaagaaatgggcataagacatcaacaaggaaacgaaatccctgacaatttttccattagagtacctgttcccaagattgacaagtccggtatatccaggtccaaaaactggcaccaattcttttccactctcttgtatacggttccaatcaaaatttgtattttgatcaagttctctttcagcagttgtcatttcagtctgtgaaaattgtagcaaacatttcaagaaagttaacattattcagattaaaaccagcatgggatatctttagcaaagatgatgatcaaggcagtacaaacaagaaaacaaatacaggtgactataaaacctatgctttgggaaatgaagcctcttaacttaagcagtacatggagcaaggaaaaatgaggaaaaaagacacaatacagtttactattgtaaatgtttacatgtgacgcaacaattacaagtaaacagactgaacgcgtgaatgggaattattgtctcaaacgacctgaaataca

SEQ ID NO: 13376 - DNA, 825 bp, Arabidopsis thaliana
tgccgtgttacatacacatttcacttttataagacagcccatatcttctgattagtttctgactagagggacatgggtttttaagttttacactgatccctagctatccaaagttctgttctgtataacaccgaccaaaccaaagctaaataagagactcattaaggaaaaagctttttggaagaacaaaatcaggaaccaaaacaaaagactttgttaaaaccaaccaacatggaatctttaaaacatgttatttcttgataatatcattaaatcttgaaagacatctttgtgtcatatataatatatggtataaattatcatatatatgcatttttaaatagtgattaatctcatgataatcatcacctatccaaatcaaaagacaaagaaggttttcctttctttgtaaagaagtgatgatcctcaagacttgcagcttccattgctactaaagactcatcatcactgctcactaacctcaactggaggagagaaccagcaccaaccatagaaactctgccacgtggtatactaccaccggaagacgacgactcttcctccgtactattcacactccctcctcctcctccgcactccatatctacaccaaacagccttaaccgcttctctcctctcgaagccattgaagccacttgtgctctcctttgcatcatcaccggcacagattcaatcacagccgttggatgactcctctccattgacctcacatagtatccaattcctagatctcgttgatgaaatcgatgactaaggctgtgagtctcgtaatttgtcggcatctgaggatgaggacaagtgtaa

SEQ ID NO: 13377 - DNA, 705 bp, Arabidopsis thaliana
ctccctttaaaacccatatcaattaacataagctcattaatccattcaccgaatgctaaagagtccagagacaaacgtccattcccccctgtccgctcatcaagtcttacaatcatgttgaaatcaccacgaatcactaaaggaccatctactccttcaatcgcagttttcaaacatccccatagcccgcttcttcgactaactgatggagctgcgtaaaccacaatcaaatgcaaggtctctgtctcactcacaatcttggcgtgaataaactgttcagacgaggccacaactgtaaccactcccacactagctctccacagcaaccatactccaccactatgccccactgcatcgacccggaacgtgtgctcgaaacccaacttctgacaaattctgctggctctatctcctgcagcgtgtgtttcaaacagagccagaatgtcgatgttattcttcttcaacatgtaccgtattgttcttcggaaaagaggtttatttgccccccggcaattccaaaataaaacatccatcataaagagattgaaaaaagcttgaactaccggggcaagctgtcatgccgcaagagaggtcgccacaaccgccgacaacccattctgcatttccacttctctattctgtggcgcctctgccaaatccacaagagaactcttcgccacagcctctcccgccacagacattgac

SEQ ID NO: 13378 - DNA, 544 bp, Arabidopsis thaliana
taagcgcttgagcagtcttggccgctgaatcaggaaaccagacttgccctgcttgcggaaccactctttcatgagagtcaagctgtccaggatcggctgggatgatctgcatgacagtctgtgtctcaactgcaacaactccaacgggtattcccccgagcttggctctaccagtcactaccgtccttgcccagccttcaagagtctcaatgaaactatttttatcaaagatacctccaagccatttaccggtattgtctttgaccccagctatagccgctcgtgggtcgcaagagttctctgggacatactccacaattctctccggtggatctaaaggggcaagaacaggaagaggaccacccacgtaagcaggaatgtagctgagccagttgagaattgctgatacgccttcaagatcatctgagactgtaagatgaacaacaccagtttgtgcccatgattttcgggccacccagttgcatgtgagagctatagacctcacgccaagtaacttgttgagtgtagagaaccagtcaagatg

SEQ ID NO: 13379 - DNA, 985 bp, Arabidopsis thaliana
ctaaagaagatgttgcccaggatggttcctcatcgctgccgtataccccggagcacgccttcaccttatggagccaatatcaggcaaccgacgatatctctgttggcgcgggccacgctatatcggcagtatgcataaaggttcagacggcgcggtgggaacgccagcgtttaccgaagttactgggtcgccgatgccaaactggggtatcgagttaatcgcaatctcgacttccagctaaacgtttacaacctgtttgataccgattacgtcgcctcaatcaacaagagcggctaccgttatcacccgggcgagccaagaaccttcttgctcacagccaatatgcatttctgattcagatgtggggcgcaggccactattttggagaaattgtatgatgtaccacattcccggcgtgttatcgccacaggacgtcgctcgttttcgcgaacaactggaacaagccgaatgggtggatggacgcgtcaccagccagcgcacaaggtgcgcaagttaagaacaatcaacaggtcgacacccgcagcacgttatacgccgccctgcaaaatgaggtgctgaacgcggttaaccaacatgctttattctattagcgcccttgccgcgtaccctttccacgccgctgtttaatcgctatcagaacaatgaaacctatggtttccatgtggatggcgcagtacgcagccatccacaaaacggctggatgcgtactgacctttctgccacgctgtttttaagcgatccacaaagctacgacggcggcgaactggtcgttaatgacaccttcggacaacatcgggtaaaactcccggcaggcgatctcgtgttgtatccctccagcagcctgcattgcgtgacacccgtaacccgcggcgtacgagtggcatcatttatgtggatccagtcgatgatccgcgatgataaaaagcgcgccatgctgtttgaactggacaacaatattctttag

SEQ ID NO: 13380 - DNA, 697 bp, Arabidopsis thaliana
taaaagttgcttctctcgggttttaatctgtttctggagaagctcgatgtttgcatatgccttgtttcgcttggcatcttggatatttgctttcagattgattagcgtctggtccaaccttcccatgcactctaacagctctttccttctaaattttatctctatcatcccttcaggctcaagcacatttccacgagcggtttcatcagcgtacatttcaatataatccgaatttatctggctatcaacaaccacccatgctccacctcgcagttctcccatcattgggatgtacacaaacactggctgccgatatgttctcagattttctactatagctgaacccgcctgaagtattccttcaaaaagatctctttgcccacctgaaaaacctctccagtttgctatgataaacaaaggaagctgttcccggttgaaatccatgagcgcttgagctgtcttggctgctgaatcaggaaaccagacttgccctgcttgcggaaccactctttcatgagagtcaagctgtccaggatctgctgggatgacatgcattacagtctgtgtctcgacagcaacaactccaatgggtattcccccaagcttagctctaccagtcactaccgtccttgcccagccttcaagagtctcaacaaagctatttttatcaaagataccaccaagccatttaccagta

SEQ ID NO: 13381 - DNA, 225 bp, Arabidopsis thaliana columbia
actcatcagaattcgtgatcagagaaatgaatttatgggcagcttatgagatattggagctattctgcgagtttatacttgctcgtgttccaattcttgaaagtgaaaagtgagtctttttggtcttacatgtgatcaaaggatagatagtagtgggaggatccataatgtgtttctgtggatttgtcaaattgaatagggaatgcccgagagagttgagagagg

SEQ ID NO: 13382 - DNA, 718 bp, Arabidopsis thaliana
cactgtagaagatttgaaaagcaaagtcgaaacagtggagaaggaaaagacgaaagtaggagaaaacgagtataaaacgatcaaaggacagcttgaagaaggagaggaagcaatagagaaactgtttactgtcaatcgaaagctgaccacaaaagccgaatcagagaaggatattgatagaagaaggagaatattcgaacatgcgaggagaggaacagagaagattgggaggttacagtcggagatacagaggattcagtttctgttgatgaagcttgaaggagagagagagcatcgacttaggtcgaagatttcagataccaaagttcttcttcgagactatatctatgggagaactagaagcgtatcgatgaagaaaaggacgaagaagcggtctgtgttttgtggttgcgttcagcagccagagtctccttgaagttattaaaactgttgttacttcactcgcaagtaaccaatgttaattgtttaactgcgtttgcgattatgtttttgaacgcagacgcggtagtaatagtgcgtttaataacaacagacttgtttttcaacttcttatttcttaatgacaataaaactttttagaaatgtgaaattttcaatatgaaatcttaaacgttgttaaattccggtaccggcgagtcgggtttagccgtgtggagcatgaaatcgcaagctgcgacggcttctgcgaccgtgagat

SEQ ID NO: 13383 - DNA, 531 bp, Arabidopsis thaliana columbia
cgaatagcatctgattcacgaaatgaaccagtaaaagtcacaaagctgtcaatggtgtgtagtgcgtccgggtaaaaaccaagacaaacctgtagcaaggctcggacaaaagaagcttgagggggatagtgtccaatggaggataatagatggagaccgtcttctgcacgaccaatttttacggtcagtctaatgctttcaaggtaaacagcagttggattgttagcttgtaaacatttcaggaaacaagaccggtacagagaaccatcgtttataagctcgacatttgtaatgaagggctgcagactaacatatcttaggacaatagggtgggatgcaagagagtgatagaacttggaagccataagcataccaccgagatattaaaaggaattctcaccaacacgttagactatatcaagagcaatgttgatgtcaagagtttccattagtaaagaataacaatttgttgaagcccttgaaacttaaataggcaaaacaatgaaaagggggggggggttgattggttgt

SEQ ID NO: 13384 - DNA, 559 bp, Arabidopsis thaliana
gcaacctgcgcgccttcttcgataaatcgctcgaccagcgccagccctaatcccgatccgccgccggtaataaaaatggactcgttatgcagatcgctcatggctgcgcctccggtaagtcgatgaaaatgtcaccaccttcaacgtgtactggataagtggtgagcggatcggtggcgggcaggcataacgctttccccgttttcaggcaaaaactggcggcgtgtagcgggcactccaccgtggcgtcatcttccagatacccttctgacattgacgcattaccatggctgcaacgatcgttaatggcataaaactcgccgccaacgttgaacagggcgatgacgggcgaggtatcgatccggagagcctcaccctccggcacatccgcaacgggacacgcataaattcgattcatcagaacagtacactcaggttatgggaagtgattaccgcttgatccaggacgatatcccgttccagcaagcgccagttgtcatcttccagacggcgaactttgtcgaaacgcgttccaacatagaatgtttcatcgctttag

SEQ ID NO: 13385 - DNA, 466 bp, Arabidopsis thaliana columbia
tttgaatggaagccccggtaaacgtcgtcagtactcctgtatctttctcagtgaccggaataagtttagtggaacacttccttcttggttgttcaagtttgacataatccacatgattgactacaccagcaacagattctcttggttcagtacagacagataattgtaaacagcatactgcttcaacagatttgtcagaccggatgtacgtgaaagctttgctgacgacgagagatcagtcgatgactaagatatcacgcagttgtatgacgcttctagggattacgattccttaaacatttttagcataaccttggcgtcattagtggggctcgcaagacgttcgacccagtttttagacataatctaccagcattaggatgtattggactcatgagaagatggttcttttcatgaaatagatgcccacacatcgaatacttctacttcctagatgaagtgttgt

SEQ ID NO: 13386 - DNA, 560 bp, Arabidopsis thaliana
caaagatggcttttctaaggagaaggtcttagggaatcaatgcaaatttagagagaagacaagagtagcacctccttgtagagagaagatctagggttgagttcttgacggacaagggaccccatggaaatgtgaggaacttcaagcagtttggagagcctctcggcgaagacgtgcctccatgctccaggggctcccataagcacccactgcactcctctatccggccccgatccatccaacccaagcctcggttccgcgaggcggcgatcatctccgtacaagtactcgtcatcggagtcgtagtcaaactccaacgcggccgctgatccaaaagatcgacgaatcgctgcgagccttgtcaccggcgaaactcctctcacgcggctaagccaggccatggtgaaggcgtggcggcggattcagagagaaagagagaaagagaatagccacagaaagagagagagcttaaagagaggggtttgaacggagacggagggccgaggtttatgggacagctgacactctctcttttctttctttcttttttaattgattgc

SEQ ID NO: 13387 - DNA, 1175 bp, Arabidopsis thaliana
  unsure (1)..(1175): unsure at all n locations
catcatactctgacgtttctcaggcaacttttccaatattatttcaacatcctcagcaaatccaacttgacgcatctgatcagcttcatccagaaccacaaactgaacttccgatagattcaaagctcctctcttcatcagatcaatgacacgacctggagttccaaccgccacatcaacaccatagtcaagctgcctcatttgctgtccaatcggtgtacctccataaagacaaatagtatccaagctcggagcagactccctaaactccttctcaacctggcgagcaagctctcttgtcggtgccaaaaccaaacaaagcggattcctccctcgtctatcacatcaaaaaccacataaaaccccaaaaatcagtaaaccaaccagaaaacataattctctgaacctcaaatgactcagtaaacacaaacccatgtttagcgttgtatttgatgattttgtcaatgataggaatcccaaaagcaagtgtctttcccgttccagtcctagcacgaccaatcatatctcgaccctccatcgctggctccagcacagctttctactcaaaaccacaaaacttaaaacccacttacccttcttccaaaaacatgggaacacgaaaagctgaacaatttaaaattttgatctcacaacattacatacctgaataggaaagagtttctcaatacccctacccttcaaagctttaacaatctccggagatataccaagatcagctatcgcaagcccatcaccaccaccgctgctaccaacactctccgaatctccaatccctccatcgttctcataagaaggagcatactcttgagccgcgaatcccgcagaagaaacaatcgacgatctaaactccgacggtacagatttaacatgaaagtctctcactttaacaccaaaagggctcgaattcgaagggagagacttgacattagtagctccatttgctagatcggagactgtggcggcggctggagcaaggttatgaaatagagctgcgttaatggaggtcacgaagcggcgagagtcgccttgacgtccaaggatagatggcgaagtctgtgctaacatttcagattcagagagtgtatggatctggtgagatgaatgtgaacccagaaatgagattaggngttagggagcngcaaaagggttagaga

SEQ ID NO: 13388 - DNA, 586 bp, Arabidopsis thaliana columbia
ggtatacgattgatatatccctatttttactgtttttaactatgttttaggtataggttttagagtctatttgttatttctagagtattttctagtatttttcaggtctttacatgtttgggattcatttggggataatggagcattttggaggagaacagagaatttatggtgctgaagaaatccggagacgaaaatgcacgtaggtgtcgaaccacaccacccctggtgtctagcgacaccaatacctgacgtagatgcaacttattgatgttttgaagattttcaaattcggcccagaactttctcctatgtttaatgaaggcccaacacctcttttagacatataattaagtttttagggtcattgtttagacctaagcttggagaggctattctcctcatctcttttgtactttgggagcaaaaccctatggagtctccctgtggagaagatcttctttactctttctgttgccattattgatttcttatttagactatgatttgtgtttctttgattatgtctgagtaaccacttgttaggtttagggtttccattagggatcatatggtttatagatag

SEQ ID NO: 13389 - DNA, 748 bp, Arabidopsis thaliana
tttttatttatgaagacaacaaataaccaaatttatcaaatctgatcaaagcagatttaggattttacaaatatatttacaaaatatgaatctagtggtcagattttgaccaattctctttgaaaaaaaaaaaaatctatctataaaaacatgtgttactttgaaaggatatttcaaggagaagaatatatttgactcagagagagattcattcagtaatggcagcctcaggcacctctgctactttcagagcctccgtttcttcagctccttcctcttcttcccaattgacccatttgaaatcacccttcaaagctgtcaaatatacgcctctgccatcgtctcgctccaagtcatcatccttctccgtctcctgcaccatcgccaaggacccgcctgttctcatggccgccggatctgacccggccctgtggcaacgacccgattcgttcggtcggtttgggaagtttggtgggaagtatgtacctgaaacccttatgcacgctctatctgagcttgaatccgctttctatgctcttgccaccgacgatgatttccaggtagagaccttgttcttcgtgattagataaaaatgagacattttgcgttgtgggtcgttggaattgtagcgttatcatttgcgggttgtgataaagttcggatcttgttgatgggatatgttgattctagggcatttgaatgaaattggttctgtgcatttatgaaatggttagaatatggttttggt

SEQ ID NO: 13390 - DNA, 633 bp, Arabidopsis thaliana
agaaaggttgccaacggaaaaaaaaagataggttgggttaaattgttccaagaaaaggaaattactcataccaatatagaacaaggaaattgtttatatcgataataaaaagtgaccgttacaacaatcatatcatatatttattttttactgcccttgatgtgaattgaggtgacttgcgtttgttgtagttaattagagattcaaacaattgattactgcagatgatttaaaaaaaggccaagattaaaacgcaaactttaaagttgcttcgattccggttaagactatatgcagtttcagtttccttgatttaggatttttctttgtttgtggtatatcataagacaaaacaacagatattattttgattcttccatatatcatctctgagtgactctgttattttaaggatatgttttccattctaagtacttctctacgctttcaaggccacaaagctgcttcaccaccggcagcagcttcaatcttcttgaagtaaacaaacagaaacgccaattaaccaacctgtgatagaacattaagtgcacatccagaatccggaccagagccaagctaattacctgtcctaaatcaatagcaggattaaggcttttccacagtcatagatag

SEQ ID NO: 13391 - DNA, 789 bp, Arabidopsis thaliana
gatcccccttctcttgtgcgtgaatacatagaaatagctctcctttgccaccaagcttcacaaggaaggttgtgtgttgatttttttacatccttttcaccctcaccatcagaatggagatctaagtttccctctgcatcaactaatccgtgttcatacacggctgattcgcttccgaatgattccatgtgtctagaagaaccaagcgcagattcaccatagatactctgttggttgtttccagcttcataatgaaactgatcagacaatccctgaccttccagcatcaagtctcggccatcctttctttgctccgccacgaataaagattcatcaatgggtaaattctcatgctcactaggtgggaatacaaagtgttcagacatgtacagatcacgtgaagtttccgctccatagtaagcatcatacttgcgcacatctcttgattcaacgttatacggaccaggagcagcagcataagctgatgaagtgagcgagacgacttcccattcattccctcgaggaggatgctcctcattgttagccatcctcaaccgaaaaaaatctccaatgacccaataaaactgaaaagaaaccttcttgggttagtagccacaaaacaaacagagaacatctaacatctccaattgcaaaatcactctaatcaacaaaaggtaaacaaagaatcaggcaatacacgagccattctggtttctaatagatagcaaagtatcttcttcatcaaggatgacaatttggaaccaatggaaatttcagaaccagacaaaa

SEQ ID NO: 13392 - DNA, 515 bp, Arabidopsis thaliana
tcccaaattacattttaaagtcaaagtacttaacgaaaaaaacaacataatgtttacacaaacatgattttatcagtaggtcaagccacaatactacctactgcatctgcaattgtttgaatttcagagtgtggtctccacacagcagcatctccaatctttgaaacttctacacataccttgctcgcatttggacctaggggcatatgatggactgtgtctgaagggttagaggtacatactcttccttctcctactctttctctcccgttcttgtaatctaacatgatgcacttcttcttcgcagatttgctggtgctagcagtagtgttactcaagctctacatgaatcaaaataataccaagtaagcaatattcaagcgatgttctttcatatgcatgtaagttaaagtgcataaagttaccaatggaggtgatggtcttctatttgctgatgttgtttcaccagtatagtagatatatcacatgttgtcactatgaagtggcacgcaatg

SEQ ID NO: 13393 - DNA, 258 bp, Arabidopsis thaliana
  unsure (1)..(258): unsure at all n locations
nnnnnnnnnnnnnnnnnnnnctaaaggaatatgtaaggagaaagtgagcagcaatatctagtccttgatttgagagggattccttcaactttctctccattaagattgatgctggatacaggtcatggtttgctgtaaatagcatatgtcatgtgtaggtaccggccttgaattcccgatcttgccgacactagtatcattgaaggatgttgggcttcgccaaatgcaatctcagcatctaacgagatgatcatgtgg

SEQ ID NO: 13394 - DNA, 520 bp, Arabidopsis thaliana
ggggatgtgagctctaacctccaaagaatgctctttgggagcatagtgggagacgaaagcggattgggagagggaagggatgggaggagcaatgagataggcctcggtgggatgcaagttactgctgctggggttgacgcggaggggccacgtggaggatccggtggtcttccaggcggagagagcgagagaatggtagaaaaggtgagagattgtaggaagagagatgggtttgggcggaggaagcgagtcgaatagagtagagtagagaggagagtcggagtcgtcgtcgatgtcgtgattggggtgttggagaggaagaagaggagcagagaggtaccggcggaagggattaggctgattggcccagtcgagaccacgaggacctctcgcgtaaccgttcaaggagtgcttcgtctggttgtggtacttgaggaccaattcaagcgaagaggaggaatcgtccttgttagggtttccacagaagaagaagaagaagaagaagaagaagaagaagaga

SEQ ID NO: 13395 - DNA, 515 bp, Arabidopsis thaliana
ctagtaacgttcgccagtgtgctttaaaggtgggataaaaccatgaatgttgacggcctgaaaacgggtcatacttctggtgccgggtttaatctcattgcttcggctgtagatgggcagcgtcgtctcattgcagtggtaatgggggctgacagtgcaaaaggtcgtgaggaagaggcaagaaaattactgcgttgggggcaacaaaactttactacggtgcaaattttgcaccgtgggaaaaaggtcggaacggaacgcatctggtatggcgataaagaaaatatcgacctgggaacggaacaagagttctggatggtgctaccgaaagccgaaattccacatatcaaagccaaatatacccttgatggtaaagaactcaccgcgccaattagcgcccatcagcgggtaggggaaattgaactttacgaccgtgataaacaggtggcgcactggccgctggttaccgtggaatctgtcggggaaggcagcatgttttctcgcctgagtgatta

SEQ ID NO: 13396 - DNA, 466 bp, Arabidopsis thaliana columbia
tgattgaaatagatttttcaaagtaaaacatcggagaaaacaaaacacgtagaaaagtggtggagacaatacgagagaggcgccttaacaaatatgcatgatcaaacttgatttgagaataaagttcaaggacgtcgtcacttggtgattggggcaacagtgaccccaatctgatagagctcgggactagcttttccatggaaccctaccactttgtgaccttccttcccgagtatgaagctaacgccagcatccattccataaggcggggaggttcgtttattggtcttgaacttaagcatgactattactgaagattcactaccaaacactttatcataataaccctctaccgctgtgatgtattcactcggatagtccaactcgaactgtgaaagcggttcatcagaataacgataacacaactttatagttatagtttaagaacatagcaacgaagtatagt

SEQ ID NO: 13397 - DNA, 519 bp, Arabidopsis thaliana
tagtaacgtccgccagtgtgctttaaagctggttaacaagaatatgaaaaatcatagcactattaatctactggggggtagtatcaggtactgggggggagtagaatcagattgccgaattaatactaagaattattatcatgaccgaatttacaactcttcttcagcaaggaaacgcctggttcttcatccccagcgccatcttacttggtgcgcttcatggcctggaaccagggcactcaaaaacgatgatggcggcgtttatcatcgccatcaaaggcaccattaaacaagcggtgatgctcggactggcagcaactatttcgcataccgcagtggtctggttaattgcctttggcgggatggtgatcagcaagcgctttactgctcaatcagcagaaccgtggctccagctgatttccgcagtgatcattattagcaccgcgttctggatgttctggcgtacctggcgcggcgaaccgaactggctggagaatatgcacgggcatgattatgagc

SEQ ID NO: 13398 - DNA, 530 bp, Arabidopsis thaliana
tgggtttgtttgttaattgtcactgaacttttgttttgggttttccaatgctgtgttacaggatggtaaggtatcacagcttgagcatgtcttcattcgaggcagtaaagtcaggtgctgtacttgtttccttgtttatgtaattcatgggatcattcttgttaagcctagctgtttagtaattgacctgcggatatatcttgacaggtttatggtcataccagacattctcaaacatgctccaatgttcaagcggttagatgctagaatcaaggtatatatgctttttgaaccctggatgcagaatgatattaggatctctatacatatctccaacaaacatcttaccttacttgcttaatcaatgtagggaaagagctcatcactgggtgttggcagaggtagaggtgcaatgcgagggaaagtaagttcacctctctctcttatgatttagtgctcatgaatgcaatgttaggaagttttatggaacttgttaagatgtcaaatccttgttacccttaatggtttgt

SEQ ID NO: 13399 - DNA, 598 bp, Arabidopsis thaliana columbia
  unsure (1)..(598): unsure at all n locations
ctgtcagctgtatttgtcgaaacggtttccaccagaatcctaaccggaatagtctttgtcctgtcagccgcatatgcagtcgcggtaagtattatcttctgcttgtctcaccaaccaagcatttaataattgccataatgactaattccggggtttgatgatgcgcaaaagccagacatgggctgttctgagaggagtgagcaacctgggtatagattcgtacgtggtggctgtactggcgtgggtgttactgattgtgatattggctttctttgtacatgttcttgacgatgtgattgacacaatctatgtctgttacgcgattgatagagacaaaggggatgtatgtaagcaggaagttcacgaggtttatgttcactggcctatcagcagaagcacaagatcttctctcatcccaaatgctcttaatgcatagcagaagatgatccaacgtctcggcttgttgtatctttttttgtttgttagcaccgttgtaaattcctctctggtgaactgtggtttgtcttcttggggtttatattgatgtnttgtagagttatggggtacaatgttgaataaagacagctttagttatagg

SEQ ID NO: 13400 - DNA, 458 bp, Arabidopsis thaliana columbia
ttttgaaacaaactcttgagcgttcttaaacattgttggtcaccaaaagcttgcttgcagaatctttgacattgtcttgaatgtcgcgaagtgaccaccaaatgcggaccatggcaatgcagcaggataccttctacttcatcttctgagacgcatctcctatagatcttatctttatagagagtgtaaagataaggctcatcccagtagtaatggtgtatgtccctgaaaaacttcttcctttcataactagtcaggttgggaggctctactccgcatgccaagtaattgacgtgatcagcataccatggagatctttactcaactgcgttcagttagtggaactctttcccgctatagctcccaccgaagaattctacgtacataagttgctcttctggcattgagtcgtctatcagaatgggttcttcaattctcatccttgacagatggtcagc

SEQ ID NO: 13401 - DNA, 441 bp, Arabidopsis thaliana
tggtccaagtgaataccagaagatgtgtaaggtagggacgagatgtattgtgcatcatacagtgaagtatttggaggagtttgaagaagatttgtcatggttcaaagcgcattcacagtttaggcatgtattccacatgcctaaggaaaaaaaccacatgactcaaggcatgtgtatgcttttgctgcgcacggcacagacagagatggatagagagtgctggtttgtggtgaatggagtgcctattaggtagtccattaaagagcatgcgctcttaagtggttttgagtgtcatgagtacaaccaatgcaaccacaagggatgttctttggtccaagtgaataccagaagacgtgtaaggtatggacgagatgtactgtgcatcagacagtgtattatatggaggagtttgaagaagatttgccatggttccaggtgcat

SEQ ID NO: 13402 - DNA, 441 bp, Arabidopsis thaliana
agaggatcccctgactcgtggcgctgtaagaggttgatggagctgatggaagagaaagaagaattagttgaagttgttgagttcttagaagatgtaaaaggagtgagaaaaggtggagggggtattagaggaggtgttgttttggagggagatagggggagaggtaagagtttggttggtaatggagtggtgtagaggaggaggtgttggattgtgtagtatgtgaggttatgagtttgtagaaatgtttgttggagttggaggtagtggtgttcgaggtgttgttgaggatgtcaaaaaaggaggaggaggtattatgtttatggatgagattgatgctgttggacgtgaatgtggagtgggtgtggggggaggtaatgatgaatgtgaacaaaggttgaaggaagttttgagtgagatggatggttttgagggaaatga

SEQ ID NO: 13403 - DNA, 367 bp, Arabidopsis thaliana
agcagacaacaaaaacttcttagaagtattccacagcagagattgaagtgaacgagtgaaataagagcaagacccaaagaaaaaacgaaagatatatacatatctccccagtacgcaggtgacgaatcttagtgataatcaatcgattagtagatagatttaagatttaagggaaaacaaaatgttggaagcaggtgaggaaccttaatggtaacatcccgaacttctgaagtggaactattgttgacgctgatatagctacagaacgtttctccgagatagatcgctctgcgcaaccaaataacaaatcagaatcagacaggaatatatatatatatatatatatatatatatatatatatatata

SEQ ID NO: 13404 - DNA, 553 bp, Arabidopsis thaliana
ccacaacaagccattctacataacagaacacgagttacactgcacaggctgagaacacgagaataaaatagaggaagagaacataccactcggtttttggtttgggaatcggagacaagacacaacaccacagctccctgtttggcacggagagtgtcgcttgcagagccaccgccgagtcttcttgtagctccggcaacgtcccaggaacttactcttggaagttgttcccttgagatgaagggtggctgtttgctggagcgtctgaatctggcgactgaggaggatcttactgagctggcgctgttggcggcggattgtagtggacctcttcagatagaggcggaggagcttgacgttgtggttgagtcgttgagttctggaacagttgaagaggcggtggatagttgcggacgtgggggccagacgttgaagggccatgttgttgagccggctccgtcgcaggaacttgaaccgccggcgccggagtgaagttgtattggggaggaagattcgccggtcttgatccgccggcgccgcgtctctgagtgac

SEQ ID NO: 13405 - DNA, 524 bp, Arabidopsis thaliana columbia
tcatcaatagcttgaatgatgtctactgaagaagctccaaacgtaactttctctaaatgatgcttattcatgctatctaaagcccactcccaactctttaattttgcatcaaataatgaaagcacctgagaataagatcttctgctatgtagcaacacatggccattaggatcacgaactatccataatgcaccagtgatatgtctataatttgcatgatttaggcaatcattcttcaccactttatcattgtttcatccacatttcgtctcattaggagtcgatttagtgagttatacatacttaggacgattttgcgttaggattgcatgtgcattgcatatatggttgttttcaggtactttggatgcttatggagttcaaacaaaagagaatcagaacgagaagtcagaatgccgaatgacgccttcagcaaaagtactctatcgcagcctcggggcccatgcagcatatcactctatcgcaccccggagaagctagcagctcagtttcactcaatcgcg

SEQ ID NO: 13406 - DNA, 564 bp, Arabidopsis thaliana columbia
ttcaggctagcgactacagctctgctcagatatggctgcttggtggcctctcagatacttttgaaagcatagaagctggttgggcggtatatttttacttccatcgaagtactatatctcgtatttgaggtaaattttaaactgatcgctatcaacctatttcaggtgaatccaagtgttttcggagactcccgcacacgtcttttcacatattggactgtaagtaataacatcactaaatcactaatgactttataacatcttaaatctcttccatgagttcataacttctctttctatttggatttgcagagagatggatactctagaacggggtgcgtcaacctcttatgcgcaggttttgtgcaaacaactactaagtttgcattggttgcagcaatagaacccgtttcgactacctcgcaaaaacaacatttcatcaccgtgagcatgttcttggtaacatttttgccttatacacatatccaatgttttaaaagtagtctaggtagttgtctatgctttgatagaccgtaaagattggagttaggtgtttatgttatt

SEQ ID NO: 13407 - DNA, 599 bp, Arabidopsis thaliana columbia
gataacaccttgctccacgacaccacattggcctcaccaatcttacttgtcacccataactcagtatttgatgtagaatctcccactagtaacagtgaaagcttctcgtctcccacagcggaaagcctagaagcctcaaaaccatgcacttgacaggggggaggcagaggaacataaccaaatttctctgttccaaaatcaaatttgatcaaggttatgcgaaggtccggtggccttcgtcttctatctatacccaaccagtaagtgtttcccttcaaagacaaacattttctaaagtactccatgtagtggggtggcttgataatatcatcaataaccctccatgagtcagagctaaactcgtagatttcagaatccttgtctaaataattaaaaagctcatggctttgtagctcttatcacaggacttgttatcatatccaagaataaaagtcataccttcgttgtaacgatcgccgagttcgatccacttggttacaccagttaaagggtccaaacgacttatcttgaatcttttcgggaggtgcatacaacaagccatcacagtgaggagtatcagatacagttaggaaggaata

SEQ ID NO: 13408 - DNA, 591 bp, Arabidopsis thaliana
cgaagctgtacacatcactcttctctgtaagtttctgtgttgtgtagtactctgggtccaaatatccctgccattgaatcatcagaaacaaaagttcctaaaaattgaaagcaatatgactcgttgatttatctaaaacttaccaatgttcctttaacttgtgttgaaacatggcctttggtgcagtctgaaaccagcttggacaaaccaaaatcagcaaccttggctgtcagattctcatccaaaagaatgttagttgatttcacgtccctgtggatgatcggaggatccgccagttcatggaggtatgcgagtcctcttgccgatcctagagccactctcagccttcttttccaatccagcgtaattccggatcgccctaaaaacaatacgtaatggtcaagttttgtgtttgtgatttattgagcacctaaaggccagatttttcagtaccggttaagctatcttttagtgatccgttggacatgtattcgtagactagaatctgctcgccttgctcgaagcagaacccgacaagcccaactaggttcttgtgatgaactcgagaaagcaactcaaatctctgttttg

SEQ ID NO: 13409 - DNA, 626 bp, Arabidopsis thaliana columbia
cttgacctttaccttagccaactgagttcattgatgatgcattgcttgattcacattccagaactaattaatgttaaagggattggtagatttgagaacatgtgtaggtcgagcataagagtcggattgattgataataatgcatggctaacgtttttgagtagaattcgataatgtcgcagcttagaactatcaacttggacaatgatttcatctggtttatctggtgctttggctttgagtccccgctttcaaacctcacctccagcttgttcttgattgtttgcttgagggcaagcaaagactaagtttgggggagttgataagtgtgcatttgacatgttttgagcatccatttgttatcattgttgcatcatatcaccactgttttatactatttctcatcatttgtcatcactttgcatgtttaggatagttttgcatgcatgttgcatatttgtgttgatttcaggttatttggagctgttgacgggctaattggaagaagcggacctgatcatgtcaaccactcgaccccaggcgagtagatgctcacgacatcaaaggacactcgacccctggcgagtagaagcttcacacttgccacctggccgatacacatgaga

SEQ ID NO: 13410 - DNA, 492 bp, Arabidopsis thaliana columbia
taattttaattttggtatttgaggtattacaaatatatatatataactaatatatttaagttacattcgtattcgggtacccacgggtattagattcggttcgggttcggttcgggttttttcgggtagtaaggtcgaggacccattcgggtaattctaaaaatcggattcgggttcggtttggttatttttcgggtttttcggttcggatattcggttcctggtattatgcccaggcctactagttaattttttgggttttttaaaaactttaaatgttattaaaatattgagatttggttttgatgattatcatttttctttgtcgttactcgttttcattgaatttttcaagttcttttcgtttataaatttataacattcaaaattataacaaatatttataatatttaaaacttcataaagttgataaattatcaatatttaaaacgttttataaaggttaaatttttaagagtttgaaaatttgta

SEQ ID NO: 13411 - DNA, 587 bp, Arabidopsis thaliana columbia
atcttcagaatcccaaactcaaacagcttcttgatcatctcaatcaacataacatcgttgatcttctctccaacaaagccacacagtatatccacattacgttcttcaaacatttctcgagcaaacgaaacacgaaaccaccaccgtggattctcaaccgagtttttcaggtaacgaatcgctgtatgcctacccataccaacacgtccaccatacgaaaacgtagcgaatcgatcatcatacacaatctcaagaaccattctaatagcttctatcaacactttgagttttaaattgggaagaacaagacttgaagagatgaattcgacgcaacatgaacgaatatcaaacctgccttcgcgtatctcgcgccccatttcttcgattgagaacctccgggagacacgatcggctaaatctccggacgaattggcggagagagacagattctgacaggcggcgagaaggacacaaggcagagaaacggcgtttttaacgagactgtagaacttaccatgagagtattgcttgagaactagggcttcgagctctgatttcacaatggctcagtgatggtttggtcggag

SEQ ID NO: 13412 - DNA, 644 bp, Arabidopsis thaliana
tttccttttatatactatagtataggcagattaaattattgcctcatacaaaaatatttctatataccgtagtaaccaaccagtgataaatgtgatgtgacatgatacaatctctttttctataaaggagatttcatttggtacattttttactttacaacagtaaacaagaatacaaagacagaggactttcgactaccacttagacgctagcccggcctttaacagtgatacgtacaagagctggttccatgtgtccggtacacccggcaagcaccaatggctacaatcttggtgactcacggcctctcttttctctttttccgtcctgtaaaccattctgtatatcgaaggatgaccatcttttctgaaatctgttagtcgacttatgttcatatatatcaccggagttttcattgtatcacggagaatatactcgagagctttcatcttcgatggatactttgctaagtaactcgtgttgaaaatcggttctgtttctttgtggcattgtccacctgagttccatggccctcctctgtcaaagagcaccagtttcactacggtcaagaaacacgttttgcagtaaacaaaaagtacttttagattgagaattacctgaagtgtgtaacggtatatcctct

SEQ ID NO: 13413 - DNA, 1304 bp, Arabidopsis thaliana
aatcagagccagcttttgaaataaaggggtttaatgttgtttggtaacttgagcaaaaagctataaaagcaagtggtattactcttgctcctccaagaaccatggttgaggcgcagaagatgacgtgaaaaaccgctagcacaaagatgaagatatggagttgatgcaacgcttccacagatactaatggaacctgcccctgcagccataccaagagatcaatggttaatagaaagagatccagtaagagaaaggaaactagcaaaacagcaaagaatgattgccttggcagcacaatggtctggactttctcctgttgaaaggagatgtcgtgcattgttgataatcgaatgagatgatttaggcgcatgatgctcctccaatggcttcttacagggaaacatgttgtttacaagagctggtgggacacagatatgccgaattgcggcctgagataccgttaacatcagggagataaatccaagaagcatcaattctgtgtcaggacatcaatatggtcaggtgtcaggtgtaatcaaatcaaccatttcatgtttagggaagaagtacaataccttctttgagtttctgcaaggcttcgaacaaggcatcttgttgcctacgcttcagacactgaaacagagagaacggaaagttggaaaaagattttaacttaaaacctcaagattactacaaacagagatagtgatattggacctttccaagatgatgaagaccacgttcagcgagaagagataagagaacaatgatgaaacagataaacgcaacgacccatgtgggtgtatactcaagagaaccagaccttgcttctgccatttctgcacctccaagatggagacaactctgaattaatattattattatttaaggcagagaataaacgcggaagaagacgagggaaaagaatagagagaaagaacaacatttgggttatctatctattactaaagcacaaaacctttcttcggtctcactcaactgcttacaaaatagaaaacaaagaataatacactgtatacctcacaaacccagagagaaaacaataaatgtttggtttctcagaccgcattttttgtattaagctaaagaaaactactttttctgacttgaagctacgttttattaaggcaaaaaaatgacttattacattcgaaaagttttatttttcttcaaggtgtccaaggtgctggaggcggcggtgtaccataaccaatggaggtcggcagagacatagtgtttttgcaataccaccaaccgcttttcccctgataaagccccagagc

SEQ ID NO: 13414 - DNA, 496 bp, Arabidopsis thaliana columbia
aactcaacatttaattattattatatatatatatatataatctgtttcttattaattgatttttttttttataaatatttatgtattatttattagtcattattgatgaattctaaagtttaaaacaaataattgaatattattggtttagaattataaaaaataatacctcataaaagttactacatttataatatatttttttaatctctgtgtttataatatagttggcaattagatttatggtcaacatcaaactctcgaatcaaagtcagcttcttcgagaatgaaattggaattttaaagtccaacttttaaaatttatctttctgctttcacagagacgacgagagaaacaatggcggagtctgcgatccgaaccatcgtcgaatcaattcactcatcgccgacgcaagccgtcgtgtatctctccggcggtgcctctcaggtttctctcttatatctctctatatttaccaaattcatgtaattttac

SEQ ID NO: 13415 - DNA, 438 bp, Arabidopsis thaliana columbia
ttttttttttttttttcttttatgtttagcagcttgcttatgatggaggatgcttttacttagttatgatctccagtgtctctgattgaactgattctatggcgcacattcttgtcaattagcttaatgacgcgattcgttgttgagctgagttctcggtggcgtcttactatcctctgaagtaagcctggttttgatttatgaatcataagagaggcattcaaggagactacaaaacactcagttctagcgaaagaaatcatccatatttgaaatttagaagatgttgtatttaaaacatatataacttagtcagattaaatgtatgttaattctttcaaccaacgaaaactatagggctaaggatattgaattagcaatacttttcaccaagaagatcaaatgatggcggttctcaagggttattctggacgttat

SEQ ID NO: 13416 - DNA, 537 bp, Arabidopsis thaliana columbia
cactagtttcttcaagaaaactttcctttctccacaatatgccggtttgttaagctcccttgtctcttcattaacgttattcccccatatctccaacctctcataagccatctttatagatttggagaatataaataaattaaacatggactaagacataagtagggaaaatttaaaccaaaaccattcatggatatatatatatatataacaaaggcattttggcatgaatttgaggtttacagtttctctccagactaaaagatagagtccagtgtattatagtttccggtgttggtccttctcttcttcaatatatgcggtgacatacgactgacaacatgagaatataacttggtagaataggcacaaggaccggtatctataatcacatggaagagccttaccatttgtatgctttagattcaaaaatttgtaccatcttatgtagttttccacagtctattcatcacggtatccatgggccatgacctccgcctagtgaaattagaagaaaagttatagtagagtaagaag

SEQ ID NO: 13417 - DNA, 487 bp, Arabidopsis thaliana columbia
cccagagccttgtaaagggaaggcttgttcctttgtgatatagtcattaacagggacacaaacttaccctggcttgtccaattttcaggttgcaagtatttttgttccggtagtgattactttggcattgttcaccttagtaggctggtaagatctagtaccttagctttaatttttctctgagaacgaaacacttgggattagtttgttcttatttcttgatacatatgattttgaaggtcaattggtggagctgttggagcttacccagacgaatggcttccggagaacgggactcactttgttttctcgcttatgttctcaatatccgttgtggtaattgcttgtccttgtgcacttggcttggcaacaccgactgctgttatggtggcaacaggagtcggagcaaccaatggtgtattgatcaaaggaggtgatgcattagagaaagctcacaaagtgaagtatgtaatctttgacaaaacag

SEQ ID NO: 13418 - DNA, 602 bp, Arabidopsis thaliana columbia
tacatctactatcgacctcgatgtaattggtgaaaagactaactcaaaagatcgcattgttggcgcacatttcttcaggtcattctgcgtttccaatgcctcaaaatttttatgcttttttcgtatttttagtgtaatatacaaatggtttgtctttttatagtccggcccatctgatgccccttctcgagattgttcgttcaaagaatacttctgctcaggtgattctggatctcatggcggttggaaaggccataaagaaagttcccgtggtggttggaaactgcataggctttgcagtgaataggacattctttccttattcacaagctgcacatatgttggccaatctaggtgttgacttgttcagaattgacagcgttattacctctttcggcttgccattgggccctttccagtaagtctctccctctatattttgttacctacagtgtatgtgtgtccgtatgtgtatgtgttactctcagtgttgctctatggctatctcagcaactgaagaattttttttttttcgatgactcacttctcaggcttggtgatttggctggacacgggattggattagcagttgggctgatata

SEQ ID NO: 13419 - DNA, 442 bp, Arabidopsis thaliana columbia
cagacatggaagtcaagtgcagggagctcaaggggaaggagcgggtagtatggggattggaggtggatggcaagtggcatggaaatggacggaaagagaagatgaatcgggacagaaagaaggtgggtttaaacggatatacttgcatcaagaaggtttcccaggaatctcgacgtggctcaattgtctcattgccaggtggtgatggaaccggtgaggcagattttgtacaagcgtctgctttggttagccaaccagctctttattccaaagaccttctcaaagaacatacaattggacctgctatggtacatccatccgaaacaactaaagggtcaatttggcatgatcttcatgatcctggagtcaagcgtgcattagtcgtaggagttggacttcaaatacttcagcaggtagtctagatagccacatccacattagt

SEQ ID NO: 13420 - DNA, 455 bp, Arabidopsis thaliana columbia
agatcccggttctgagataccaatattctatagagttcatatagaataacctgagattgtagaaatttagaatagcagggatacttacaatggatcaagacagtaccaatctccttctcttggttgcacctttgatatattatttctgctcatgccatcccttccatgtggaggttcaggcccatctaaacctcttcgataaggacgagcaccagctccacctctagctaagggtggggaatagtctctgtgtctcccaggtgcttcccttctgctgcttaactcacggccacgaggtggaacgcctgaatgattaagatcagagccatgcttgtgatcttcatatccacgacggcctggtgagctagaacttgcccgagttctatgtcctaacacacacacaaaaagtagccagtagaacaagactaagtcaactacagtataatacaaatata

SEQ ID NO: 13421 - DNA, 621 bp, Arabidopsis thaliana columbia
caaaccttcttgaagattggccaatttcataaacacgttgagttccagctgtgattgttgttcccactgatggagtgatattagaatctattgagacttgttgtccttgacagagaccatgttgactagtgcctctaccatggtggttaagtccttctcttgtagtaggaaaatacggatgcgctgcaacaaactttccatgattcaactgtggtgtagcaatccttggaggtggggtcataggaactggaaaggaattatcattcatttgagactgagaattcatactcgatctgaacctttcatcatggaagacaggtctttcccttccatagttaggtaagcgttgtcgatatggacaatagttcatgtgatgtgtaactctaaaacaactactgcatatcctccttagccgctcatattgaaacctgatgagagcagtttccccagaatcaaaaatgatgcgttggaaaaacctaagtctgtcagtgatccaaacctcactcggactcgaatataagcaatttgagtcgtggtggcatcatgaaagtccaaagtgatgatctctccaagttcttgagcaatcccaaagcagtccctcacaaacatacagaataggaa

SEQ ID NO: 13422 - DNA, 629 bp, Arabidopsis thaliana columbia
gccagctccagagaaaagacagagagtcccatccgcatataaccgattcatcaagtgagtctcttatttaatttttacaatcattcatattctaaccataactgtgtaacattaatataattccttgtcacgtttttattttagggaggagatccaacgtatcaaagctggtaatcctgatataagccacagagaagcctttagtgctgctgccaagaatgtaagaaccttatttctcacatcccaaaaatttatattaaactgttatccattggttgaatcaaattttaataatcaaaagagtccttgataatccatatttatctctagttcaataaaaaaattatttttttaaacgctgaaaattctagttagaagtgatgcgttttaagtattctttgttttcctttactaaagaatttaagccattgatactactaacatcacaacttggtttagattgccggcagaaactagggtttgattttatctatgcgtatagttgctcttgtattagttgtatatatattacacagtcatatatgtaggtatagctgacattaggagtaaagaattttgtcgggttatacacaagttgatatgtgtcttgtacgtatgttgtttatgtg

SEQ ID NO: 13423 - DNA, 579 bp, Arabidopsis thaliana
tagtaacggtccgccagtgtgctctaaagagaggtgctggcagggcgattccgcgccgatttgtttcatcgcctgagcgtgtttccactttcggtgccgccgctgcgtgacggggcgatgatgtcattctgctggcggggtatttctgcgagcagtgtcgtttgcggcaggggctctcccgcgtggtattaagtgccggagcgcgaaatttactgcaacactacagttttccgggacacgtgcgcgaactggaacatgctattcatcgggcggtagttctggcgagacacctcgcagcggcgatgaagtgattcttgaggcgcaacattttgcttttcctgaggtgacgttgccgacgccagaagtggcggcggtgcctcgttgttaagcaaaacctgcgtgaagcgacagaagcgttccagcgtgaaactattcgtcaggcactggcacaaaatcatcacaactgggctgcctgcgcgcggatgctggaaaccgacgtcgccaacctgcatcggctggcgaaacgtctgggattgaaggatttaataatcccggcctgatagaaatcttgcaggttta

SEQ ID NO: 13424 - DNA, 794 bp, Arabidopsis thaliana
cactgcccaagcttcacaagctcggattgtggcatgattaataggatctgcaagcagaattagaaacacctttttcttagctcttgtagtatcttagactatctcgttttgtaaaactgcaggtcccaattactttgtctataggggtgtcttcgcttcgagggacactgtgtgtacacatgaagccgcctccatctgatcaactgtggtttggcttcacaagcatgcctgatattgaattcaaccttgtctcttctgttggtgaacacaaaatcacaaacagccatgttgctatgttcttggtcaaccggttcaaggtaagctgttgcgttttttttttgtttatgaaggaattcctaactaaccataagacaaaaaacaaattctgcagacggcgatacgagacgtcatggtgctccccaattgtgaaagcgttaccattccttggatgacagctgaaaaggatgattgggtcgaacgcaatgtcgctccattcatgtggctgaatcaagactccaccagtgatcgcgaaaatttggaagctgcagaagcgaaatctaaagctgacaagccaccgacttctgaacaaatgcagaaaactgtcaacatcccgcagaagcctagaattgaggaagaatctgtgtcggctgacactgcaccatcagctaattccatagctctcctagtagagagtgacaaatccttagaagaactcaagactccactgctggaaagcagcgaaaagcatgatacaatagcgagaggagggagtaatctatcgggtccgaggaatc

SEQ ID NO: 13425 - DNA, 491 bp, Arabidopsis thaliana
attttcgtgattcaaaattttaaaaatgaacatatattaaccgattggcgaaaaatgtgtgggttcaacatcccgcatcgactaaaatatttagacaatgattcataaataagatcaacattaataaaataaatgtttttttttgcaggatgggttttgcgggacgggtttggcaggacgttacttaataacagttgtaaactataaaataaaaatattttatagatagatatagtttacaagtttttatatatactaattttaaaaaacaaattgtccccgcggtacaccggctctaaaatctagtttaatgcaaaaatgttatccaaagttagaccttcccataattaaattaaatgagggaaatgagctagtttgtaattcatgagactgcgggataatatacatgggctagtttttaattatataatgagcccattaacaactttggaaagatttcgtgtagccccgtgactttttcattggtacgt

SEQ ID NO: 13426 - DNA, 554 bp, Arabidopsis thaliana columbia
tgctaggataaatggttcgaacttggcataagtcttgtttgcattgacatcgaccacacctaagttatttttccgtaccccacgatcgatcaccagatcaaaccaatcacacttgaaaaggacgcatttcaaattcaaaagtcctggatattcgacttctagaaatttgctatacaatcccataaaactcagtttcaccttcgacatggattccataatttgcagttgtccttcgacttccatatggatacgtctgaaaagtatagccgcgagtgaagtacatcggagctgttgtgatcttagatcttggttcttgaacgagctcatgcaaccaaagtggtaatggttcgtttccacatccgtttgtaacctacacatagaaaatattaaatttatcatttttttaaagtaaataagtaatcgaatttttgaaatattattatactaacatagtattttaactatctagcaaaatcacgatctttgtaagtttcatactctttttcttctaattcaggacatgcttcacagatttgtgaacaaataactacaaa

SEQ ID NO: 13427 - DNA, 435 bp, Arabidopsis thaliana columbia
  unsure (1)..(435): unsure at all n locations
aaagtagactggtttgcgccaggtaaatantttatcgagcagtaacgacggctggtcggcaaaccgggacctcgcaggtccagaatcgcaatttcgtgacgtcgaggaggaaattgaacgccagcagagtctttgtttagcacagtctcgtcagtatcagagcaaccgnacggttacactaatcaagggtactttttcggatnacgtttaaaggtgaaatgtcacgcacctacactagtggcgattactgtttcacctgtaatgaagatctcggtttatacgactcagagtatggatagtgatgatatttgttcactacgggattgacgtagactacatcaatatctaactgacgctgttattatgattgcagatacggtagaactacttattgcggcattcattattgatgattttactcgtaggttactttgg

SEQ ID NO: 13428 - DNA, 538 bp, Arabidopsis thaliana
cactacttagacatcattgtagagaacataaacgttgaacagaatgaaaacatgataacaacagtgtaatagcaagatgataacaggataaacaatagtaaacaaaaatcaagaacaaatactgaatactgaatagataaagagaaattcggattacaaaaggtctagaacacagtgtttgcggaataaaaccttgataaaaacttgttctcgaaaatgtaaagtacatgctactgatagcaaaataatctgaaaccctaatactcaaaacgacgcagtattgggacggattaagaactgtattcgacccatgtggtcgagtgagaggtcgagtgatgagatggagtcttcttttcttccttgagctcgaatgtctggttgagtgcagaatggagaagactatgaagctcgccatcgagtatgtagtcgagtggtggtgatggtgatactcgacttccaggtacagtggcgtgatcgagtgatggtcaagtggatgaggtgaaattgttaagcccctactcgacaagggggtcgagtg

SEQ ID NO: 13429 - DNA, 301 bp, Arabidopsis thaliana columbia
tgtattatccgtacgcaaaaaagcccggatgcagacgcataccgggctttccaaaacaggcgatggagtaaggttaacgcagtgcacatcactcgcgcagacaggcttatccttccgggcagcttttacaactgccagagagtcagccgtcaggttcgtcctgaatccgcacggctttgccatactttccagttgttgcagcatggcgttaatcactggctgtggagtgttcaatgtcctgcttatctgggccgcttccatactgcaccgtaacgacagcaaatcgcgcacctgaataagt

SEQ ID NO: 13430 - DNA, 593 bp, Arabidopsis thaliana
tagtaacgtccgccagtgtgctttaaagcatcttctggaattggctttgatcgttctgatttagctgttattgccgcgatgaatcatattggggtggcgatgggaagaaaacgcctggtacaaaaaaggcttgccagtggtgagctcgtcgcgccgtttgcgatatgacggtgaaatgccatcagcattattacatcaccacattaccgggcaggcagtggccaaaaattgaagcgtttattatctggctaagagaacaggtaaaaaccacttcataatgaataaaaccacgagttcctggtgtgccttattcggcctgctagttcgaatttaatttacggtttttatgtggttttagggataaacacaaggatggtgtcccctgcagacatctacttgaagcagcaggggattgattggaatggtgttttttagatgtgagaaatattttacccgctattttacccattggcgcggcttaagagcttatttttgaattcacaatggtcacgatataaccatcttgctcgcccgtggataactttggcttttggcaggtcgcatgacttaatccggtcatagatgaaggtttt

SEQ ID NO: 13431 - DNA, 1157 bp, Arabidopsis thaliana
tcatctaaaccattttatatcactgtaaagcaatacttacacataacttggtgatgaggttactgaagcaaacccatccttataacgcagtatgttgaagtagtcccacaaatggagaaagagagacgtttggagcaaatccttaggtcacaagaacgaggttcaaaagttataatattttgctccacgaagaggctttgtgaccatcttgcacgtagtgtcggacgtcattttggcgctgttgtgatccatggagacaagactcaaggtgagagagattgggtgcttaaccagttccgaagcgggaagtcttgtgtactgatagctactgacgttgctgcccggggactcgacataaaagacatacggtttgttgtaataattcctggtatatatctctttgcttgtttgttatcaagattacttacctttgttcgtgtttatactacttcagagttgtgatcaactacgattttccaactggagttgaagactatgtccaccgtattgggagaaccggtcgagctggtgcaactggagttgcattcactttctttacagagcaagattggaaatacgcacctgatttgatcaaagtcctggaaggagcgaaccagcaagtaccgcctcaagtaagagatattgcaatgcgtggtggtggtggtggtggtcccggttatagccaggatcgaagaggtatggttaaccggtttgactctggcggtggtggtacccgttgggattctggtggtgggtttggtgggcgtggtggtgggtttagtggccgtgaggtgggtttggaggccgtgagggtggatttgggggccgtgagggtggatttggaggccgtgggggaagatttggaatgagagatgactcatttggacgtggcgggaatcgtggtcggggttttactggtcctgatgctggtcatatgaatgtgggtggtagaggcggatttggtcggtttggcaataataataatatggagagccgaggctttggtcgtggtagtggtagaggctttggtcgtggtgttggacggtttgacaacagaagaggtagaagtcgcagcagaagtcgtgatttggttcggccacggcgccgtagctcgagctatagccggagtcgaagccggagcgggacgtatagtcgta

SEQ ID NO: 13432 - DNA, 493 bp, Arabidopsis thaliana
tagtaacgtccgccagtgtgctttaaagcggtagtgtatttttcaaggaacactttatcgtgtttgccttgtgtcatcagggtatgcgcaatccctaacatcagtgccacgtcggtgcccatattcggcgcgatccaggtggcattatcgtcaaagaattcgatggtttcggagcggataggatcaatggcaatcactggtttgccagattttttcagctgatggaagtattccagcccttgctcatcggtactgctccaggcaatttttaaggtattcagcgggttcattccccacagcaccacaacctggctgttttccagaatcagcggccaggaggtctgctgttcatacacctctacagaaccgaccacatgcggcatgatcacctgtgctgccccggttgaataatcgccgctatgcccggaataaccgcccgccaggttcatataacgttgcagtaaggtttgcgctttatgcaacacgccagaag

SEQ ID NO: 13433 - DNA, 530 bp, Arabidopsis thaliana
taaaacattaaaaactttgtgacaaatcattcttggaaacattcaggattgataagtgtgtattttgcatgttttaagcatccatttgtcatcactttagcatcatatcatcactttttttataacatttcacatcatttgtcatcactttacatgtttaggatagttttgcatgcatgttgcatatttgcgttgattttaggtgatttggagctgttgacgagctatctggaagaagcggacatgatcatgacaaaccactctaccagaggtcgagtaggagcttcaagatctcaagagaccactcgacccccaggtcgagtagaggacatcaccacttcacttcaccactcgaccacgaggtcgggtgccctcatctccatcactcgatcacatcactcgaccatgaggtcgagtgtcttcacctccatcatcagacaaccactcgacctcgtcactcaacctggaagtcgagtatctcctgacaaacactcgatcacttcactcgaccacgaggtcgagtgtcttca

SEQ ID NO: 13434 - DNA, 303 bp, Arabidopsis thaliana
ttgaaccttgtacattggagaaaacattattttaagcaaacacgaaaaaaaagagtgaacaagcgagatgaatggatattagcttaaagtaaactcacgggcttgccgaagcaaaaacttcaaaaagtttatcgacatcatccaaggtggttgtttcatcgaaagcaacagtaatcttaaagaacaagaaaaaaaacccatcaatgttaataatcatatccagatattgaagaaatatatatatatatatatatatatatatatatatgggggatctcacagtgttcggagtccaaaagacgc

SEQ ID NO: 13435 - DNA, 606 bp, Arabidopsis thaliana
gtttactcctattgaaccaaaaacaaaatggcgagtagtttttttgtggttatttgaaatcattttcgaggtttgatttaacatgaaagtttaccatctttagctgctagaactattgcaacaataatgtagattatgctaaggattgttgaaactcctagccagattccaagagctgataaatgaggaataccgatggccaaaatcgcacatacaacacccgcgatggcgataaagtgaggcagtttcatgagacaattatctctaaaaagtacataaacagcctgcacacaatgcaaaagcagagccatatgagctaattttcggattttcgcaacaaaacggtttgtttcggttgttgtacctttaaggtcgaaccagcaagtaagatgaaggcacaattaatcatgaaaagatagacatattgcaatccccatgtaacacgatacatctttttacctgaatcaatcaagcaaatacaattctagttaagtgtgttctttgatattgcgagagagtgatggagaatttccatagatgaacctgcgagatctctataacgaatgtgtcttttgccaccaactcatgaagcttgcgataagagtt

SEQ ID NO: 13436 - DNA, 613 bp, Arabidopsis thaliana
  unsure (1)..(613): unsure at all n locations
nnnnnnnnnnnnnnnnnnnnnnctaaagaacgtgcgcgttgttcatgccggatgcggcgtgaacgccttatccagcctacaaaattgtgcaaaatcaatggattgcacagctagcgtaggcctgataagcgtaccactcaggcagatttgcgtttgtcatcagtttaatgcccggagagatccgggcatatttccgaatacggtctttttataccgtaaaccctaacatcatccccgtatcttcatgctccagcagatggcagtgcgccatataagcatgttctttcggtgcatcgtgattaaacttcaccagcacttcgctgacattaccttctaccttaacggtatctttccagcccgcgcgatgagccgctggcggtttgccattttctgacaagatacggaactgcgtgccgtggatatggaacggatgcagcatcatgtcgcccacgccagagataacccaacgttcgtattgccctttcgccgccgcaaacatcggcttgttcatatcaaacgcctgaccgttgattttgttggcatggtggaaatcgacttccgccgtggttcatatgatcatattgcgtgcccatatggccatcactggctgtga

SEQ ID NO: 13437 - DNA, 585 bp, Arabidopsis thaliana
tagtaacgcccgccagtgtgctctaaaggctatattcgccggtttcggcatcgatacctggtgtagtgagtaacagcttgcacggatcaacaaaatactgatccgcggcatatccttcaaagccgtgccacttcgcccccggctcaaaactgaaaaaacggcggtcgctggctaacactgatgtcggataatcctgccacaatttgccatcaacaacgggcgggataaacgggcggaacagcttacagcgcgcaagaatagccttgcgcggttcaatccctatctcaacacactcagcccacagccgacgcccactctccccttcatgaattttggcgttaacatccagtgcagcaaacagcggatagaaagggctggtagaagcatggagcataaaggcgttattcaaccgcttatgcgggcaaaaacgcgcctgtccgcggatatggttatcttttttatggatctgcgacgtctgtgagaatccgcctgctgtttgtgcacgactgagtccaaagatcccggatcgttttcgttaagttctaacagcagcggcgagctatccgccatcatcgggataaattg

SEQ ID NO: 13438 - DNA, 518 bp, Arabidopsis thaliana
tcccgtttgcttgggagctttcttcttcttcggcttgtcggctctagtcgacggccgacgtattggacccattctgcctagggttataacgcgcctgtatccttgctgcggtgacgcgctgacctcatctttgacgaactctcgtcatcaccgtaactatggttgctcttgttcagagaatcttctaggtcgctcatctcttgatttcgaaggaaaaagatgggagagatgaaggaaagaacagagagggcagatcgagaaagaagggagcagcagagaaagaaaacgatagagatagcagagaaaagatgaaagtttctatctctaaaaacgaaaaataaacgcagtaaatagttaagatggagagaagttacgttgagagtcgtgtgagttgacataaaatcaagtggagaggtgggaagttatttaaagtagcaatcatcatcacgattttcgagattacagagatctcttccccgcgcctgatctggaccgtcagatgcggggcgctgaagaga

SEQ ID NO: 13439 - DNA, 606 bp, Arabidopsis thaliana
agtctttgcctcagctcgagatccaaatcgtcatcattatatcatagcggttggcgtactcgacggtgagaatgatgctagttggggatggttctttgagaagctgctaagtgttgtacccgatactccagaattggtatttatgagtgacagaaattcaagcctcatcaagggcatacgtaatgcgtatactgcggctcatcacgggtattgtgtttggcatttatcccaaaatgtcaaagctcattccactaacatcaacagagacgtactcgcttggagattcatggagttaagtcggatttatacctggtcagaatttgagagggagtatagagtattcaaggtgagatatcctaccgcggtgaattatttggaggattcaaccgtgaaagaaaaatggggtaggtgttgttttccgggggaacgatacaatttggacaccagcaactgtgtggaatagttgaattctgtttttctcaatgcaaggaagtattctttaatacccatgctagatgcgatcatggccaaaatttctttttggttcaataacacgcaaagatgcgcttcaggatctgttgataataagtttgtgctttagtggag

SEQ ID NO: 13440 - DNA, 587 bp, Arabidopsis thaliana columbia
ctctagagtgtatccctttttaagtttatatcttatcgtaatcatgaagcttgctttggttcacatcgttcgagtcataccacattgtcacttgcgttctcgcgttccactcgtactgtacacagagaaacaaagtgagcaagtaatctacttcttctacccgcacgttccaagaacaagaatgatgttacacctgtttcctttcatcaccgtttttggccaacttctttgcactctccagccatgtccccagaaggcaattatcatccgaagcaagtagaacgtccatgtcctttataagctccagaaacttctcactcaattgtcctaagcttccgatatctttctttacaaaagctgtcactgcttcggtgtacacctggtttgctagcttcgataaaacttgacgcgtcaaatcaaccatgtcatacctgcaagcaaaacccaaaggaatctgtaaccactaaaatggtagataatctatctctacttgcatctacctatatgttaagctccttgacagatcaccccagcttccaggaaaagtttgagagcttggatcactcgtttgtagaatccataaatgg

SEQ ID NO: 13441 - DNA, 1076 bp, Arabidopsis thaliana
tattttcaatttgtgcgaccgaaacccaatgaatgggtgcctgttcagcaagcctggcaacgttagtcccagggttaagcggtgaaggagatgaggccagggcaacagcggaactgtttagagcgaacaataagcaaacggcactgattgcctgtgtgatcttgcgcatatttttccctaaatagtcagtatgttgaaactttttattgtgagatttgttgcaaaaaccatctgaccataacgccagctgccggggaaaggaaggattatctgcggtttttgtgatgaaaagcaggatgattatatttaacccagtaaatacgttcctgtctttttttgtataaaaaatgtttattactcgatgtaaggatacattaattttacgtttattatgatgaatcctcggcaaatgagcgaaatttgatagaacatttatctgctgtacgatttaatgaacttaatgatacagcattacaaaaacaatcgaagtttataaagatgatttctgattgaccagccccctaccctacaatggtgattaattttattactcgcgatggagatgatgatatgaatatatcatatgtgaatagcaacaaaacgacatctttacctgttgagctagatgcactaaataataaagatatctcttatgccaaagatttctttttatacatagaaacacagttaaaaattgcaaaagattttttagacctggagaagaagtatcaagttctattgcaagtaaagtttttcacgcatttattgatttagttaacaaaatcaggggtaagaaagactttatgtatatttgcacgctttgctgttttgccgaggaggttaaaggtgattattctcattacaggacctttttatttgatattggtaatcaatataaggttaaacttacacaaagcggaaaaaagagttctctttaacattagaatttaacgatactataattgaatctcagaaagtcacaggcaataaggcaaagcatattcttgaggatatagaaatattctatcgtaacaaacccgatacttattattagatttaataatggttagatgtgc

SEQ ID NO: 13442 - DNA, 554 bp, Arabidopsis thaliana columbia
gcttttgctgtttgctttgcttgtataactatagtttgaggcagcttgggcgcttaccaatatcgcttcagggacatctgagaacactagggtcattattgatagtggtgctgtccctttattcgtcaaacttcttagttctgcaagtgaggaagttcgagaacaggtatcaatttagattcaatatcaattttctttctattgttctggcaaagaaactcttagatcaaattgctgatgactcgattccgactgttttaacatcctgatttctatgtttttttcccctgattataggctgtatgggcattgggaaacgttgctggtgactcgccaaaatgtcgtgatcatgtcctaagttgtgaggctatgatgtctcttctggctcaattccatgagcattcaaagctctccatgctgaggaatgctacatggacattatcaaatttctgcagagggaagccgcagcctgcatttgaacaggtttccttgcatataagatatatacaccaatttgaagtgtgtttctcaactgtttattaatatgagaatgt

SEQ ID NO: 13443 - DNA, 417 bp, Arabidopsis thaliana columbia
ggcggtccagccatacttgctccgccatgcgtacggcttatcagcatcccacgtggagcaacaagcactcacggctctcaaatcccaattattctgcgccggattatagaaatggtaggtggcgcgtacgttcgacgcgctctcccctggtccgctaggcccacttccccaacaattgctctgacagttgttggtcggagaacagtagtccgcggtggtaccacagtaaccgtactgactgcagcagatgttaccgggacaagttcgaccaccgccttgacgaccgcattgttgtccggccaccgtagccactgtgtatgataaaagtatgatggttatgctaagtctgatcttcatgatcgataagtctttgttttcttggtggtctaatgcatctatctatatatctatatatat

SEQ ID NO: 13444 - DNA, 477 bp, Arabidopsis thaliana columbia
ccatcaatttaaatattctcaacccctcatgtatcaaacctgcgtgactacaagcagataatattgagagaaatgtcacttcattaggcttaacttctgagctcttgaccatgtgattaaatgtttccagtgctttagtgccctttccatggatgccataaccagtgatcaaagatgtccaaaccacagtgtcctttaaagcaatcccattgaatactttagaagcattgcctagactcccacacctcgagtaaagctctacaagagaagctccgatgaatgggttactgtcaaatccatatttgataacataactatgaaagcatttagcttgttcgagaaagcctaactccgaacatgacccaagaaccttcaccataagaatagcatcaggcctggtattattttccagcaacatgatggaaaattcctcaattgatctgtgagccattccatttaatgtaaagccacttatca

SEQ ID NO: 13445 - DNA, 751 bp, Arabidopsis thaliana
ccttggcaatcaaagagtgtaatattcgttgttgtgttgactaatttccaggcagcaaccatggtagtaagatattctgttgaacctcttcttgaagattacagaccaccaggaattacttccctcaagttcagcaaattgaccttgggtaacaaagcaccaaagattgaatgtaaaataaggtcgacacaacatcatttttgtgatggctatcttttctcttccattgttcaaccttgtattgtcctattatttatcttggatgagttacctgccaaatgctattgaatccttgtgcttggaagaacatcatgcatttgtctcctaggttacttttgctgtaagcctgagcacatgcataattaatcattgttgcaggtattcgtgttcaaagtttcaaggaaggtcaagtcacaatggacgttgatcttcgatgggggtgttacagcacttgttgcctccatacccattcaggttactagagagatatttttagtatttgtcgtttgggttgtcgttttgtgccaaatagagattgagtatctctacaaacacttgtttctggctgaaacagttgaaggatcttcaagttttcacagttgcacgtgttatctttcaacttgcggatgagattcctcgtatatctgctgttgttgttgctctactggctgaggtacacttgttctgtaaagggtccagaataagatgcatttttgttattatcattttatatctcctgtcttacaatgac

SEQ ID NO: 13446 - DNA, 578 bp, Arabidopsis thaliana columbia
aataaagaacaattgttgacactataaggtaagttttcagatggtgaggttttcttgtagagtaaggaatgatcctatgatcttgccaccgagatctgggaatgtctcgcatccaggaagagaactcactttgcctgttttatcgacttgaactggatacttaagaagatgacctgacatctctgtgacttcctctgctgcatactgtccccaattcagctcactcaattgcctaactcgtctcacgcattccatgttctctggttcctcgaattcttgctctagaaaccctagatgttctgcccataacgacattctatatccaaagatctgcaagaaattgagacaaaccagggttcagacaagtttaagagaacatacattggtgggtttctagtttttcgtcttagaatgctatcctagattgagaagtagaagtctctgaaagtcttatttacctgaccacgaggacgagaacctttcttagcccatgaatgatgtggctgataccctccatagcgatttcagtgtctctagtccttccaaggatctctggttgaaatcgcggaccaattaag

SEQ ID NO: 13447 - DNA, 648 bp, Arabidopsis thaliana
ctaccaactaaaaaaacaaaaaatccataagccttactctctacatcataagcttgattgaagcaagttacacttaccattatttaattttcccctccgtgcatagactttgataaagccaataaacaccaaaagattaatgaaagtaaacaccacaactattgcgataattccgccatacccaatgcttttccctgcaaattaccaaccctttgtctaagaattaacctcttaatcataataacaatttggcacgaaaagttcataccaaaccgcttcatgtcacttatgtaaacaatattcctcaaaattggctcttttgagctctaaatgaaagctaaaataatttgtgttacctttttttactgttatgcagctctccttttcctgagcatgaggtcgaggaggaggcgcaggaactcttgttacattatcaaaagcattatggaaagaatatagatcccacctgaaataacagcttggaagactagccatgcctccttttcttcccatatagtcttttctaaagtacatcacgcaatctcccaaacattgcttgcaatctcgtgaacttaagtcgggtgtgcattgcatcagcatgtaaacatctggaaactcggtgaaaccgctttttcggccttatagtac

SEQ ID NO: 13448 - DNA, 454 bp, Arabidopsis thaliana columbia
gaatcgtgggccatccttattttgtctcgaattcttcaccaattgcttcgatcaagctgcattggttaaccagttgccctaaagatcagatctttgagcaaaattttgtcactgatcttctaaatccaaaccagacacagcaaaacaacctctgcagatgattcgagaaatctcaaacttacaaaaagatattataaacattcaagacagttattcgaacaaccgagtcatggacgtcggaagaaacaaccggaaaaacatgagctttcgaagttcgccggagaaaagcaagcaagagttacggcggagtttctcggcgcagaaaaggatgatgatcccggcgaattatttcagtttagagtctctgttcctattggttggtctaacggcatctctgtcaatacttcggttagttttgccgccgttacctccgccaccgtttaagctgctaatg

SEQ ID NO: 13449 - DNA, 452 bp, Arabidopsis thaliana columbia
tcacctgatacctcaaacacttgtaatcagtatgaccaagaaagagtgactttgttgtgaaagcatatggctgaacagctacgtcagctcttgtaactttgttcataaaagaactctttcccacattaggacatccacagatcaagagagttcgagtgtttggatcaatcgaaggaagccttgcaatgtgttgcctaacctgttcaagataagccaaactaggaccaatacctttcataacagtacacatacgcccaagagcagccacttttaagcacttgcatcggtacagagaatcaccatgcttcaatagcttcacataatccatggcgattttgctgatcttgttcttcgcagtattgacttgaccaagagcgagcttgtagtgatctttattgtaaagcacatgaagaagatcttcatagaagggttgaatttccttgaggcgagga

SEQ ID NO: 13450 - DNA, 408 bp, Arabidopsis thaliana columbia
taagggcaaaaatgaaatgaaatgataactataattatagagaaactgataggaataacattttcactttcaaacaatagttcctcaactgttaagtcggcaaataatttcttaaatttgcattgaccacatagaaatgggttccagaataatcaacgctgaatattccagaaaggggattaagcttcggtgaagcttgggggcttgtaggcaatgaaactgatgcattggacttgacgggtgttgtcgaatccgatgatcctaatgaaggcgccagggtactccttcttgcattcttcaacttccttcaacacttgagcggagtcggtgcatccgaacaatggaagcttccacattgtccagtatcgaccatcatagtatccgggagtgtttccgtgctcacggtac

SEQ ID NO: 13451 - DNA, 532 bp, Arabidopsis thaliana columbia
aggatgatgtaactgaagatggtaatgaggtcgatcatatgagtggggtaactgaagaagggaatgaagagaaccatgtctccggtatgaacaggagtaagaaaaaacaatctgatcacggtgcagagacacgcaaaaagaagttgctttgtcaacgagcaacagcaacaacacatggagctttaaatgacaaaatgaattcctttcttaaagcattgattgattcttcttttgagaagtttgaaaagcgattgcaatcaaaagaggatgatacatcactagtggagggtttggtctctacatctgaaactacaagaaaaacaacgagattcacaacttcgcaaccgtccaatccaacagatcagccaagtaaacttgtagtacgtataaatctaaatcttgtagatatttgaaaattatgtacttgtagttcttgttttaatgtttttgttcatcttttttaatagcaggacctaatgtctttagatgacgatattttagactttaatttgggtcacaagaatttttagat

SEQ ID NO: 13452 - DNA, 482 bp, Arabidopsis thaliana columbia
tcgggtttcacactcacacaatgaaagtatcacaaaattgacatggtttttctgttaaataaatgactgcttttatcactctgctcgtattacacaatactcttttgaataaaagttctaaatacctgaaatatgagcgacatacatatcccatttgcatggaccattacggatattacacatacaagctttatataggttatttacatgactgtgtacaactatgtatgtttgtttctgagaccttcgatacaacttgtttcataaagtttgtgtttcttcctcaacaggttttgtctggcaagtcttcaacttcttttcgtcgaggtagtgctgatagacaaatgaaaggaagccccagatagctaaaatgatggagaaaatctttgatgcatccatcttatcatggaaaactatcactgctacaactggaactataggcagtccacagcagttatggaattggagacacagaagaagac

SEQ ID NO: 13453 - DNA, 377 bp, Arabidopsis thaliana columbia
tgctgcacgtaggtttcaagtacctctcccaggagaatccaccctggtggaaagcatttgatgcagataaatctagtattgaccaagtgtgtagagttctagctcatctatacactcttccaaaggcttagtatatctcctctgtttgcaaggattcaaggtggacattcagataaatcaagacatcgctcttttgcgaatatccctttcagttaccaaagacgatgatctgctctgctaatgaatttggggatacgaagatcactggtggtgaaaacaaacgtcgatgtcgtcacacgacacattttgaatcggcacataagtcacccgaatcaacatctacacgcgcattttggtcacggtcggctttgagtttg

SEQ ID NO: 13454 - DNA, 485 bp, Arabidopsis thaliana columbia
atctccacaatagcggtccaaaacgaaaatgcggttcctcatttaacagtcgacgccacattgcttcagtaacggaccagtctgtttcggcaagaacggatcaatccgaacccaaaccaaagagaagatcgaagcgagaaggatagaccaaagaacaacaatcgtcggtgttcggttttgtctacccatcaaacctttgaggaaaggataaagatgaacaatgacccaaaacgcgaaaaacagtttcccaaaaagcggtccccaagaaccatatccattgttaatagcgtcagaaactccggcaacaacaccgaccatgttgagaataatgagagttgtcggagggatgagaagggttgtccatttaaagaggtaaagatctccaaactcatcggcttcgtcactggctccttttgacgtgacggtgaagttagtgtcacaccaaagagaactttaagaagaccttgaaagacagcgaagagatg

SEQ ID NO: 13455 - DNA, 526 bp, Arabidopsis thaliana columbia
gacccaaaacaagaaatttcacacgaagagccaacagaaccatcgaaaactaaagttcaaactcgaatggggactgaagaaagtgaaactattgtgagagagaagaagaaggacatatttacgtgttttgcccttctttataacggactttatttgtatcttgtcgaatatctgagggtaaatatgtcattgacatcgagaactcgtcgactgtgttgtttcgagtcaagccaagcgccaaacttttggaactttggtgaatcgattgttctcctttcttcgatatcgaattagggtttctgtagaatccagtttttgataggaacaatgtcaatttcggtggttgatagcagtctctgccatccgactgcgtcgtttccgtcatccatggttcattctaatcgattctcgaagagaatatcagggaacgggaattgggttcgcgaaaggagaagactttatgtgaaatcgagtaactcagaaggtaaaaaggaggaagcagcacagaaatcgagcagtaataata

SEQ ID NO: 13456 - DNA, 1546 bp, Arabidopsis thaliana
cggttcttgtggtctttctatgaaagcttcatttgcttctttttccttctggtaattttgtttagcataacattttatcgtttgatttgatctattgacatattcttttatgggacaaacaaaaatgtgtatcttatgaatgttatttttaatttatacaacttgtatgtttcatcgacgtctaaactcattgcaattgtcattatagaatgccgcatagactgatttatgttactagtaatcatatttattattgactcatgtatgcgatacataaagaggaattggtttgcgtgagaaacaactacacaagtacatttctaaatctctctaacttcaaaaatcaaaacatattgaaacaaaaggaataaacatgttataaccaatacatagaccgaacaaaaaaggaaacgatacagagaacccaaagaaagtctcattttcagctttattaagagcttttactgataagcaacaatggcttctaaaggaatggaggaagtatcacccatcttcttggatactttggctttccatcttttccatcaaatatctgcaataccaatatcaaacaatccacaataagaacattatttgagaattttcagttccgctaaaatcatatcgtgagaccgctatgtttacctttctcagacggctgtgctttccaagagcccaattagtcatgattagagcagcaacagcgaggaaaacatatcctgcaatggtctgagtagcgatgttgaatcctagccattggtaaatctcggtagtgtaattggcacatgtaacaatgttgaagaggaaaccgcgtggaatctggtagcctccagccccactggggtccctcagattcttcagcaatatgtgacagtaaaagtttgcgacttggcaaaccaaaccaaacccgaaaccaatcttcatctgaaggtcactaactggagtgtacaagggatggttgacgtaataagcaatgtaagcaccaaagctccagtaataagcacagttcctgaacacattcccgattggggaggttgcgtggctgaaccgatgtacgaaaaacgtttctaagatccgtttgaagtagtgaaagcaccagtagtacatagcgtacgtctggaccggatggatcacacagtcctctccataaccaagaaacttgtaaacagggaagtagtaaaagacagggtagataaggagagggccaagatactcgaagaagaagagtgtgcggtaggaaacttgtgcccccaggtctttgaagactacagttaaggagttgttgtttccatcacagtactccttcagtgatttcttgctattgaggacaacaggtttgtccttcgatccaggagtcacgggaagagtcagtctttgcctcgacgggtaaaacttcttagctgttgaaacaacaaaacccaaatcaaacagtttaatacctactgagagaaaatcaaactaagatttgaatgaacgagataaatataatacatacagaatatacattgtactgtatagtaataccgagtacaaaacacagatcagg

SEQ ID NO: 13457 - DNA, 472 bp, Arabidopsis thaliana columbia
gttctgttatcgagagaacttttggagtttggaaaaaaaaatggaggattctttcggattttccaagatataatgttcatgttcaaaaaagagtggtaatggctacagtgggattatataatatcatcagaatctcaaacttctcaaatgtagattttgtagatgtaatgacagaggcaattataaacaacagagattttaatcatgatttagatgacatagaagcaacagatataccagatggagaacatatgacgcaaataaaagacaatattgcaaatatgttatgggaaaataaagtaatagataatattttttttaatatttttgatgatgaaattagtcgacgcaagtaacaatatgtatgtgtcaaaattaaatttgtattttgatcaatttttgtattattggtttataaatatctgttattgtttatttattaacataaaaaattaattaattattaatatat

SEQ ID NO: 13458 - DNA, 658 bp, Arabidopsis thaliana
cgccagtgtgctgtaaagtgtattaggtgcactgacaggggatatcgggcgtgatggcgcagatattggcaaaatcgccgtgcatccggcgcatgtctatgtcgcggtccgtcagggtgttgctcataaagcatggaaacagttacagggcgggaagattaaaggaaaaacgtgccgggtgcggttattaaaataatgaaatgttgaattgccgggtgcaagagtaaacatcttattcgggattgccggatgcgacgctggccgcgtcttatccggcctccataagagtagcccgatacgcttgcgcatcgggcgctatcctggttatttcacttcaaccacattcagccgtaactcatccaactgattttcatcttcttctggctgccagcacgccggttgtagtgggatctcttcgcgatcaaacgccagatcacccccgttaaccacttcagaaccgtgggtgatgcctttgaaatcgaacaggttggtatcgcacagatgcgacggcaccacattctgcatcgcgctgaacatcgtctcgatacgccctggataacgtttatccagtcacgcaacatgtcagcaatcacctgacgttgcaggttaggctgtgaaccgcacaggttgcacggaataatcgggaacgcttttgcat

SEQ ID NO: 13459 - DNA, 824 bp, Arabidopsis thaliana
ttcgatatgtcttggatcttttcttctctcttgagctttgaacccaccaaactttttgaaaagattacataaacttttgaggaaagaataaagaatgatgctttactcattcacatgactaagctttaaaagattctctctgtaacaggattcgaacgtgacacatcacatctcatgtcttacctcacaaggagaagctattccaaaatggccgtggctcgtgtacttagtcggagcaatgggttgtttaatctgcagctctgtttcacacctccttgcttgtcactcaaaacgtttcaacgtcttcttctggcgtttggactacgcaggaatatcacttatgatcgtcgcttctttctttgcaccaatctactacgcattctcctgccaccctaacttccgtttactctacttatcctcgatctcgatcctcggtctcctcgctatcatcactctcctctctcccgctctctctacgccgcgttttagacctttcagagctaatcttttccttgcaatgggatcatctgctgtgatacctgctacacatgtgctttgcctttactgggatcaccctaatgtcttcatcgccctcggttacgagattgccacggctttgtcgtattttgtgggagcaacgttttatgtcagccgtgtgcctgagagatggaagcctggagcgtttgatatggcgggacatagccatcagattttccatgtgtttgtagttatgggtgctcttgctcattgtgttaccactcttctcatcattgattttcacgggcttcccctcttgtgggttttacaagaagatattgtttagt

SEQ ID NO: 13460 - DNA, 561 bp, Arabidopsis thaliana
  unsure (1)..(561): unsure at all n locations
nnnnnnnnnnnnnnnnnnnnnnctaaagggaacctgtcaccattgtgtctaccggaccgcaaactaacgttgccttgctgctcaatagccatccggaactgcatagcaaaattgccgtatcgtgattatgggtggcgctagggctgggtaactggacgcctgcgctgactttcatatttacgttgacccggaagcggcagacattgtcttccagtcagggatcccggtggtgatggccggtctggatgttactcataaagcacaaatccacgttgaagacaccgagcgtttccgcgcgattggtaaccctgtttcaaccattgttgccgaactgctggatttcttcctcgaatatcataaagacgaaaaatggggctttgtcggcgcaccactgcatgacccatgcaccatcgcctggctgttgaaaccggagttatttacctctgttgagcgctgggttagcgtggaacacaggggaaatataccagggtatgacggttgttgattattattatctgacaggcaataaaccgaatgccaccgtaatggtcgatgttgatc

SEQ ID NO: 13461 - DNA, 532 bp, Arabidopsis thaliana
gcaaagttggtcattttctcatgcaaacgctcgctagcctatttataaaccaaaaatgatggtgtcaacatggtgagctattcagtgaaaagatgatgtatataattgtgttatacatctgctatatgtgtgtgtcgaagctcaagccacactggatcatgatcttcaagcactatctcctttttctccggaggcccaccagttttactgggaacctagcatatggtagagagattaggaagagagaaactgtaacgcccgcgatcctcaataggatcgttggctaggacttctctcgaccggactttaggcagtccggatcggggcctttcagaaacggaaaaaagttgaaggataagaaagaaaaatagaattacctcaatgacatgtttatcccctccatgtcaagcaaatcatggcacatagcatcataggtccattcgtgtatgataggagcgatctacagttacacctcaatcgtttagagaaataaactatcaatatggacttgaggagtaaatgtagtagatga

SEQ ID NO: 13462 - DNA, 1244 bp, Arabidopsis thaliana
caatatataaaaggaaaagtagaactttttcaatattttcaagactttctgaaactagcacaacaatgtttccttattgagatcaagaaagcacctcagctgctttggcttgaagatctggagtcaaatgatcttccaaagttaagatcacagggtatgcagatgcataaaaggcatgttcttttatagatctcaagcatttgactagttcaactggaggtgtccatgccctacaagcagtaaacatactctcttttttttgttaaaaacttctcgacctatagattttggaatatacatcataacacaaagacataccagccatggagaacaagtatgtcgtccttagtagagttaggccacatgtcaagttcaagagctcgaacacctctctttaatgcctttatgagaggtacgtcgctgcattcgctgttgatctgatttccagtcagatacgaattatggctggtgtaaatgaaatagtgcgacaagggagaggccatgtcttgatgcacctgaaagaaacaaaagctcaaagattgattctttccaagtttcaagaaaaagatcaagaaactgaaactggataccttactatcaattggatgattcagatcatctgagaacaagaaactgaagaaatcatcgaggttcagcgtatgcctcaagaacttagtgatatgatgtctttcacatgtgattctttctatgatcttctctgcatctgaaaccaacacttcagtctcgtcctgcacctcaaccaagaaccgacatagctgctctgccgtcatgtggctcctgccctcggtatactctacaaacgccgtcaccacatcctgaggtggagctcctctgttcatcctgagcttgtcactgcaacacaaacccattttgtaactccccatatctctcttcatcccagatacttcacaatcacaccagccaacctctatttatatttttcaaccgctggattctcttcaaaaagttcctgcaatttagttaaataacaactcctgcatatttggcatgaacttcatactcataaatcaactataagtcgttctcttttcttccatactttattataattatagtggtattactctttttgctcagtgctcttagctttcctcttctttttccatatattcccagccaagagactcatgttggaaagctcactttccaaaaacaagcttaaacaattattatggtatctaattccagaagcatatgatgta

SEQ ID NO: 13463 - DNA, 571 bp, Arabidopsis thaliana columbia
cacatatatacacttgtaacgaaacaacactttctattgataagtggtattttcatctacacatcatctctatcggactgagtacattttgcctgacccgactgatgaatttttatcaacaatatgtacaatacacgagggtaaaaaaaacgtatccagaaacactatcagaggaaaagctcttgcggtagtgacgtgggacaaagcttctttgctgcaaacttgtactggcaggagaagaaaagagagtaaacacttgcaagtattttgatatgaagctattaataataaagaaagtggaaggctcgttactttgtgttgactgtacttctttctgattgcaaccacatcagatgagagtttctcattacacagctgaagaagattcttaacgcatgcttccatatgtttagccctgtacgatgtgtaatgctctagcgtacgattctgcaaaacccgaaatcagcaggttttaatagaacgcagagttgaataaagctaacaactgaagaaaataggaatgaaatacagtcttgtggtcatcccatggttttcttgaagggtgtagagt

SEQ ID NO: 13464 - DNA, 508 bp, Arabidopsis thaliana
tagtaacgtccgccagtgtgctctaaaggaactgcgttttgagagtgaagttcatgatgtcgctgaacagctctccggcggggccgcctgccctttccatccgagcaatcacgtccggggtgcaaacggtctggttggtgagatcgaggcccatcatcactaatggaacgccggagtgaacactacgcgtgcggcttccgggtcggcaaagatgttgaactcggcagatggcgtgaagttgcctgtaccgtaagcgccgcccattagcacaatttcacggattttgggcaggatcgcgggttgcatacgcattgccaccgcgatatttgaaagcggaccaaccggcaccagagtgatatcgccatcgcttgccatcagggtatcaatgatatatttcaccgcatgagtgctttctgcctggcgggtcagcggctcgaataccgggccatccagtccggtttcaccgtgaatattatcggcaacgatttgttgacgcataatgggctgc

SEQ ID NO: 13465 - DNA, 642 bp, Arabidopsis thaliana
gagctccagcaagcaatgacataaagatcgttccaggtatcataaatgtctgcataaagatatacgtcgaacagtaacctaaaatgaaccgtgcttggtactcacttgcataagacccaagattctctctgcacatattcatcatatcaatatatcatcatcatatagtaagtccaagcatatcacattcaactgaaaacgcaactttcaaatcaagtcttaatgctaatgcatgtacttattttgaaattcaagtaacactactaaaagctaaacactttcagtttctacatttgcataaattcaattctcaatctataataccaaacaacaagctaatcacatacaaacaaactgagaatgctgattctagaatcatgtctttaagctaattttctgctctctaaagtctaaaccaatttatcggaatcttcgaaagattcaaactttcaatatgggtttttgaattagaattcagattcaacagatcactattaaaaagctaaacactttcaattcctacattagcttaaactcaattttttcaatcaatagaacaaacgaacaagcttatcacaaacagaaaattttgatcaattttggaaagattgaacttcaatttgggttaagattaagagatac

SEQ ID NO: 13466 - DNA, 602 bp, Arabidopsis thaliana columbia
tattgttattggacgatttatgaagtgaggtggatctaaataagatcagtgttccacttataacacaagaaaatggatgaaaagtattgttgaccactcggcaagaggaagtttgtaaaaaaactgaaggtaaatgatgatatggaacttagttgtttggcaccagaagatgcatggaaattgtttcaaagaaacgttgggagaagtcgcactcagaagtcatccacatattcccaaacttacaagaaaaattagtcaaaaatgttgttgcttgcaacttgctcttaatgttattggcacggtgatatcatataaaaagacgatagaagaatggggtcgaggaatcgaagttttaagttcagtttccaagtacgtaagataagattcttcatattctgaagttttgtatgataatttgaacgatgaaagagtataatcgtgcttcctatattgctctctatttttgggagattacgaaataaggaaagatgagttgatagattttagatatgtgaaagatttatagaggatacgatgatggagctgataaacaagccatgatataattagttcattagttcatgcacatttattgatggatt

SEQ ID NO: 13467 - DNA, 581 bp, Arabidopsis thaliana columbia
aaaggtagcagagagaaacactagagggtgtggtgagattactgccattgctagtgcataagaaatgcacagacatgtccctatataaaaaaaccatatcgtaaacaactgaccgagtggtatgagacaaaaggtgtagaatacagcgcacagtaaaccaacggtgttggaaatccaaagaaggatgaagaatgtctgtttcatcaccacagaacccgcattcgcattcgcattctcagattggtgtacacctccgggaggctggagggccatctgataagtggctgttattatcaaagtgcatacaatcagaaatgctccgcgatcttgatctgaagtggaagacttcatgcgtttcatggacgtggaatagtatgtcataaaattgattggtgatttcacaaatcagactcttccttgaattttggcatagaagccgcctctacacaccgcagtttttataacagcttgttccaaatctaggtcccaccacctgcgttctcccctgggtccttaagatatcacgaatgttaaatcacaatataactaggtcggctccacaccggcatttagtatagttc

SEQ ID NO: 13468 - DNA, 573 bp, Arabidopsis thaliana columbia
  unsure (1)..(573): unsure at all n locations
cagcttatgcaagtcatgtacagttattagaattcatccaattgacttggctacattgtatatgaatgaagtcaactgcatttgaaataaataaatcttattagcattaaagaactcaaaacttaaaagtcagagcttacgaaaaacaaagtcaaagtcaaaaaacatatgaagaaaagaaaaaggtcgtttacctgagaaacaacaacgtgcctcacaccactgtccaagcctacgtccccgtggccgtggctgtggccgtgtccatgaccggaaacaccacttctcttagagagagcctcaaaaccttcggcacccatggagaggctatgacggtgatgctccgcgtgagcncgcatccccacgatatgcaacgccctccatcttcttgatctctcagaaaacccgattcaagacctgggtcagacataaccgaaacttgcgtaccaagcgactcgacggactggttcatcatcttctcctgtttcctctcgtagtatcccgtgatcatgaaatccgcgagcagagtaagaagcgccggancatggcgaagaattctggaaaagggaacat

SEQ ID NO: 13469 - DNA, 756 bp, Arabidopsis thaliana
tttaattggtggagagagtgagagagcttcgcaggaactgagtcatcggaatttacggatcgtttctgtttcgtgtaagctccgtcattttcccttcttagtttaatgaatagctttgagaatcttgagttcattgctcttagtttaatgaagatgcgattgatttagtttggcagattttggtgattgtggtaacgaaataattctgaatgaaccaaattcacattgtatttttctaatgatatatggatttgggtatttgctgcagttttactggaattggttaagtgatcttgattaaagatgatgcctgtgtacatggatccatcacaaccatgtcaaatgagaccacaggaatactattatcaaggatttggtaataactctcagcatatggcaatggatgctccaccaccgtgtcatggaagctgcgttcacggcaactttcctgcttactggcctccttgttatcccccacaagtaccgtaccatcaatgctgcatgaatcgttccgctttccatcctcctcacgcgtcttacgctccgtcttgttacgttcatccaccatttccagttggttatcaaccttggtttgatgttgagaaggatgtgcctgggaagcatcactgcgggaaatgttcttcccagatgtgtgatttgaagaaagacagaggcgttgtgattgaagagcatgagcctgagattgagaaaggagaagctgtacttccagttcgttctactaactgcccttaccca

SEQ ID NO: 13470 - DNA, 520 bp, Arabidopsis thaliana columbia
tgttgagtttcatatacataatctgctttgttacttttcggctgtgatcgaagccatcgagaccgcgggtgagatttcgggtcttgacccttctgagatggagaggaggagagttgtgttttcaagaaagtatgatagggagtggaatgatcccaagctgtttcagtggaggtttgggaaacagtatttggtaccgagggatatttgcttacggttcgagcattcgtggagagaagataggtggaatctcgttgaggcattgcaagagaagaggaagtccaagagcgatgagattggcaagactgagaagcgtttagctgattttctgttgaagaaactaacgggactagaacagtttaatggtaagctcttccccagttcgatacttgttggttctaaggattaccaagtgaggaggagattaggtggtggtggtcagtacaaggagattcaatggttaggggatagttttgtgttgagacattttttcggtgatcttgagccgttgaatgcagagatt

SEQ ID NO: 13471 - DNA, 566 bp, Arabidopsis thaliana columbia
ctcatgcctctgtctccgtcaacaccagaatcatcatccataagatgttgagcttcttctttgatatctttctcccgtttctcctccctttctttggctgttgctcttttggcatgcaactccttaacaattgctgccaactctgaacctaaccccaacatctcctcctcaatttgattcctctcttcctggtctcttcccctagccaaacgggtgcaccacacaactttaagacggttttgcaacagaaatttaacaaggctgaacttttcaaactgaaggtgctcaagcagcttgatctcaacatccctatcattaccctcagcaagtatcttaagcagctcttctgcgagttcctggcactcctgtgcatcaatcttctgctcatattcttgagatatctttctctgaagccaataagcatcaatatccagaacattaagactcgtatcctcctttgcctgtcttgcatcctcgccgtttattgcacacccacctggacaactcagttttgttaagctaacaacatcttcatcctctcatcttttcatcctggacatatcaag

SEQ ID NO: 13472 - DNA, 116 bp, Arabidopsis thaliana columbia
gggatgagcgtcgtgtcaatgtcaatggtggcgcgatcgactcggtcacccgataggcgcgtccggttgccgaatcctggtttctctggttcatgaaatggtgaaacgtaatgccc

SEQ ID NO: 13473 - DNA, 429 bp, Arabidopsis thaliana columbia
tgaatttaacaatgatgaagaaaactaacattattttgagtctaaaaacacttttgggagtattttcttgttttcatttaaattttcaaattttgtgtatcttcttatcttcagagctctgacgactcaataattatttttcccattctcttcactatctctctccctagaaaattgccagaagaagaaggttctccaattcaaaaaaatagaaactcgctaccattcatttcaaaaaatttcttgttaagttacgtttttttctttttttttgcttctttcgttcttattgtcttagaagacaaaagagactagagaggatagaaaaatggaagcttcaagcacaagaagcgagaagaagaagaagaagaagacgatacagagagaaaacaccgatactcaaaagaaaaaaaagctacccagtgtttg

SEQ ID NO: 13474 - DNA, 493 bp, Arabidopsis thaliana columbia
ctaaatagacaaaaaaggaaataaaagtgaatgttcaaagttcaaactccaaagacaaacaaaaaaactaaaaaaggaaaaaagagaggtgccagtcgttgtcacatagtcaacaactgccatatgtgtgctttgaattgtgtggcaaacatatcttccgtgtaagaatggaatgacacaactcacgtgtctcaaccataccaaaatctccaatagagttataaagactccattctcaatataaatcacacacaccaatcttatcataactcaccaaccaatcaactaaccatggattccgagatcgccgtcgactgctctccattgctcaaaatctacaagagtggccgcatcgagcgactcatgggtgaagccacgtcccaccttcttccgaaccacaaaaccggagtcgtttccaaggacgttgtttattctgccgacaacaacctatccgtcagtatttacctcccggagaaagctgcgccgagaccga

SEQ ID NO: 13475 - DNA, 554 bp, Arabidopsis thaliana columbia
caactaattaatcccggctctttaagaagtggttaattcctatttgatccgacctagaatttcagacacagatctcatcctaggacgcatatctggatccatttccgtgcagtttaaagcgacatggatggttgcaataacctgcttattcgcaaaatcctgtttcagaagctttgggtctaagatctcagccaaagatctctcttccttgtgccacttcctcaaaacattcacgagttcttcttctccttcgttttcagaggaaccataaggtaatcgaccagtcaacagctccaatagaatcacaccaaaagaataaacatcgcatttgtgagataatttgcaatcagaagaagctcgggcttcgggtgcaaggtaagcagctgcaggagctgagactgagagtcttgtggcaaatccttggtctatactttgcgtcatggatgatagtgaatggtcagtgactttgggatagccggaaaccagtcgtgtgagaccaatcgtgagacgtgaggatgcagctcattatctaacaggattttgcttgattttag

SEQ ID NO: 13476 - DNA, 505 bp, Arabidopsis thaliana columbia
cagaatattcatgttccctaaaacctcaaacaagacaatgtagtatttatcccatttaccaattgtatttcagactcatattagacacttcagattccgaacaaagctcactagcaacagaaacatcatcttagctaacaagcttgccaaaagcatacaatgggagtccatattctgtcgtaagaagactgcataccaaagtaaagagagacttcataactactccaaaggcttactacacagctaaaatctatcatattatataagtcggttagaaacgagccatgctatagaacaagttctctgagctgtagttagtggtttcagtttttacctctttcttcattgtacttgcttcatccttatctgtctctacgtcttcatccatgaacaacctctgaagaagctctgctgtcattaccccatcctcacggaccccaagcgatgccttttaaaccataaacatgaactgtgtcaaaatcaaaactacatgagcacatgagaa

SEQ ID NO: 13477 - DNA, 611 bp, Arabidopsis thaliana columbia
gtttttcagtgagtttgaagcaaacaatacagaggttactattaacgatttggaacctaaggtttttaaggtacatcattgatcattggtggttattctttagttatttctgttagtttagatcgtgcttgtattaatgctctgttccatccaggctttgctacaattcatgtacaaagattctcttccggaagatgtggagcctgcaacagctcatacatttgagcgcttaaagctgtcagaaatatacgaaacattgattgtaaaagttttagcagcagccgacaagtacgacctgattaggctcaggttgttgtgtgaacccacatctgcaaaggcgtatcagtcaaatccgtcgcgaagatcttagcgttggctgacagatataatgctaaggaactaaaaggcgtttgccttaagtttactgccgagaacctagcaggtatgcttctacattgcatttttaaaacaatgttttaatatcatacgctaggccattaaagtgtatgatggtctccatagaactattggatctctcttgtatttgatttggtgtggcttggatattcagctgtctggagcagacgcttacacagatgaagataatgtgt

SEQ ID NO: 13478 - DNA, 450 bp, Arabidopsis thaliana columbia
attttcgtagcctaagggatgcgatatccggacaaatcctcgtgctacgtaaatgccttggggaacaacaagatggatcagatgggaaaagagttgggattataagccggcttaagtacgttgatcaacatttaagacaacaaagaggttttatgcaacctcaagcttggagacctcaacgcggtctacctgaaaactctgttttgattctccgtgcttggctctttgagcattttcttcacccgtaagtctcccttgaatcttatctccacacattttcttcataaatagtgatgattactgtttgaaaacatgaatagttacccaaaggattctgataagatcatgctagcaagacaaacgggcttgagccgcggtcaggtaaggaatgctttatttgaagattgtttctctctcttcatagtatagtgtatttattgattgatgtgt

SEQ ID NO: 13479 - DNA, 319 bp, Arabidopsis thaliana columbia
gtaaactcacagaatgccagtcattatgttaacatatgaatgaactatggttaccttctcttatcttatgtgcaattgtagcacttccggacaaccttaagatgcctgaagtactgggctaagaagcgtggggtgtattcaaatgtaagatcatagctttctgaaattcgtatttattgaaaactttcatgtctaagctcttgtcatatttctcatattgggcaggtgactggatttcttggcggtgtaaacttgggtacttttggttgcacgagtctgccagctctatccaaatgcaattcctagtatgctggtttct

SEQ ID NO: 13480 - DNA, 394 bp, Arabidopsis thaliana
gtgattccatagtaaagcacagacctctctggatcatcttatagctccaaacttcagaagggaaagaaaaagaaggccgttaagaaaaaaggcgatctctaccgcacttatggaacaagagttattccagtgtgagttgattaattataaccagctgatcggattattcattacactggccaagttgtatccatagatgtaagtgtgaattacactttgaacctaaacagcaactgatacaaatctttgataatatataggtttatactctcactagccgatgtagatccaatgctcatgatggaagatgagagcctcagtgtgggcgagcagtgatgttgtcattgtgcttcagcatctaaatgagaaaatacctttgaggtgagcaaaacac

SEQ ID NO: 13481 - DNA, 434 bp, Arabidopsis thaliana columbia
cacaaagttgtaggtgatgtaaccaagaacatttacaataaatactttctcgctgaaaagagcctttaagtcttttccaaataggacaaccaggttcttggatctgccccaaaaagaagtatattagtatatatagttgtcttttacatagacagtaacaaagaagagaggatagcgaaactcacttgggggttttggttttaatttgtgaagcttctgcatctgtaggagcaaccgtttcaatagatgtagagggtttcttagaatccttatcagcaaaacctatacgcaaagaagagggacattttagtcagaaattggcgaaacatccagaagggattatgcaatgttgattaaaaagtatctagtatcacgttttagctgctgcggtggtttgatacagaatgacaaaatgacgaagacagccattgcga

SEQ ID NO: 13482 - DNA, 895 bp, Arabidopsis thaliana
tcaacgattggtttcatagccaggtgatcagtcacgtcttcaacactgacaaagagcctaacaagccgtgattgccacttatcctcctccaagccttgtgttctgtttctcggtagagcatttacaatcaacggaggttttgttgcgtctcttatcttcctcaaaatatcctcaggaaccttccatatcgtaaaaacaacacaatgtaattagtgaaacaacaactagaaatagaatcatgtacatttatgaatcttaaagaaacagaacgtaccgcaaaagctgaccggagagttctatcgtcgaaacccaataaaaggtctctaacactcgagtaggctccaagacatggatcgtttaaacacttccccacattaaagattgcgtaaaccctaagtttctcgtttctatcgatgattaataagaaacgttgatctgtgttgcgatggatgaattacagcttggacgcggagggagatcgtatacggctggtagatgtgaagattcatcactgatgaggagcaagaagagtgaaggcactgcgtcatttgctgtttttactgtgctaatggctggctttgcgggacatttttggtacagaggaaaaggttaatttttcgtttacaaaattagaagatcacggttgctgtttgtatcttcttcctctcacaatcctttgttttatatatacacatatatgccagctactctagaacgcttagccctctccagagctattgatgaaaagagtaaaaagattcgtcttcttaaacgagaagtggaggcgatcgaactaaaggtaagaacactcttcgtttactagcccattagtaattctcctttgaaactgtacattttagcttttgggtaacacaaatctttgacgatgaagaca

SEQ ID NO: 13483 - DNA, 1052 bp, Arabidopsis thaliana
tagtaacgtgcggaggatccccctagctcacacgctgcgttcttggtcaaaccaacgatcgcatgtttcgaggctgtgtaagcgtgtggtcccattccacccatcacaccggctacactcgccgtggagattatgcagcctttgaatcctctcttgatcatagcgcgtgccccgtgtttcatgccgagtcctacgccacgtacgttcacacgcatcacgtggtcaaactcgtccgcgtcgaagtctaatatgcttttgtgtttcttctgatctccgagaactcccgcgttgttgaatagaatgtcaagcctaccgtaccgtgcaacggttacgttcacaaggttttccacgtcggcttctacggagacatcgcagctaatgaatgccaccatcggggaggttttgtgggatgagagtgacttagccagggaagagccagctacgttgtccacgtcagcaatcaccactgtggcaccgtgtctagcgaataacatgacggttgctttgcctattccatgtgcgcctccggttatgatggctacttttccttccaacctatatacggtgtaaacactattattataggtcgtatactttttgagaattaaccaacactatagtatataagtgacatggactatagttcattcttgttaattaatttcaagttcgtgggacaaacaatgtacctcttaggatataaagttgtattcgtctcctccataatggtgtcgtggacggagtgaaaggtggtctgctcagcgatcacttgggcaggcatggcagatttttttgtgagagaagtacagatggaaagaagtgatgagagggagcttttgaagcttaaagtggaattgaatagtagatacacacatccctgagtctatttatatacacattggtagagaggtgaagttccgaagaccagtgggaaacatccaattatgctcaagttttggaatcattctagataaataatttagtatgtacaaaaagctaaatggtagaagaaagacaaagaaaatgagtattttaatatgtagaagctttag

SEQ ID NO: 13484 - DNA, 590 bp, Arabidopsis thaliana columbia
gatatataataaaatattttcatgtttaaaaatctaaatatagttgaatggactctttaacaagaaagtaaatattggcgtctataaggtcaagagatgtggcgtaatgactacttttgagcaaatcagtggacaaattaagactttccaatctttcattggtcaagtctaaatataaatgattggatttctaagtttcatttcctgtttttaggctcactcgtggactttttttaatttctttcctttgccatatttataaaataaaagagagagaaagaattttcaataattttcaacaagcaaagttcatgatggggaataagcgaaatctcggatttgtgatcttcttctgggctctggtggttgcagtagtagccacggccatcgagcatcgtcgcaatgagaggactaaaggcgtcaatggtcttgacaagatcatcatccgcgaccgtcgtggccgatctgctgaggtactcactcttacggtttggtttagatctattgattgtgtcatttacatcaaaaaacttggcttcaaaacatcttttggatattgcatgatgcagattttgtttctttgtttattc

SEQ ID NO: 13485 - DNA, 476 bp, Arabidopsis thaliana
gtaacggccgcagtccgccagtgtgctctaaaggctgatcaagtatggatgctctaatgattaatctttttttgtttgataaatattaataaactaacgaattatatagtcaaattttgtaaccaaatgaatttgaataaaagaatctgatgtttcttttttgtgctgagaatccgatgttttttgtgaaacaaaatttctgtatcacattttattacgtaaacattttaaaaagacacacaaacacaagtacacaacgtatacaaattccaacaaaatcagaaatacgaaaacgacataacatacataataacacatggacctgagtcatcgatctcatagtgaactctcaacatgcgagtctggaattccatgcgagtctctctatccaatttaagcaacattctctatcacgtcttgaataaacttttgcaaagccgtcttggaagatcaccgtccatcaatcgcacgtgaca

SEQ ID NO: 13486 - DNA, 544 bp, Arabidopsis thaliana
tagtaacgtccgccagtgtgctctaaagccgtgcggccacattttacatttctcttgccttcgaagctggcttgaaagacagcagaattgtcccacatgtagacgaccggtcattgcgcctccacgtaaccaaggacctgctggggtcaatatgggacaaggaaacggtggtgctggtcagcagcagaatatgcctcccggaaatcagccagtcaaccaaaaccccccagcagatggccttcctagggctcgaatttaccaattcggtccatttaggatcggatttggcgcgggaagaggggatctcttcaacaatctgcatcaacagattcatcagggcaacggtccttggcagccaggtatgaatcctaaccctgctggcgccagacaaattggctttgggttcggcttcggacggcctccgctgcaacaagcgcctgcaccggctgcaccagctgcaacccagccggtcccgacgcccacttcgaacctgcccaacctgcaaaaccaactcctgcagatggagcaacaaattgcgaacgag

SEQ ID NO: 13487 - DNA, 1067 bp, Arabidopsis thaliana
actctagaggatcgattgtactataaatttttgaccaactttttatttcatctttgtttgttatagggaccaaattacaaacaccatgtggtttttgatgcgtttcgtccagacaaagattttatagatggtacatgtactggtatgcatcctaatgtatgtagatggactgcaaaagaagaaggagtctatgtccgcaacaaaaagttcgaaggagaatatttcatgtatacatgggatggtccatcaaaacttggaaacatctctccagtgtctgcacctacaagtgaatcagaattggactcatcagtctaaccccacatagatctaaaaaaaattatatcatgatgtataatctttggtatcaataattgtatgttggtttcaattacaagcccaactattgtttgggcctaatatttatatatgggccttagtcaaagattaaaaaaaaaacatttcttcttcccaaagccagaaaatatcagtacaagagtacaagagagaaagaaaggaacctcgaactcagagaaattgagagaagagagaagaatcatgggacaaggaccatcgggaggattgaatcggcaaggagatcggaaacctgatggtggagataagaaagagaagaagtttgagccggcggcaccaccggctcgtgtagggaggaagcaaaggaagcagaaagggccagaggcggcggcgagacttccgacggtgactccgtctactaagtgtaagctccggttactgaaattggaacggatcaaggattatttgttgatggaggaagagtttgtggcgaatcaagagaggttgaaacctcaggaagagaaagctgaggaagatagatctaaggttgatgatcttcgtggtacacctatgagtgttgggaatttggaagagttgattgatgagaatcacgctattgtttcttcttctgttggacctgagtactacgttgggattttgtccttcgttgataaagatcagcttgaacctggatgttcgattttgatgcataataaggtatgtgaaattagggtttaagaatcttgtttttgttg

SEQ ID NO: 13488 - DNA, 644 bp, Arabidopsis thaliana
atcttcatacagctcgggatgtgttaaaggtaactcaacagcttccttaatctcctgaatctgagcttctaaacctccaatgtcagcatatgactccaaaggagccttctccactttcatcacagacaccattggatccacttcatcttgaagaatcccaacaacagagagtacctatcacaaaaataataaaaaatatcacatagaagaattggttcaacgtttccatggaagagcattgtaaaactcaataccttgttatgcatcaaaatagagcagccaggttcaagctgatccttatcaacgaaagacaaaatgccaacgtagtactcaggaccaaccgaagaagaaacaatggcgtgattctcatcaataagctcttcaagattgccaacactcataggtgtaccacgaagatcatcaactttagatctatcttcctcagctttctcttcctgaggtttcaatctctcctgattcgctacgaactcttcctccataagcaaatagtccttgattcgctccaatttcagcaatcgaagcttacatttagtagaaggagtcaccgtcggcaatctcgccgccgcttcaggtcctttctgcttccgttgcttcctccctacacgagcaggtggtgcggctgg

SEQ ID NO: 13489 - DNA, 640 bp, Arabidopsis thaliana columbia
  unsure (1)..(640): unsure at all n locations
tttggtactgcaaagcctccatttgaacagcagctttctcggcttgaagcctcgtgatcatagccatcgcttcgttggctgcaacagctgaagcacttctctcttcatctaactccatatataaatcaatgagtgacttcttgtccaagcgaacctctttcttgagctgattaagaatggattcaccggttggatctgtcgtgtccgaagcattctctgtcttattcaaaacggatttcttaagagatcgaacggaccatcgtggactgttttgcgccgaatcagacagagggatcccaaaaaacttgttacctcctcttacaaaacttggtgttcggtccacatccatatccttaaactcagattcgttttcagacagtttgttgtgcgataccctaggagaaggagcaggagcaaggaaagaattgttgttcttcggtaacttctcagattttatcttcaataattctccacaacacgaacaatgttgcttcaagctatcatttttaatgttgttagtcttgtaatccacagattttttgttgtctggactaaattgtcgtcttcttgaacgcaagggaaggcncgttcatcgcaatgagaactcgagactttatgtagatgcaatgagagcttatag

SEQ ID NO: 13490 - DNA, 416 bp, Arabidopsis thaliana columbia
gactaaacttcttgatatcttggaagagtatctacaatggagaaggcttgtatacagaagaattgatgggactaccagcctagaagatcgggaatcagctattgtggacttcaatgatcctgatacggattgctttatcttcttgcttagtatacgtgcagctggacggggtctcaaccttcagactgctgacacagttgttatatatgatcctgatccaaatcccaagaatgaggaacaagcagttgccagagcccatcgtatagggcagacaagggaagtaaaagtgatttatatggaggcagttgttgaaaaactctccagccatcaaaaggaggacgagcttagaagtggtggttcagtagacctagaggatgacatggctgggaaggaccgatatataggatctatagagg

SEQ ID NO: 13491 - DNA, 665 bp, Arabidopsis thaliana
tcacctccggtgcaacatatgcaggggtcccgcatgtagtatgcagcaacccgtcttgccttctagagtcagaaagagcgctgagaccaaaatcagagatcttaagattcccatgctcatccaacaagagattctccggcttcaggtccctgtggcatactccacggctgtgacagaagtcaacagcgcgtacaagctgctgaaagtactttctcgcaacgtcttctctcagcttcccagttgacactttgttgaagagctcaccacccttaacatgttccatgacgaagtagattttagatttggtggccatgacttcatggagctcaacgatgttgggatgcctcaagagtctcatggcagagatctctcgcttaatctgctcggtcatgccaactttgaggattctttctttgtcgatgaccttaatcgctacactatcaccagttttcaaatgcctagcatggtataccttagcaaaggtaccttgaccgagaaacttcccaacctcataacggagcatcaacacagatcctttcttctccattgactaactggttagcttagagcactactaataccactaaataaaaagaccaccctagaatatactaaaacgcagacaacataaagggtagaggaggactcaggaggaggctgttagt

SEQ ID NO: 13492 - DNA, 476 bp, Arabidopsis thaliana columbia
cttccataccggagtaataataacaaactcttcactacttcaaccaccgtacgattcagcttaaacgagattcctcctttccatggcttggattcatctgtagacatcggagcgattttcaccagagctgaatctcttctctatacaatagctgacgccgccgttgttggtgctgattccgtcgtaactactgattcatccgccgtgcagaagagtggtggttggtttggttttatctccgatgctatggaattggttcttaaggtgagttttaagctgctaatttcgatctctgtgtgtagaattctggaaattgtatttgtagcttaagttttttggtttggatttttagattctgaaggatggactatcagcggttcatgtaccttatgcttatggatttgcgattatcttgcgtacgattatcgtcaaagcagcgacgtatcctatgactacgcaacaggttagtgagtgtg

SEQ ID NO: 13493 - DNA, 558 bp, Arabidopsis thaliana columbia
cttgagaacaattcagagttcttaaatctccagatgacaatcaaaaacctgaggccaacctgtgggttttgttcatacctcgttcagaccgataaagatttcaagaaacaacacaacgtacgagaaatgtttaatcaatccagctctgtctcgttaatctacgtagttgaaatcgccaaaacaccacaaaacgtagacgtcacttggtctaaaaccacctcctcacattctttaaccatcaaaatcgagaacgtcaaagacgagcaacagaatcatcatcaaccggtgaagatagatctttcaggttcttcgttttgggccaaaaagggtctcaagagcttagaagctaacggaactagagtcgacgtatactgggattttcgtcaagccaaattctcgaacttccctgaaccttcctctggcttctacgtctctctcgtatcccaaaacgcaaccgttttaacgatcggggatttaaggaacgaagctttaaagaggacgaagaagaaccttcagctacagaagctgccttggtctcaagcaagacacgtcacggga

SEQ ID NO: 13494 - DNA, 607 bp, Arabidopsis thaliana columbia
tctgagctttctgtttgccggcgagaggcatgtcgaagaaactttccatcaaacggtgagcatccgctattagtgactcgctgacgccatgattgacgacgaggaagaagccgtgtttggtgcaagcttctgcgatgactctaggagcttcaagagtcgagtcttggcttgagagatcgatgaacgggacgttgagctctggaatgtcaatggaaggtttctcttcgtctggccaaatgaattggtttgggatttgggattggaggttaagaagagaagggttaaagattagtggagaagtttggtctttttcaagatcttgttttggttcgtgttctttctctgccggagatgttgttgtgcatagtatcgccatttcttttcttttttttttcttgagagttttggggtttttgttttgtcttgttctgagtgagtgttgttgaggagatgggggacaaagggtcctttaagtctttatataagcaagcttcaagtcatgttagtgtacatttgtttggttttttaactttcttataataatttctcttttttttgcccatgggattcatactaactctttataggtgaattaatagtgcaaaat

SEQ ID NO: 13495 - DNA, 908 bp, Arabidopsis thaliana
caatgaagacaagcggtcaggaccagtctctgaaagaaactgggggattttgtttccaaatgggacctcggtttaccctctgagtttgagtggtggctctagctccgcagctctaaacggttcatcgatgttctgcgtggctaaagcagatgctgatgatgataagttggttgacggtttgaattgggcgtgtggtcaaggccgagctaactgcgctgccattcaaccgggccaaccttgctacctccctaacgatgttaagagccatgcttcttttgctttcaatgactattaccagaagatgaaaagtgcaggtggaacttgtgactttgatggtacggctatcactacgactagagatcctagtaagtttttctcatttcctctgatctatgtgttgcaataattctatgttttcaagttgtttcctcagagtaaatctcaaattcgatggcttgtgtgtttgcaggctatagaacatgtgcatatacgggaaggtaacgatactaaatttatgtcttgttaagttttgaaaatgaaatctgctcctaactctttgaaatcattttccatttatctcagcttaaacgcaaacgctactaatggaaactttcctccggatgcgttaggacccgcaagtccattgggaggaaacgcaaacgcacgtatcatctttagctaccatcttcccatattggcaccgttagctctcactctactacaactgttgcttcagcatgaccgccttttgtagaacgtttgccataagagcggttttgtagtaaccggggaagtctacatgtggcttggatctggattcttacggttaccggtagttactgtgtactttgtgtttagtgtaagtgtactagagactaaagagggccacaagttccattctttttttt

SEQ ID NO: 13496 - DNA, 498 bp, Arabidopsis thaliana columbia
gtaaagagaaaccaaagtttaagacggaaacgaaacaaaagatgataatcatcgattcatcatcacgatataatatgggttgctaaccacaatagaaaaacaaaagttcttttaaggttttaataatatatcaccaaaaatgataattaaaacctaaaattaaaataatatatctacaagactacaacaattctgctttataataaagctataaacctcaacatttttcaacctcttcccaaaaaaaagtgtagaagcagaagaaacccatcatcatcatgatgaactcttctcttctaactccatcttcttcatcttcttcccatatccaaactccatcaacaactttcgaccacgaagacttcctcgatcaaatcttttcctcggccccgtggccctccgtcgtcgatgatgctcatcctcttccctccgatggcttccacggccacgatgtcgactcaaggaatcagccgatcatgatgatgcctttgaatgatg

SEQ ID NO: 13497 - DNA, 368 bp, Arabidopsis thaliana columbia
gtctcccacaacatgtacaagcacaaaaaaactcgttaaacattcatgaactgccactttgaaacatgcgagttacaagatatgtagataatatcttggaccacgtcaaatacgacatgcgcttttttgtcctataaatactaaactcaaatgcttcacaattcacaaacatcacatacatttctagaagtctcataacaggattagcataaccttttgtccgaaaatgaggctttccaagtctctcatcctgattaccattatcggctttggtcatttcctttgccgtagctaatgatccaagtccacttcaagactattatgtggacattggcgacctcaaaaatggtggcaagtacataactcga

SEQ ID NO: 13498 - DNA, 594 bp, Arabidopsis thaliana columbia
acaagtaattttgggtaaggaaacttctttcaaatcataaacaatatcaagaaggaggagacttgactaaacatgcacttaatatcagccactttagttgattgaatagagtttgtacatcttgaaattgaactaatatatagtaatacacaatgcaagactacttcactggtctaaatctacaaagagaaaaaaccctaataggtctaacttggtggaaaaaatgagatatgaatatcaaaagattaagtcatgcaacgctgttctgggaaccttgcaaatagcagaaagaaatagataaactctgaccttatctctgatgaaattcaagaccttttcacgaatttgatcatcagtagttggagtaccccagcatgggtaaataaggcagtcgatgatgctgtaacaaaagagggtgatagttagcaaaacactagggaatcgcagagtcaatagcgatatcatattgaaaatctaagataatttagcagactaccttttggatcttgtcgtaacaatgacatcagagccttatgcacagcatcacgctccacaggttcctcttcaaatcatgatacatccaaatcagatacg

SEQ ID NO: 13499 - DNA, 599 bp, Arabidopsis thaliana
ctcaatttcattcaggagatgtctaatcaagacgggttttttccggatcagtacacgtttaatacgttagttaatggtttgtgtaaagcagggcatgtgaagcatgctattgagattatggatgtgatgcttcaagaagggtatgatccagatgtgtatacttataactcggtgatttcgggtttgtgtaagcttggagaggtgaaagaagcagtggaggttcttgatcagatgattactagagattgttctccgaacacggttacttacaacactttgatcagcacgttatgtaaagagaatcaggtcgaggaagctacggagcttgcccgtgttctcaccagcaaagggatccttcctgacgtttgtacatttaactctttgatccaaggtttgtgtttgactaggaatcaccgggttgcgatggagttgtttgaagagatgaggagcaaaggatgtgagcctgacgagttcacttacaatatgctgattgatagcttatgctccaaagggaagctagatgaagctctgaacatgcttaaacaaatggaattgagtggttgtgcacggagtgtgataacttacaacactttgattga

SEQ ID NO: 13500 - DNA, 922 bp, Arabidopsis thaliana
tgttcgctcggtttgattacataatcatcggaggagggacttcgggttgcgcgttaccgcgacgctatctcaaaacgctagcgttttggttcttgaacgcggtggtgctccctacgacaatcctacggcaacagatatcgaaaactttgccaccacactctcaaacacatcaccgaaatcttggtcgcaactttttatctccgaggacggcgtttacaacactcgtgcacgcgtcctcggtggtggctccgtgttaaacgccgggttctacacacgtgcgggagatgagtacgtgaaggagactgagtggaagactgatgaagtggaagctgcttacgagtgggtcgagaagaaagtggcgtttcaaccgccggttctgggatggcaaacggcgtttaaagatgggcttttggaggctggtgagtttccttacaatggtttcacgtatgatcatatctatgggactaagatcggtggtacgatctttgaccgtgctggtcatagacacacggccgctgatttgttggaatatgctaatccgggcaacattgttgtctacttgcatgcctctgttcacaagatcctcttcaccaccaaaggtattgactattgagtcatctatacattggtctttttttattctgttttttggataataggagcaagcaagtccggattccggtttaggctcggtcagtttttctcggttttttggtgttatcggttttgtataagcggtcatctattattaggatggttatataaaccattttaaagattttatagatgaaattgacagtttgaaagttttttttttaagttgattaatattgtggtctcatgagatctatttttgtcatatatttaagtcatgttttattttgttttgtttggtttagactaaaatcgatttcagttcatc

SEQ ID NO: 13501 - DNA, 1667 bp, Arabidopsis thaliana
caacacactcttaaacaacacaccaaactcatggtcgcagcttttcatctccgaagacggcgtttacaacacgcggccacgtgtcctcggtggaggtcgctcgataaacggaggattctactcgcgtgcgggcaatgattacgtggaggaagctgagtgggagatggaagaagtggaagctgcttacgagtgggtcgagaagaaacttgtgttcgagccacaagtaatagaatggcaaaaggcgtttaaagatgggcttctggaggctggagagtctccggacaacggtttcacgtacgatcatatctacggcactaagatcggtggtacaatctttgaccgtgctggtcatagacataccgcggcgaatctgttagagtatgctaatcccaaccggattgttgtttacttgcatgcttctgttcacaaagtcctcttcaccaccgaaggtatttttgactactattcatatttgttttaggaaggttttggaaaacatgtaattattatattttgatttcctaatataatttttcttcgacagatttacaaaagtagttagaaaagctcccgaaatcagttgtagaaaatgttatgaccattatagagatgatagtttttcaaaaagttggaatacaacataaaaaatggtattttgtgctatctttttttttataaaatcgagctagcattattagtgtaaaatctaatgcattgactttttaaaaaggaatacttatttataacctcatgagctggtcattaggaattatggagtgagccactttcctaaatgacttttatatgtgttattttaattgtgtgtactttaaaagtttcttacttttctaattttttttttaaacttattagtttttcaattctacataagaaagtatattgacaaattcaattaatataattttgaagaatatagaaattaaaaatatatattttagtttcaattagtatatgatttttactttatgaatgattgtttgctaaaactacttgctgcaaaaatgaacattaaaaaaaaaaacaggtaactagaagccaaaagcgtatgaagtgctatttgaggatgcaaatggagtgttccacaaggcaaatctagcaaataaggcaacgaacgaagtgatcttgtcagctggagccctgggtagcccacaactattaatgttgagtggagtaggtcctgccgtccatcttgaggctcacggcgtgaacccactcgtcctagatcagcccatggttgggcaggggatggctgataatcccatgaactttgtagccattccttctcctcaaccagtagaactatccctcatacaagctgttgggatcacaaagtttgatagttacattgaaggtctaagtggcttgagtctctcttttgatataactcgtaggtttttcgatggtgttttgaatcttttaaacgaggtatataacataaatacatttaaaggttatttagttatgacttatgagattgtatgttgtctaactatgacgcattatgcagacaagtcatactacatctaggaaaatcctgacccaatccattgcagtccttttaaaatcttttgatgttaaattggaagtgaggatgaatgggggtttgatcttcaaaaagtcgatggaccgcctcaaaaggacatatg

SEQ ID NO: 13502 - DNA, 586 bp, Arabidopsis thaliana columbia
gattcaagtacctttatgaaaacgcaaaatcagtaactcacatcatagaagtttccctctttcccattcttatatcaaataattcacattaaaaacttgcaaacctaattcacatgctactagtaaagttcattattagcacaaagagaatcatctattcattgaaacataaagcataacatccaaatagctcgaaaactttgtaaacagaagaaaaagacagtaatgatcagcagtggtgttgagaatcaagctaacctgaggagttgagagagtcaaggcatcatgtttgctgaatataggatgcacaagtacaaagtaaatcctccagaagcaatactcgctcatgtacgcaggacaaagctcaatcctcaaagcagccagactcgatgcaagattctccacagccaacgcatgctcatattgggcatcagtcatttcaaagtctgatcataacagttgtaaaataccacttaacaacaacaccttcatataaaacaaaccctaaactctaaagtgatcagaaaaaactctcaaatacggaatatctaagtctagaccatagtagattccctcatcacataat

SEQ ID NO: 13503 - DNA, 515 bp, Arabidopsis thaliana columbia
  unsure (1)..(515): unsure at all n locations
nnnnnnnnnnnnnnnnnnnnnnctaaaggaatcttcggcgggaatgccgggcgcagtttcggttccatgttgacgcttcggcgcgtcatggattccgactctggcagatacagggagtggcacagccagttttcatcatcacgatccgggaagtcgaagcggctatgcgcgccacggctttcggtacggaagttggcagaaacagccgttgcatacgccgtttccatcaggttatccagttccaggcactcaacgcgctgggtgttgaactcgctggaagtgtcatccagacgggcatttttcagacgctcgcggatcactttcaactgctcaagccctttcgccatcgcatcaccttcacggaagaccgagaagttatgctgcatacattcttgcagcgctttacggatcgccaccggatcttcaccgttacgattattgttccagcggttcaggcgatccagagacgcttcaacatcagactcgctggcatcgcgcagtgcgcctgctcggcg

SEQ ID NO: 13504 - DNA, 516 bp, Arabidopsis thaliana columbia
tgatgttgtatagatattgaaagcggcgagaaaagcggccttagtatgggagagaagcagcaaacttctgttacggaaaggctactggaagagaaaaatctcactgttaattcagagcttgtagatgggcataccggtggtgtggtgaaggaagtaccagacaatcaaactattaaagaagctctagaaaaagtagatgatcttacgggaacaatagaacaaggtgaattttctttttttaactatgattgagttttgggatcctttattagttgttatggagagttatggtatgcttacccttgataacatttctgaatttctgtagatcttgaaaagggaggaaaaactgctgatatagtcatgattgaccaagagaaggatcttccacctgcttcaaaacttgtagatgggcagattacgtcacaagttgatgagagaggtgagggagaagattggctcaagtgctgtcgatatcttcagactgctgaagtggtgactaacgtggataccagt

SEQ ID NO: 13505 - DNA, 499 bp, Arabidopsis thaliana columbia
cgacgaaggagagaagcttgctttagggcttttccgatagagagagaggtagaggttattctgtaagtagtgtttcgtgtaatgggcccaaaggcgaaatattctaatatgggcttattggcctataagtttaatacagtggttttttcaaattaagcagtggaatgagttagtttacgaacaagtgagaggattacattgaagtaaaatgttgttttggagatgtgattaatttcaatccgaagtaggactataaataacaatggggctacgaacagagtgacgtgggctcttccacacgagcaagccggacacaatcttcccaggagtcatttgtttggccttcaccaccactttgaagcttctcttttgtgaagcctttgaaaatgacaaactctgtggctccaccgtgatttctactcctttcggtgctcggacggtggcggtgtagacgacgacggtggtccacgttggtgactctccgctgaacacagcaatg

SEQ ID NO: 13506 - DNA, 556 bp, Arabidopsis thaliana columbia
catgttcctcttcaagtataatgcaaatcgatataagaagagatagagaaactcaccttaagagcgttgacaagaccagctcgatcctcatctttaagagctgcaaacaaacaaaaaagcttctaaaactttgactaagaagaagcaaagccgcagaaacaaaatcggagatatagatttaccagaagtgagatcgctgacattgaaactgtccttatcgttgctcattttctggaaatttagagatcaaaactgaaagatttgagaagaaaaaggattgattgagagagagtgtgaagaaggtttgaaaagaggtggagagattgaggaagaagaagaagacttgagggttttttctgggtggcgactaaacgcaaaacgtggcttcctcctttataaaatttaaacctaacaactgccattcttttttttttaattccctcgctggcatttttatttactttttcattttttaaaatctaaaatatcccaatgcaaaatatgtgccgtttctgcaaaaagtgccaaacaccttgccgtttatcgccaaacaaag

SEQ ID NO: 13507 - DNA, 502 bp, Arabidopsis thaliana columbia
tcaagggcattttttgcagtgtttaccacttttccctcttgttcaagttccttgagcctgctctcaagtcctgttgtagcgaccattgtttggctttccatttgcgagcattgctgttcatacgcttttcttgttgtctccagctcttgccttaacgcagaaatctgaaggttgaactgatcattttctttcaatagcttgtccatatcctcctcttcatttttcttctgttcttcccactttgacttctctgtctatatcatacaggtaacgccatgttaagatgaattagtaataagtcagttcataaaacaactcgcggtataatgtaccaacctttgtttggctttcaatttgcgagtattgttgttcatattttcttttagttgtctccagttcttgcttcagcgcagaaatttcgaggttgtgctgatcattttgtttcattagcttaaccatatcttcctcttcgtgtttcttctttgcctcccacattgacttt

SEQ ID NO: 13508 - DNA, 438 bp, Arabidopsis thaliana columbia
tttgtcaaaataataagccgtgggtaaaagatcggttttcagtctcaggtcaaaatccctcataagccaacttgacgggacaatgtccccaagaaagaatctgacagaacactaatagttgagtgtctgcatatgatttctcttgggtttgaaaagaaaaacaaaacaatgaagaaatcaaacaaacaaaacagcaaaacaagagcaacaaaactacaaccgatcgcaacaataaagcggtacaaaaaaaacaaaacgaaaaccaaaacctaacacaaaaaggaagaaagcaacaatctttaattcacagaaactttgaaacgcagagtcgcgattcgtttggttttgcaaaacgaaaagagaactaaacaaaaacatgatgatagcagaatttagaaaccctagaaatcaagtggattagaagaatcttacagtggt

SEQ ID NO: 13509 - DNA, 496 bp, Arabidopsis thaliana columbia
cctctcaaggttcagattctacctgataaccaatcatcaccttcgtccacgcacatgctcactaagcccaagtcgaaaaaagcgacaaaatcgattgccatgctaatcgtcgcttccttggctatcacgttagggttattatttgttttcagttcaaattcagttatgttctctgcaagttttcttcggagaagttcacctcactacagcgtcattatcgatgccgggagttcggggacccgaattcatgtgttcgggtactggtttgagtctggaaaacccgttttcgatttcggagaagaacattacgctagtctgaagttgagtcctggtttgtcttcgtatgctgataatccggcaggagcgagcgtgtcagtgacaaagcttgtggaattcgcgaagggaagaatccccaaggggaagttgaagaagagtgacattaggttaatggcgactgctggaatgagattgcttgatgtgcctgtttcaagacaga

SEQ ID NO: 13510 - DNA, 592 bp, Arabidopsis thaliana columbia
ttcactgaggaatcgtcttctcctaatccttgaattgattccattacaggagaactcttgaaatcgttcatcttccaaaggttttataacataacgttaatttttaatatatgtagatatgtttgaaatgaacggtaggacaggaacagagtagtacccagctaggtgcagtggcattatcagacggtccatcccaaccaatgtgggcaacatgctttacgtccgttggatttcctatttgcatctcttcttccttttcaccttctattgcttcatatcaaaaattgacataaatcataaccttttcatgtacattcatctaaaacccatagaagcaatacaactacaatgtttggttctatctagtatccataaaatttgtagtgtttatgttactatttttaatataactccataaaatatgtggcgttttcttgaataacaacatgctagcttgaaagtgttttgtttgtttcatagtttgatagtttcacattcaagcatattatagtcatcatcgagttctaaaatattgaattggaaaagaaggagagaagaataaataaaaactcccaaaaacttgagatatgta

SEQ ID NO: 13511 - DNA, 474 bp, Arabidopsis thaliana
ttcacggccagtacttcatccggtcgacccggaaacttgacccgttaagtaaatgtatcggagtgagaattggatgaaatcgaaattcagatccagaaccttggcgaaatcacggaggcggtttccggtggcgattaacgacggttccggagattcaccgagagatggagcgggtatacccgagacccggatttgagtgggtttaccagaagtacgagtagctagagcttgaagaagagcaggccattgtataccttgaacgattccaaaatcgacgatgtgaatcttgttcgacttctccgtcgcttctagaatcgcttgattcgccgtcaaatgtgcgaatttggagtaaggacaagcgtcgtttagggttttataagataagattaaatcctccgtagatgaagaagaagacgacgtcgccggcgaattaggagacagtctgttggagagagcttccgtgaagtaaaatgc

SEQ ID NO: 13512 - DNA, 892 bp, Arabidopsis thaliana
agcaggagctgcaggaaggcccgctctctgaatacagcggcacgggctttggcgtcatgaaatggggtatcagcctgaaacagctggtggtgttgcagatgttcgtcggggtgtttattccgtggggacaaatggaaaccttcaccgccggtggactgctgctggcgctggtgattgccatcgtaaaactggtggtcggcgtcctggttatcgcgctgttcgaaaacagcatggcccgtctgcgtcttgatattactccgcgcattacctgggctgggtttggctttgcatttttagcgttcgtctccttgctggcggcgtgattaaagagagtttgagcatgtctgaagaaaaattaggtcaacattatctcgccgcgctgaatgaggcatttccgggcgtcgtgctggaccacgcctggcagaccaaagatcagctgactgtcaccgtaaaggtgaactacctgccggaagtggtggagtttctttactacaaacagggtggctggctgtcggtgctgtttggtaacgacgaacgcaaactgaatggtcattacgccgtttactacgtgctgtcgatggagaagggcactaagtgttggattacggttcgcgtcgaagttgacgccaacaaaccggaatatccgtccgtgacgccgcgcgttccggcggcggtgtggggcgagcgtgaagtgcgcgatatgtacggtttgattctggttggtctgctggatgaacgtcgtctggtgctgccggatgactggccggatgactcttttccgctgcgtaaagacagcatggattatcgtcagcgtccggcaccgaccaccgatgctgaaacctacgagttcatcaacgaactgggcgacaagaaaaacaacgtcgtgccgatt

SEQ ID NO: 13513 - DNA, 606 bp, Arabidopsis thaliana columbia
gtgctttcacttttttctcgtagccgtgtccgaacactttaagaatcggtagataatctcctggatggctcgcaccactgttgtcattgatgtccgtcactagtttcttgaatagattcgcttcttccttgttatgaacctttaaggaataaatatttaataaggttagtaaaaacttttaattacaagaatggtagaaagtgtataaaggttagtgaaaatgttgatattaagcgaattaattatataacgaacctggtctccgtagtagcgtctccctgtgaccatgcggacaatattattgaacgtcaaatctgcaagaagaggttcaagctcgacaacacggccgtcatattcacgtgagagttttgtgagcagccgacgaatctcgtctttacgtacggagaggaatctggtgagacggttagaggagaggatttctagagagcaaatacggcggagattacgccaatggtcaccgtaagcggcggttcctatagtggtgtaatcgtaagcgacgtatttcgcggtcagaaaatgcggtctgtttgttaaaatgacgtcgttttgaccggtgaaggatctcttacgagaggcaatgaagag

SEQ ID NO: 13514 - DNA, 632 bp, Arabidopsis thaliana columbia
tttcaaagcaaatctcctgcgagcgatgcgtcaccagaagatggatccttctgctcgtcacggcgtaacgcagttttcggatctgactcgttctgagtttcggagaaagcatttaggggttaaaggtgggtttaagcttcctaaagacgctaatcaagccccgattctccctactcagaatttccggagagtttgattggagagatcgcggcgcggttactcccgtgaaaaaccaggtaattcaatcatcaatgtgatgataatgatgtcatttggagaatatgaataataatggacttgaatgatcactgtttattagggatcttgtggttcttgctggagttttagcactacaggtgcccttgaaggtgctcacttcctcgctactggcaaactcgttagtctcagtgaacaacagctcgtcgattgtgatcacgaggtatgaatatatatgcgtctcctcttgcttgatggaagctctgtttgattgttcatacttacttgttaccaagaaatacgtagtttctgtggttacgatttgagttatgcacaatgtgccattactttagaagattcaagtcataactcagctgttattgcagtgtgatcagaagaggaaggtcatgtgatct

SEQ ID NO: 13515 - DNA, 591 bp, Arabidopsis thaliana
aaacaaacgaaacttagattcttcttgatagtcttcttcctgagcttcacttactacatagtcccaggctatcttttcccttccatctcatatctctcctttgtctgctggatatggacccgctctgtaaccgctcaacagatcggttcagggctgcacggtctcggcattggctcatttggtcttgattggtccacggttgcaggtttcttaggcagtcctttagctgtaccgttcttcgctatagccaattcctttggcggatttatcatcttcttctacatcatccttcctatcttctactggagcaacgcttacgaggcaaagaagtttcctttctatacctctcacccatttgatcacactggtcagcgttacaacaccactcgtatcctcaaccagaaaacattcaatattgatcttcctgcttacgaaagctatagcaagctttaccttagcattctgtttgctctgatctatgggctcagcttcggtacccttaccgcaaccatttctcatgtcgccctctttgacggaaagtaagattcttttttttttctttttttctctactctgcgtctcaaaatactg

SEQ ID NO: 13516 - DNA, 388 bp, Arabidopsis thaliana columbia
gaggatttcctggacttatattaatgttctctaaagtccgcttcaattgcttttagcgcatcacggcggccttttgatttggcaggtaaaaagtcttcgtaacagaaacggtcagatggtaaacccgctgcgcttaacgcagtgatagcagcacacggcccgggtagcggcaccacgcggctccctgcttcacggcaggtacgcaccacatggtagccaggcccgtccatccgcggcgtcccggcatctgaccccagcgccctgccttccccctctcgcagcttcgccagcagtgtttcaccttcctcttgttcgttatggtcgtgcagcgcaaacaacctggcattaatcgcaaaatgttgcagtaataaactggtgtgacgagtat

SEQ ID NO: 13517 - DNA, 825 bp, Arabidopsis thaliana
tcatccagaacaaaaggcccaaaaaacattgtcatttttctagtattctcacagctttcccttatctttccgagcatcatcatccatccgtccaacgtcgttgaatgtttgaccggtcatttgatccgacgccttcagtgaagtcgccaccttacccggctttgaatcctcgaccttgacttcaaccacagtcctacccgtccctccatgctcacgtgccgcgcgtgtttcctccacaatgtctgatggcattgtcagtttgctctttattgcttccgttacattccctaatgcaccaaaaatagtccctttcgcttcatttcccctgcatgatttaatcacatcaaaaaacaaaacaaagagtttcacagtcacctttaaacttgaagaacatgacaagatataactggcatttcatcatttacctcacggcagcagaatctttggtctcttcggctttttgagctcccgactcagtactctccctagtcttttgagatgcctcttgggcttttgctccagcttcttctttgagctctttaccttccaatctcatttcctccatcttttgtcttgttacttctccagctttctccatgttttcctatgttatcaaaacatcacattatatcaaaccatttgacatatgtaatcttcatttacatggaaacaaagttccaagaaattataccttggcagtatctttggtctccacagcttttcctttggcctcctctgtcttccccgacaagaaacccatagctctcttcgctgtctcaacggcactatccttcagctctcctagcttactcaccgtaacatctt

SEQ ID NO: 13518 - DNA, 573 bp, Arabidopsis thaliana columbia
gtaatgagtttggtgttttacctgaatcatagattccacgcgacgccgcatcctggtgtgcataaatccctctgagaactgtgatataacaacaaacgaacaaaaactcagttttacaaatccatactaagatagagagactaagttctggtatttagagaatatgaaagtagaaaacatgaaagttcgataaagaatatgaaccttgacgtgataactaacataagcatgaaaggtcgataaattccagacagtacgatcgagctttttcccttccacatgccgaggaaaaatgactgcgatatatcgataatctcaaagttagtttctttcagattggtactaccaatgcaaattgagttcgaacagaatatattttagaaagatcataccaaaagttacaaaaccggcattagcggatagtgtttctttaggagctccctctaattcctgcggtgcggttggagacaagaacaagaaggagcagtattaagcgccgagcacgcctcgcctctacaaattcctatatcattatatcaaagtttcagtactcagaaatcaaaacctgtttga

SEQ ID NO: 13519 - DNA, 541 bp, Arabidopsis thaliana columbia
ccaaaagtgttgacagtagcacgacgaatacctttcttatgagctttaagcatttcaagaagctcgaaacagattctcatccattctcttgctggaacaaactcggcaccacgatcagcaatcctaccaacaagatcgatacaattctcttgcactttctcatgcctattcttcaaaatcggggtcagccttggtagaagatccttaataggaggagtcatcttcgtcataccaatcacattgactatagcttttaaagccccaagaatcgatcccaagacttctgggtactcttctccaagatattcatacaaaacaacacctagatgtcccatcaactgttcctctccgcattgcttcataacaactgcaattcgagaaatcagatcagcagcttgctgtcttacctttgcactcttgttgttcaatcgccacttgatggtacacagatctggggaagataaggctttactcgctgaccaagagcatttactacagcaccgaatccattaagcatcacattagcatcgtcactagtctg

SEQ ID NO: 13520 - DNA, 579 bp, Arabidopsis thaliana columbia
  unsure (1)..(579): unsure at all n locations
gttatccacaaaaagtagtccgaatagacggttccatgcgccggggttgcgctcgaggtctgtggcgcgtgaaactacacgccagggaccgagctcgtaaaagttgccaatcattgaagagcagcctggcccaccttggagccaaacgaggagcggagtgtcaggaagaggtgtggttggctcttgggcttcgtagaaggcatagaacatggacgagccgggtgcgggtttaaccgggaggtagccagatttagtggggagagcttcatcgggaaatagcggtggctgaggagactcaacggagacggcgaggaggagagtggaaagcaatatgaagagtgtagtggcttgctccattatttccactaattggtgacgcctttacataaagatccctttgtattatttcatttatttcattatttgactgcaaaacattacgtttatgtnttgtcttgtataacatgtgaatttttaaatgtgtaacaataacatttttgtcaagacgtgcttgcttactaacctaattgcattaacatgtgagttttttaatttaaaggttttcgtttgtagatgatt

SEQ ID NO: 13521 - DNA, 478 bp, Arabidopsis thaliana columbia
ggattccagcggattgattctataggtaaggttgatagcaatgttaaaggaaataaattcatccaatggctagataatcttgttcattgatgaaatccacactattgttggggcaggtgacctttcattagtaaaacgttatttatttacgcgacattgcatcaccaatatagggctatggttaggatgtggaggctaataacattgacagatgttattaaccttgtgtaggagcttgtgagggtgatacaatggatgtgagcaacctcttgaaaccaatgattggaagagatgaactgaaatgcattggcgcgaactacgcttacgaaatacggtacatatatggagaaagatctagctctagaacgtaggtttcagaaatttatttgtcgtcatgcatttgttgaagataccatctcgattcttcgtggcttaagaaagcggtatgagttactaatacagtaaacttctctgatac

SEQ ID NO: 13522 - DNA, 495 bp, Arabidopsis thaliana columbia
tcatgcatgtaagattcccaagagatgaagggagatatccatcaagattgttctcagagagatccaagaccttaaggcttgtgagatttgatatgccttctgggattgaacctttgagggaattgtttctcaggctaagaacctctacagaagaagataactgggagattaaactcgcgactgttccagagattttgttgtcatggagatcaagacggatcagatatgaaagatttctgaagttctgaggaaattcgccgctgaaattgttctgactcattaagagcatactggtggatcctccaaagtaagctggaacatccccagagaactcgttcgaagatatatcgagcgactcaaggtatgactcggggcggaacctcgggaattcacctgataatcgattctttgacaagtccacaacttgagaaaggggatcttgtatagactttggactgacctgagaagttgtttcagacacatgagtacatgacc

SEQ ID NO: 13523 - DNA, 490 bp, Arabidopsis thaliana columbia
ccccccagataaagacagtaaattaaccaaaataagagacaccatacaaattaaagaaacattcacctgaactgatttccacaggacagtcctgcgctcttcaccaatcttcctccagtcctcaattgtaactggaacatgttcccttaccaaagaacctatgtatgatgatagcttcactgatcctggtccacatggttctccaaggtcagtgaagtcaactcgtattctagaattaggatccttggcgatgtctttcatctttgttggtcctctgcgtcttttcggctgttgttgtactagatctgcagcctggctagtctgggttcaccctctggttcatcctcttcttcaaccaaatgctcctgaccatcaacaatattagcactagattgagggatcgcaggctcaccaccatcatttgactccattggcttgtcctgctgatctgtttccatcgtctccacaggtggttcaattgtacccaagt

SEQ ID NO: 13524 - DNA, 564 bp, Arabidopsis thaliana columbia
tatcgagaagtatcggaagcgattcagaggagacgtaatgagccaaatacatagcagaagacaaactcaaaccaagactctccaaaaaggcaactttgccaccatcacccttttgtttcaccatataaatcactttctccttaaaccctaaaccctcctcaactctctcagattctccactccctttccacgaattccattcctccaaatccctaacaccctctacgatcattcgcgtgtatttaggacaatttgaagaaatgaaatctgaatcggcctctgagagtccagtgtctcgtcggagaaacccagcaattgaattctgcgcttcctgatttgtctgcgaagaattagagctaaaattcgaatctccgtgctgtaacgaggcggaaacagtgacgcggccactatggtaagctggaaacaaggttacgcgacgaggagagaagaagagagagctggaactaaagttacaggattttaaaggaggagaaatcaaggttagggtttcgaaattgcaggacgtatgtaaaaggtccataaacaaacaccgatggagaagaa

SEQ ID NO: 13525 - DNA, 571 bp, Arabidopsis thaliana columbia
  unsure (1)..(571): unsure at all n locations
nnnnnnnnnnnnnnnnnnnnnnctaaagttgccttcgtcagcgggcgaacacggtgtactacgctccatgcaggaggttgcaatgagctcccaggaagccagcaagatgctgcgtacttacaatattgcctggtggggcaataactactatgacgttaacgagctgggccacattagcgtgtgcccggacccggacgtcccggaagctcgcgtcgatctcgcgcagttagtgaaaactcgtgaagcacagggccagcgtctgcctgcactgttctgtttcccacagatcctgcagcaccgtttgcgttccattaacgccgcgttcaaacgtgcgagggaatcctacggctataacggcgattacttccttgtttatccgatcaaagttaaccagcaccgccgcgtgattgagtccctgattcattcgggcgaaccgctgggtctggaagccggttccaaagccgagttgatggcagtactggcacatgctggcatgacccgtagcgtcatcgtctgcaacggttataaagaccgcgaatatatccgcctggcattaattggcgagaagatg

SEQ ID NO: 13526 - DNA, 580 bp, Arabidopsis thaliana columbia
atgaaaattgctcttgtttaacgaacacatctctgattacaattcatattctccgatcacaattagttgtttatttttattgttataataataatgactctattggaaacaaattaaatctcaaaaccaagacgaaaagcctactaaaaaaaagaaaaaaaagaattaaaagaaaaaaattaaggaactaaaccaagtcagcttctggactgaggccataggtcatgtacttgaggagatttgcaccctcagattgacgacaaaaatcatacatcaagtaagtcaagagatttgtgccctcagattgacgacagtaatcatagtgtttaggccacaagtcaccttgaacattgttccgcaagtcaccgtatgggtttccggcaaaagatgtgcccttcctccacgtgtcccaaagctgaacataatcctgagctttctctagtaggaacaaagatcggtccaagtgattggtagattccagagtgggtattctcatctgcttcacgttgcaaatcttccaccttccatttaaataaacggaggtagcgcctctttgattcatctggtacgtttagtactt

SEQ ID NO: 13527 - DNA, 511 bp, Arabidopsis thaliana columbia
caaaaacctagatgagatcgaagtcctacaattattcagaagcacaagaaaaagaaaaaaaaaaaacagaacacgaaagtaagacagaaaaccacgaaatttcgattcaacaaaaacagagcaaataacagaacaagtgaacaacaccgtttatccagtatatcccccgccggttccgtacccggtggcaccaccaccaccaacgtgagtgttatgagcggttgtccgaccagttccagtgttccttccaatcgggtcggtcacagccgtgccctccacaacgcggtcggtcagttgtcccgttccgtgaccaggcagagcgaccatctgatgtgtcccagtgccgtgtccgacttgtccagtggtcgagtgagtggccgtccccaaacctaaaccggttccggctccagccgcttctttcatggccgcgttgtgctgacgcgtttctctcttctgcatctcagcttgattgatcttatcgtctttaacctgtgtagccatctgtttctga

SEQ ID NO: 13528 - DNA, 603 bp, Arabidopsis thaliana columbia
  unsure (1)..(603): unsure at all n locations
nnnnnnnnnnnnnnnnnnnnnnctaaagtcccgtcaatgattgcatctcttttctctgctaacggtgtcgcggcggtcactgattcatgccagggatatgatgtcaaagcgagttgtcaggccagcaggcaaagcctttcaggcattacgcaggactggagtatcgctgatgggcaatggctggttttttcggatatgaccaataacgccagcggtggggccgtatttttgcaacaaggagcggaattttcactattaccagaaaatgaaactggaatgactctgtttgccaataacaccgttacaggagaatataataacggcggggccatatttgctaaagaaaactcaacgctgaatcttactgatgttattttttccggtaacgtcgcaggcggctatggtggcgcaatctattcttctggtactaacgatactggtgccgtcgatttacgtgtcactaacgccatgtttcgcaataacatcgctaatgatggcaaaggtggcgcaatttataccattaataatgacgtttatttaagtgatgttatttttgatacaaccaggcatatacacaacaagttacagtgatggcgatggcgg

SEQ ID NO: 13529 - DNA, 824 bp, Arabidopsis thaliana columbia
cacgaatatacgggatagaggtacatatcaaccaatctctcggatggtgaaattacaaaacatataatattttaaaaaggtacaatgggatgattaaaacatactaaaatatggattttgaacaacaaacatcgttaaacaaaagattaacggttgatcttttgcagaacttgaagtctggcctttgcaatcaacttgctatgatcttccacactttcaccaacctccgtgattttctttgttaatttctctactttcttactgatctgagttaggacaattctcgtggccgcctcattatcttcatggtcaatagcattatctacaagtttcaacatatttttgatacggtcttctagcccgtcgactaaaatcgatacggtctccgtcgcttcttcgttggtttttatacctttctccaccgattcttctatctcttccactttctttagaccttctaactgtttgttcagagcatccttctttttatccaaggtagtgtagactccagcccatcctgccgcaagcagtggtgcggctagagccccaaagccggcagccgcacccacgcctgttgcaattagagctatggatgcaaccgcaacaatagcaaacgcagcgccgaaaaccacgttcgtaattaaagtttttttctctagattactaatttccgcctgaatcttttttctagtctcactcacttcctccagaagggattcttgctgctttttgatccgctcgaactgagttgtgagaactttgccgtcaaagggatgcccatctcttaaaactcttgaggtctccaatgtttttcatacttcttc

SEQ ID NO: 13530 - DNA, 1078 bp, Arabidopsis thaliana
atttcctcctctagtggaagatgctaacaaacagtcgaagttctcttctatagcttcacaatttaaggtgcagtgaaatgagatagtttttatgtaaaaatcgttcggttccatcacaggattactaaattaactgtcttacttttatgcagcaacaattggcatcattgattgaaggtcttaatactactgagcctcactatattcgttgcgtgaagcccaataatctcctgaagccttctatctttgagaaccaaaatagcctgcaacagctacgttgtggggtgagatttacttactttttttgtttgtctgtgcacatttgcttgttattactctgtgcgagtttaaaaattctgtataagcatatttttagggtgtgatggagacaatcagggtttgccgtgctggatatcctacgcgaaaacattttgatgaattcctggacagatttggtatcctagattctgctactttggataagaggtatgcctctctcaattcagaggttgaaagcttacccaatactgtattgaatttttttttctaaacttacggcttgttcctgctagttctgatgagaaagcagcgtgcaagaaacttttggagacagttggactcaatgggttccaggtactttgtgaacgtcacgttttgaatacttttctggccagacgagcttggtatttgatgtacttgttttcacagattggaaagacaaaggtttttctcaaggctgggcagatggctgagttagatgatcggaggactgaggtattaggaagagcagcctgcattatccagtggaaattccgctcctacctgacccgccaaagctttataatgctccgcaacgctgcaataaatatacaggctgtgtacagaggtatctaaaagctgtatagcatatgagttaacttaaccattcagaagaatacatgtgaatctttcatctattatctgctttgttatccatcattagcaggtcaagttgctcgatatagatttgagaacttgcgcagagaagctgctgctttgaagatccagagagctttgcggcatcaccttgataggaaga

SEQ ID NO: 13531 - DNA, 529 bp, Arabidopsis thaliana columbia
cccccaagtgaattagaaaaagctcagatcttttgctaaacaattcactcatgagttcaatacagtaatgacaggtttggtgatctcaaagtagcaataacaccaagacaaaaaatcctcagaatatggaaaaaaaaggaacctgatggaagaggaaagcggagagtaacgtaagtgtagagatcaatggcggcactacagcggtggatccatgaacaacagcgtgttcccctgcaagtatgatcttcccaggagctctagctttcacttccattttcctaagtcaaacacaaaagtcacaaccttttgaattgatttacataaacagacagattcacaacaacacagagagattctaccaactaaataattgaactctgggaataaaataataatagcctttgatacgcaatgtggatcagatcaaaagggcattattataattgggatctgaattaaactaaagactacaaatttagatattatatccaaaaaaatggttgtatcagataagagctgctcagagatc

SEQ ID NO: 13532 - DNA, 457 bp, Arabidopsis thaliana columbia
cggacaaggggaatccgactgtgcagtcgctgatcatcagatgatttccagttttgcccgcagacatcccgcactttgcattgattgcagtatggacatcagatccatcggcgtacgcccagccattgagccgcgcaccacgttattgaggctggcgctggaacgtacgctttgcagcgaaccgccgctctggcgtaaatcgatctgcgtttgtggagtaaccacagtctgtccaccaccaaacggtgtatctggctggctgacattggcctgacgattaactgttactgagagattcccctgcgctatcgcgagcttgctcgagggtcacttcgcgattcatcaccatcgaaccggtgcgcgagttaatcactactttagcgtcctgcggggtgacattaacctgcatattctgaatatcggcaaggaagcggacctgggaactgttccactcggt

SEQ ID NO: 13533 - DNA, 821 bp, Arabidopsis thaliana columbia
tacatataatctttcgaacgagagaatgtagacccatatgtttttacctgaggaaatttgtctcgtagctgagtcaacaggttcacagagatatctcggacgtgctcatctctctgtgacatactctttatgaggaaacatgcatgtgcatacgttgtcagttctctattacgagcatctttcccagtaagagatattcgatcttcctgaaaccaaaagaaagtttctgtaacatatatatactgtgtaaatgaagaagcaggaaaaaggaaaaaaagaccaaattgcatatacaaagggacagaatgattgtgctagagttgccactaaaaggtctttgacaaaaacaatttagatactatgaccaggtaattccataccagccatgagactgctgtttcaaaggctctatgcacaattgccgtcaaacactgggaaacagcaggagtaagatttggagttttcagatattcgaacacacaactgaaggcacttctagaggcagaaacgcttgactcaccattcccgatacccccgtccctaatcccccgtatgacctccaaacccgccacagcaagccaatcggtagccttcacccctaacagacttgaagaaagtgattcctaagtatctaaaacctcacatcgaagtccatctagcagatattgtacatcactcgccatctgttaacctgagatagtgttcattgctgcaacgtcaactctcccagctaaggcagttgacagagcaagtctctgggttgaagctactttctcatttccatttcctcggcggctacgaggattgtgaagtgcgttgag

SEQ ID NO: 13534 - DNA, 533 bp, Arabidopsis thaliana
tgcagatgttgtaaccgagttcatcgaaggtctcgtcgaaacttatcctggacttcagtatttggatggtcttcccgaggttaaaaaaattcacttttttcgattccttccatggatgtgtgcaaaatctcagcttatttatgatgaattcacagatcaaagttgtactaagagctgatgtctcagctgcaaatttatgacaaggttgccgttatatcaggttggagtttacttgtccaattcttttttattacaaattgagtttcgttttcgtgttatgcaatgccatttttgaaacaggaggaggaagtgggcatgaaccagcacaagctgggtatgttggagaaggaatgctcacagctgctatttgtggagatgtttttgcttcgccaactgttgattccatcctagctgtaagtaactcttcccacataacgtttcttcttcttattccttctcttgtgtctttcgagaaaatgatgaatctttgtccaattccagaggattcgtgctgtaactggtccaaaaggatg

SEQ ID NO: 13535 - DNA, 573 bp, Arabidopsis thaliana columbia
aaggtgacgttgaagagagtaggaagcgctctacttgcactacgcacatctccttccactgaaatattctcataccttacttcaatttttggaacttcaattcccactctgttctcgcaaaataaattgcaaaattgtcggaacaacaaaattaagaaaaataaagatttaaagggattttttgtcttcttttttggaaattttggaaaacaatttaataaatttttgtttgctttttatcttacctatctgttctttctctcaaatcacgtagaaacttttcattgtcttcttcaacgaaactcaaaatcatttccataaggtgtttcttatccttaggttcgagccttgttaggtcaatatcctcaagctcaatcttcccgttagccgacgtttgcggcaacatccctttacgtagccgatcaaacgtcggcaatctctcaatcgccgcccatcggagctccatgtcatcttcctcccgacgttcgcatctcccaaacacctcgtcagtttgaggcatgaacacatctcgaaagcttttggaagctccgacaaactcctgtgactggtgga

SEQ ID NO: 13536 - DNA, 471 bp, Arabidopsis thaliana columbia
ttctctccatctctctgcttctccttcgtctctcccaagacaaaatcatactcatcaccaccaccaaaaccacagccaccactggaaccgatcatcaacgcagtcacaaatcttctgaggacgatacgtgtctcggacgctacatatatatccacaatctaccttctcgattcaatcttgaaatcatcaaagattgtaagtctattacaagaccaaaggacaaaatcagtatgtgtaagtatctcgacaactccggattcggacctttgatcggcggtaaaagttctgactactctccgagctggtacgctactaatcagttcatgctcgaagtgatttttcacgagaaaatgaagagttacgagtgcttgacgagaaattcttcactggcttcagctatttacgtaccttattatgctggcctcgatttccggcgacatttacggcggcgtaacgttgctgcgagagacg

SEQ ID NO: 13537 - DNA, 582 bp, Arabidopsis thaliana columbia
gaaagctattgctacttctgcagcaattcgggctgagctagagaagaagaagcaaatgaagaaggaaggacagctagaggcagcagatgaagaagattcagcagatgctgcaaagaagaagcaggagagagacgaactggagcgtatcaaacaagcagagaataaaaagaatcggctggagaaatccatcgctacttctgcagccatcatggctgagctagagaagaagaagcttagaaaacttgaggaacaaaagagattggctgaggaaggtgctgccattgctgagaagaaaaagagacgtcttgagaaagctattgctactactgcagcgatccgcgctgagctagagaagaagaagcaaatgaagaaggaaggacagctagacgcagcagttgaagaagattcagcatatgctgcaaagaagaagcaggagagagaggaactggagcgtatcaaacaagcagagaggaaaaagagacgtattgagaaatccatcgctacttctgcagccatcagggctgagctagagaagaagaagcttagaaaacttgaggacaaaggcgattggatgaggaaggt

SEQ ID NO: 13538 - DNA, 447 bp, Arabidopsis thaliana columbia
cccatcttttgatgggagtccgggatcccccacctccgccaccgcaaaccggtttccaacacgtggttttcggtatcgccgcgtcggtatagactatcgaaatagagaaaagagtacatcacgatttggtacaagacaaaccaaatgcgtagttatgtctggttagaaaaaccagttaccgaagaagacgtagacgacgtaattacgttcccgtcggtgaacatcttcggcgatacatcgaagtgtccgtatagcgactaactaggacacagataggcgattagaatttcaagaatcgttacggagacacttaaattaggactcacagatgtgaaatggttcgttatgggcgacgatgatagagtctttgtcgccgagaatctaatcagagttttgagttgatacgatcataatcaaatgtagtacatcgacagtttatcggagagt

SEQ ID NO: 13539 - DNA, 492 bp, Arabidopsis thaliana columbia
aggatcatccctgcttgattgacacttcacaatctttcacctttgaagaatattgtgagaaatatgcaaaaccagaggagattttaagtgatgatgatgatgatgatagcatgagcgaagatggttcggactctgatgatgatgacgacgacgaaatcgttgggaaagccgatccatgactgtttacaaatcaatctttctttgcactttcattactccatcttcaactttaaaccagtaatgctcattgcaaagaggagagaagctttcctctgtaaatttgtaaagacttatcattctttaggactattgaaatctcttttttttaaacagtagataaaatgtaacaatttgccatctcacaccaatgaaacattaatccatatctcattttgtttgtgttatctccaatttttgtttttttatacatgaacatatcggaagatgcatattgcagacaaaaggacattcctctaaaagtttactataaaa

SEQ ID NO: 13540 - DNA, 579 bp, Arabidopsis thaliana columbia
cattaggccctgcgcttatgaccactaaagcgttgttaataatctccatcgctttcttgtctcctacgatacctttgagacgagcaatataattcttgaacatgcttggctgttgtgagaccggaatagctttgctagatagtgaggtctcgtcatcgtagccagcacccgcggatgcaaaacagactccagtgacaatgtcttggtcggagatgttcggttgtagaaacggaggaacaaactctttgatgttgagttttgtggagattacgtcagagattagctttccgtttgagaatcttccgttagcttcgtggccgggaagatcaacgccataagggaggtgattagccttgaagacggcttgtgagtagtagttgttattgcctgtgtctgccgttgagtcgccgaatattagaatcgccgggaaaagcggctgcgtggtgtttgcatccgcattgcaagacacgaggagtgttgcacaaagagaccaaacactatggttttagatatatacattgtgtatttgatccttcctgttattttgattcatctatagtggtgaattaagttagtgat

SEQ ID NO: 13541 - DNA, 435 bp, Arabidopsis thaliana columbia
agagagtatgggacttgggaggctaacggtacggacttattatgatgaaaatagaattgctattgtaagtattactagatttgtccataaaaacaaaacactgacttttgttattcatttaagtaaacccatcacaagatgacactttgtaataggaaccagatcggagaccattagtttaagcagtacactttgacctgcgcatgttgattgttttactacccgccttaaacgccgacatcaatacctcgtatggaatcgcgggtttcgtagccaacagagtgtgaggcacaccaacctcgctaggcaagtcgtcagcaaccaccgtcacaagacggcattgcgttttcccaacgttcccctcgatcatgaatgagtcccggaggaatcacaaacatatcaccgggtccaataaccttcgagtacaacgtgtag

SEQ ID NO: 13542 - DNA, 172 bp, Arabidopsis thaliana columbia
tgactatgcagatgtatccattgcttgttcactagcactcgatctagttttttacagataactccctcttttctcttattacaccatgtaaatcattgtccctgatagctcatgtctgtaaattcacatgtgcggactacatcctgaaaatccctcataccaaccggagata

SEQ ID NO: 13543 - DNA, 726 bp, Arabidopsis thaliana
ataggttatgacttatgaccaaggtttggttgtgtcgtgttgataattatataggttcatatagtgtatctcggcgagaagaagcatcatgatcctgagtttgtcacagaatctcatcaccaaatgcttgcgtcacttcttggaaggtacatatagcttattgatcaattattcagttcatgtgggtcgtcacattatgtctcaagctttttaccaagatttttattttgtgtcacagtaaaaaggatgccgatgactcaatggtgtatagttaccgacatggcttttcaggttttgcggccaagctcaccaagtcccaagccaaaaaaatagctggtactcgtggttgtcttaagtgtcacacacaccttgtctttgcttcttagcattcaaaatatttgatattaactaacactatagtttgactgtctaagcaagaatagcttaatgttttcattgctgattcttgaaacagatttacctgaagttgttcatgtcataccggatggtttccatgagcttgcgacaacacggacttgggaatacttaggcctttcttctgccaatccaaagaacctcctaaatgatacgaacatgggtgaccaagttatcattggcgttattgacacaggtatcagtatatatatttcacacattgtagattttatctttgtttctatattttagtgctcaataacttgttgttttgtgtggttgtaggagtgt

SEQ ID NO: 13544 - DNA, 558 bp, Arabidopsis thaliana
taatgatttaaaattagtaatttactttgtttagctgaaattttgattggtaatgcacttttggaaacagattctcctgaagttgttcatgtcatggcggatagtttctatgaactcgctacaactcgaacttgggattacttaggtctttctgttgccaatccaaataaccctcctaaatgatacaaacatgggtgaccaagttatcattggctttattgacacaggtataagtagttctcattagatcgtagcttgatcttaattcatgtttcagatcgtacctttattgaagcgcctcaatgacttggcattttgtgtggctataggagtgtggccagagtctgaatcatttaacgacaatggggttggacaataccaagccattggaaaggaggatgtgaatcaggagaaaaattcatatcaacaaattgcaacagaaagctcataggagccaagtactttatcaacggctttcttgctgaaaacgaaggatttaacaccacagaatcacgcgactacatttccgctagagactttattggacatggcacacac

SEQ ID NO: 13545 - DNA, 883 bp, Arabidopsis thaliana
  unsure (1)..(883): unsure at all n locations
aaagtgttggttcctgagttcaagttgtggattacgtggattgacccgcttcaggataataaagataactctatccccattgcttgtggaatctttcaaggtgnggggttcagaggaagagaacgatcacttaaaattttcttgtcagatgtttcacttaactcgcaacaatagcgttgtcatatatccaagaaagggagaaatttgggcaattttcagaggctgggatatcagttggagtgctagctcagaaaatcataaacatccttatgaatatgattttgtggaagttttgtctaattttaacgatgagaatggccttggagtgggctttctgggaaaagttgaagggtttgtttccctctttcgccaagatgcacaggatggagttctccaacttcagattccaccaagccagatgctcaggttttcacataaagtcccatcattcaaaatgactggaaaagagagagaaggtgttcctcctgggtgctttgaattagatcccgctgctttaccaaaagaattgttcgaggtttatgattctaaagttgatgttgggttggatagagaattgccgaatggtaaaactggtggtccttttcctgaagcttccaaggttgaaatgcaggcaaacactaccagagagagcagtccatttaaaaagaaacgtccaaaagtccatgataatcatggttcattctccaaagaatctgatggtagacgcactaatcatgaaaggaactcagcgaaggagtccagaaagagtgtcaaagcagtagatgccttgaatctgcgaaaatctcctcgtcttttgagtgaaacaaacagtcaagcaaattcaaggtcaggccgacaaatagctgagaagaagagtgctaca

SEQ ID NO: 13546 - DNA, 670 bp, Arabidopsis thaliana
gtaatttttgggatgcttatttgatttatgggtttgaaggatcgattcatgttattgcttaaaatatcgatctttattgaaaacggaattggttttttggactcttgtaatctgaaatgattcagctgctgactcctcgtgatgtattttactctgatttgttgttccatagtgttatcatcgagctgatctcatccataattcgaattccgatccattttaatccgatattaagacacaacaacttcgtgttcttgtttctcagatttaggtttttagcttgattcaaaaatggagacgaatccgtgtgacatgaatcagctcgattccgattcgcatctccctcctcgaaaacgattacttgctggattcaagaaatttaactccaacggcattaatggatcttctccttcagatttcgcttcttcttcctctacttcaaactcaaacggatcttcctctgcttccaccaatgttcagacccatctcggcaacttgttatcttctcctttcaacaatgaccagtcacctgaagagctcgtggaggcaacgagatctgcagctgctttagcggttaaagctgcaaaggctgcgagacgtattgctaacgagaaggctttgatttccgctaagcgattgctgcggctaagagggcattggaattggttga

SEQ ID NO: 13547 - DNA, 572 bp, Arabidopsis thaliana columbia
attggtccacccattctttgacgagctaagagatccgaatgcgcgattacccaacggacgtttccttccaccgctctttaactttaagcctcatggtactaccacaccttcctttgtcttcaaaaagtagctaagcagctcaaagtaccataagataagtgacttaaactcgtattaatttgttgtgtttaacagaacttaaaggtgtgcctgtggagatggtggcgaagttagttccagaacatgcgaggaagcaatgtccgtggctcagtttgtgatttgttctcacctgcaaacacgaaaactagagcaaagcagtcgagatattcatctcttctcttctctctccttctctgtattaatattattataatgatcatatctcaatctgatgatttagtaacctttgtttgttgtatgagtagagaaagagtgaatcatttgtgggggttatgatattgtataagccaacaaagattattttttaaagagagtttcgtgttttctgtctcattacaccatcatatattttatagaagcagacgagatatccaatccattgtgggaagtga

SEQ ID NO: 13548 - DNA, 378 bp, Arabidopsis thaliana columbia
catacacatcagccccccatgaaacactcgacttcctcagtgacaagccatacttctctcgactgccttttatggctgggataagaacaattggtgtctgctgcaatttaagacacatgtgagaaacaatcaggatagagtaggaacacacagccttgacttgagagatatgacaaggatctcactatgagatcaatctgactaacaacaattccgaggactcttaaaactcttactaatgtacaaactatggaactccagagacactgatttcttaaatcaaatgtttcctcctttcttggactacatatatggagacttattctttctaaaactttctggactggttcagtgaaaatcaaccacacatggcaaata

SEQ ID NO: 13549 - DNA, 578 bp, Arabidopsis thaliana columbia
atgtctcgaagataggatttctgaagctttactttgtttggttatatggttgaaactggatgtcaaccggatgtcgttaccttcaacacacttatgaacggtctttgccgtgacgagttctcgaagctgtagctctgtttgatcaaatggttgaaattggattaaccccagttgtcatcacattcaacacactgataaatggtctctgcctagaaggtcgagttctcgaagcagcagctttggtcaataagatggtaggaaaaggtctacacattgatgttgtcacttacggaacaattgttaatggcatgtgtaagatgggtgacactaagtctgccttgaatctgcttagtaagatggaagaaacccacatcaaacccgatgttgtgatctatagtgccatcattgatcgcctttgcaaagatgggcatcatagcgatgctcagtatcttttcagtgaaatgcttgagaaaggaattgcgccaaatgtgtttactacaactgtatgatagacggtttttgtagctttggtagatggagtgatgccaaagattgttgcgtgatatgattgaaaggga

SEQ ID NO: 13550 - DNA, 365 bp, Arabidopsis thaliana
tcagtaacgacgccttcatgctggcgatggattcatccaccgtcatggggaccggaatgccgttgcgtcacgggggcctaataaattgctcatcagatggcctctttcatatggcgagtcagttcaatacggtcggacggcaccaggcatttctggcgcttacattccgggcaagtctcaaagctttcgcggtggttttacgcgcggctatagccgttatgcttaaacagcgcaatggcgtaatcgaactctttatggacggcgaaaggacgattgcagacgcggcaatagcacagcgcgaacgtgaatgattgcaggaagtcttctttcttccacaccgccagttcgtactcttgcgacagttt

SEQ ID NO: 13551 - DNA, 598 bp, Arabidopsis thaliana columbia
  unsure (1)..(598): unsure at all n locations
nnnnnnnnnnnnnnnnnnnnctaaagttaatctatccctttatacgcaatacatttactttcctcttttgatgatcttaaatgtcttatttttcgtaatgtgtataacaaggaatagtgatgaaatttaaaaaatgtcttctgcctgtggcaatgttagcgtcattcactctggcacagatgccagtcaaatgctgacgatcatgctgccgatgtttatcaaaccgatcaactgaataccaaacaagaaactaaaaccgttaatattatttccattcttcccgcaaaagttgccgtagacaactcccaaaataaacggaacgcacaagccttcggcgcgcttattggcgcagtcgctggcggtgttatcggccacaacgtcgggtctggcagcaattccggaacgacggcaggtgcagttggcggcggacgtgtaggcgcggcacgggnttctatggtgaatgataaaaccttagtggaaggtgtttctttaacctataaggaaggcccaaagtgtatactctacccaggtgggtaaagagtgccagtttacgacaggtttagccgttgttattacacgacgtataacgaaacgcgta

SEQ ID NO: 13552 - DNA, 555 bp, Arabidopsis thaliana columbia
taaaaaaaaaaaaaaaaaaaaaactttgaagtccccaaatatctgggccttttagtggatgtggcccaaattctaaatgggtttgacttggatccggttttggcgagactagttcagtttaataatcagccgtcgaatccaaagactgaagaaggtagtcttaaagaaaaaccctagaaaccattacttatctctcccactggctctgtctctgtcaaatctcggatcgatttcgcggtgggctcgattcgtgattcctcaaagttcatcatccctaaggtaattctctccccaagctggtagactcaatctaccgattttggtgttgcacttaagaagccgatatcgaaattagaggtttgcgtttttttggggtaggcactgtcacttaatggcatcggaatcgaaaagctacgctaggagagatcgtcttcttgagattgaggccagtgttcgaaagtggtgggaagacgaggatgtattcagagccgaatcttgtgagaatctccaaaccaggagaaaagttttctcaacctcccttcccgtatatgaatg

SEQ ID NO: 13553 - DNA, 821 bp, Arabidopsis thaliana
tctaagcattccacaagcatagatgttgtgattcctttagggattcacggagggccgagaaatagaaacggtggtccttcgagcttgattcagagatggaaatccggtggatgctgtgattgctctggatgggacttgggttgccccttaaccgtccttaaaggccaagcgcgaaaagaccaaagtgaaggccaatgcaatctttttgagcttttcacagaggtagcattcaagatccagttaccacttccttaaccatacatcatagatttcaaaaaatggaaactttcttgcattcaagataactcatcaactaaaaaatcagtcttggtcatattgactctgaaattcgattgattcgttgtgtgttttcgtttcagggattgatgcagggaagtcctggactaaggatcatgaatgttcgagatggtctctactttgtccagtctcaagcaaagatatcagttttgcaatctttttcaattgctttagcatacattcatagccaaagccagagactccggccatggtcgtcaaagaagtgtacagaagcttaactagcaaaagaaaggattgcacaaagtaagatgggcaaaactcagccttcatagtttttagttgggttcttgagttaacaatatctacaaattagtagatattatttttatttttttattttttggctttctgtttaaatctatagaaagtatatcattgtctctttactggaatcatatgtgggctttggtattgtttttcaaagagttgtgtaaaatgtaaattctgacttttgattttcaccttcagagatcgctcgttac

SEQ ID NO: 13554 - DNA, 549 bp, Arabidopsis thaliana columbia
cttctatttattgaaaagctatcgttcgtatatttttttttgttgttgctaatttacaaactcaacctattattcattattcaaaactgtcatgataaaaaaatcttttaaaagttaaaattgagaaatatctgagacgtagtttaatattgtaagaaaatacaaaatccagattctctccttggcacgccctctcttgttaatgtctgctgcatacacaaagactctataactctatctttctctctctagtcactgtcttttcacttgtcttgtgcttttaatcttctccattggtgttgttatctctttgtttctaaccggtaatgactgaagctaaaaccggcactggcaatgagaggctcgtggtggagatagtaggggcccacaatctcatgccaaaagatggcgaagattcttcgtcaccttttgtggaagtgcagttcgagaaccaacgtctccggactaaggtcaaacccaaagacttgaacccaatctggaacgagaagctcgtcttccacgttattgacgtcaacgacctcagacaca

SEQ ID NO: 13555 - DNA, 996 bp, Arabidopsis thaliana
ccccaatttcctctccctatcctctcatttttgtagtgcgcactgagagagacaaaaaaacaaaaaaagatggagcctttgtttttaaggtttcctttaggttgaggacattaggctaggacaaaaagcccggtttccttccttggtgggatttttgggtgttgcttgtttgaagaaataaagctttgagtacctccagggtttccattacggggacaaaaggggtatttgagcttagttccccggtttatgggtttgtggggcttttaaaccggggtttaaggtttatagaaggggtgtttctggtaacagttgagactttttgaggggatattacagagttcaggaaataaaaaatatagaaatttgtgttttgtgtttaatgggaacaagagcagaacgcaaggaagattttgttggtgggtttggatttggtgttgtagaaaattcgcataaagacgttatggtgctacctcatcatcactattagccatcatattcatcaccttcctcttcttctttgtgttactgttctgctggtgttagcgatcccatgttctctgtttctagcaatcaggcttacacttcttctcacagtggtatgttcacacccgccggttctggttctgctgctgtgactgtagcagatccttttttctccttgagctcttcaggtttcaagttctcacctttttgttgacttctgagctatgaaaaaattgaattttgttgttatgtgttggttttgatgtgattttggtggataaaatccaggggaaatgagaagaagtatgaacgaagatgctggtgcagctttcagcgaacgtcaatggcatgagcttgagaggcagaggaatatatacaagtacatgatggcttctgttcctgttcctccagagcttctcacaccctttcccaagaaccaccaatcaaacactaacccggatggtaagatctccctagcctctcacttaaacgtttccatttttgcaattt

SEQ ID NO: 13556 - DNA, 397 bp, Arabidopsis thaliana columbia
tccattgaaaatctcaattttcctaataggaaaaggaaattacaaatattgaattataaatagaaacacgcacacatgtgatgatgatatctgtctcagaagacgtttactaaatccttatctggcagcaatgtccactcgatttggagaaatcagatttttcttcatcgtcttcctcatcttgctttttgtgggagcttcagaggctacgaatcgatggcgtcctgaaggcatcgaggatcacagatcgccattctatgatggtcctatcaacaagaatgcaaaatcgtcatactttggtgacctagtcaaagagaaggccaaatccgcatactatggttacttgcataccaagcgtctagacatatacggcaccgattggctatggaggattgat

SEQ ID NO: 13557 - DNA, 481 bp, Arabidopsis thaliana columbia
ttcttccttctcatcatgtgtgcagattacataagtccatctatgggttgaagcaaacatcacgccaatggtacaaatgtctgtcgaagactctcttggatgccgcttttattcagtctcaatctgataacaccttgttcgtgcagctacaaggtacctctttcattgctatccttgtttatgttgatgacattctcattgctagtaatgacagtaatcaagtcactttgataaaagcatatatggctgaccatttcaaaatcaaagatctaggaccggctagatttttacttggtcttgagattgctaggaattcagaaggaattgccatttgtcaaaggaaatattgcttggatcttctcactgatgcaggcttgttgggttgcaaaccgagtactgttccaatggatccaaaggtgaatcttactgcagatatgggaactctcttggataatgcaaagccatatagaaaattggttgg

SEQ ID NO: 13558 - DNA, 889 bp, Arabidopsis thaliana
caagcggcttatctgatgaccttgagtggaagaaagttgtggaacctattatgagactttatacagagactactgatggatccaatatagaagcaaaagagagtgctttagtctggcatcaccaagatgctgacccagactttggttcttgtcaagccaaggaactactggaccatctagaaactgttcttgtgaatgaaccagttattgtgaacagaggccaccaaatcgttgaagttaagcctcaggtaagtacacattcgccaccgatcttctgttgatgagaaatatctccaaattttccatgattcataatgtctcggtttcatttcactaaattaaagcagtccttatattgtctggtttgtacgtagtcttaatctgagatttttggactaacagggagtaagcaaagggcttgtcaccgggaaaattcttagccgaatgcttgaagatgggatagcgccagattttgtggtatgcattggggatgatagatcagacgaggagatgtttgaaaacatatcaacaaccctctcagctcaatcatcgtcaatgtctacagagatattcgcgtgtactgtgggaagaaaaccgagcaaagccaaatacttcctcgatgaagtaagcgacgtggtgaagttgcttcaaggacttgccaacacttcgagcccaaagcctaggtacccttctcacctcagagtctccttcgaaagcgtggtatgagaaatcagagatcaacgggggttaccaagttatgtaggggaaaatgtgaatttgaatcatgataaaaaacatgatttgtacatagaaaacacgcaaaaacagagaggcaaaacctaatgttgcgagatttggacctgttttagttcaggtttgtacatgtacg

SEQ ID NO: 13559 - DNA, 647 bp, Arabidopsis thaliana columbia
tttctttttcccgaaaacagagaagaagaagacgaagaacaagattgtcgacgtatcaatggcggatctaaagaatctcttcctcatcacgaaacatccatcaacaacacagatcttcctaacgtctctcttcttcctttctctcttcctcctctcctcttcttctctctcagatttctctccatcactcatcgtctctagcttcacctctcgtcttctcacagcagcaaacttcttctcttctccttcttcttatacttcctctgcttcagatacaactatgtttctctcttctgtttctcccagaagaatcaacgagccaaagattgattcggagaccaaagaactcgcttcttgcgacatttttgatggaacttgggtctttgacgattctgaaccggtttatcttcctggttattgtcctttcgttgaagataaattcaactgcttcaagaatggtcgacctgattcggggtttctcgtcatcgatggcaactcatggatgctcgattccaaggttagttcttgttttcgtgttaattacgattctgcgattaacctttgcgactctgttttcatgagattgtgtctgcttgcgtcttttagatcgatgggagaagatgtgaagatctgagaggaaagagtgt

SEQ ID NO: 13560 - DNA, 410 bp, Arabidopsis thaliana columbia
ttacaatagccattgatgacggtgctaaaagtgactacatccggagagcagctcttgctagccatcgaatctaacatgcgcttcgcatcatttagacgatcctgcttgcaaaatccatcgatcattgagttatatgtgattgtggtaggaaatatacctctatgacgcatgtcaccgtatatagctacagcctcggagacctatccttctctgactaatgcacggatcaatgcactgaaagtgacaacatcaggattcatctgcctttcgatcatctcacgcagcaatagcaccgcatcagtccatctaccagagcgacagaaagagtctagcatacaggtgtagggcataagctcgggcaaaacccccctatcatgcgatgtcagtgagaaggtttcgagcatggatat

SEQ ID NO: 13561 - DNA, 568 bp, Arabidopsis thaliana columbia
  unsure (1)..(568): unsure at all n locations
gtgtctcagcgccattggtgccggcgcgtttagatcctcctgcttagccttcgctgccgaccagctccaacctaatcagacatgacgtgtcaccacatcatccctagaaacgctcttcaactggtactacttctccgtcatggtcgcatgctttctttctcagtctttgctcgtcttcgttcagacaacgtatggttggcagatcggttttggagtttctgtcgctgccatggctctatcggtcgctttgttcttcgcggcgtctccgtactatgtaaggtttcagaaaccgacacgttgatttgtcatcggaagagcatattatatcgtatcatcacgaaacggggtcttcattttcaattcctagccagaaattgaggtatattatttattctataggtctttgtaaatcaaattgtatggtcaaagatattttactaaatacaaatttagctataactggattttttaagctggtatatatagttgcaagttgcaatagtatttctcttcttgttgattattcgttccanaaatatgattgtgtacgaaacctgatgcataatat

SEQ ID NO: 13562 - DNA, 521 bp, Arabidopsis thaliana columbia
ctagactatgttgtcagcctgtacccactcgtctcaagataatcctccaagaaatgggctcggacagggtatgtaaaaccctgtacatgaattttcactttagttcaaacactcttctaaatgagttacatttcaccggatatggagaaagaaaaatgttaagcaaaagaatctgcgtaacataaacttactgggatatgcatggctggtgcaccaccaaaataagaagaaaagagctcagcgttcaaagtagcactcattaaaatcaactttaggtcaggtcgacgaggaagaagatctttcaggacaataagcaggaaatctgacagaaaagagaaagagtgtgttaatatgatactggcagttactgatggcatttattccctttagtaaattaccaaaatttaccttcattcattccacgttcatgaatctcatcaactacgacatgagtcacacctttcaggctacgatccacaagtaaccttctaagtaaacaccagttgtacaaaaagaagacg

SEQ ID NO: 13563 - DNA, 562 bp, Arabidopsis thaliana columbia
atccccgtttgtttgctagtacagtttctgtcacagcttctacaaactgctcaacggttggagcaggcatacacatcctctcagcaccatttctcatacgctttgcattctcctcaggacgaaagaggaggatgttattaccatctttctttctgtaagcttttagcccttcaaacaatccctagaagaacatacactaataagactcatgtgatcctaaattgcactctttaccacaacacattgcttggcatttctcatcatcacttacaatataagaagatttctccgtgcaatatatgaatatacattcagtaaataaatcctcactagatgcaactaacataacaactaggagactagacttattgacaaactcaggctgtgatacattgtccagaatttgacaaatttctccacactttcaaaccctcctaactcccttaaagattcttgattagcataaattaagtttctttcatagaattcattacagtaaaggacaggactttgagaagctagaaaacaaaatcgacggcagattacgtttttcggtgccaag

SEQ ID NO: 13564 - DNA, 569 bp, Arabidopsis thaliana columbia
gatcttctctgtggtcttcaccactatggccgctccgtttttttcaactccatttcagccttatgtctaccaggtgtgcttcttctctctttgatcatttcgctttcaaaatgatgaggtcgtgttcttcttagttgcaatttgactaaatttgaggttcattgtaagtaggatttagagaaattccatctttgattagtttaacttagctgggagaacgcataatcgggccaattagggattttagatcatgacattgttctagtgttgtctaataagtggccatttgatgcagagtcaacaagatactattacaccgttccagattttgggtggtgaacccaagttgttcaggtacatttgctttcttaatatagcgtgatcttcgtatttgtgggttatatgccatataattttaacttctctaaccattgctcgtatgttggcagataatgttaaagtcagaggagaaagtcattgctaagcctggtacttccactgaataactcgcttctctactcagttttgtataatggtttcaagttcaactaattttgtgttatggtgat

SEQ ID NO: 13565 - DNA, 520 bp, Arabidopsis thaliana columbia
tgctgcgttcgggaggtttcaacccaaactcctcagcaggcaaagcagttgcagacagcacgattctggcacagagtcgttcggggttgcagttgctgctgcggttgtggcatttggttacttttacgagatccggaagaggatgaagtaaacgaaataggaagtaaaacacgaagcaacgatgctcttatttgggtattaaagaaactattaatcgtctatcgaatctattttgctgctacaagattctaaactctttgaatccacgattctactgtttagtagtaaaaaagttaaaaagtcaatattttgggtccgtgattcatttttgcgatatttgttcattgcaatgttcgtttcacttattaattagtaccaaagaaaaagaaaaaagaaagaaacaaagatcggtcgatatctaccaaagtggggacataacctgaaacttgacctaacctggtagtggtaggtttagttaggtaggaaacttctactaagaaattaaaattaaatttttttt

SEQ ID NO: 13566 - DNA, 630 bp, Arabidopsis thaliana columbia
  unsure (1)..(630): unsure at all n locations
nnnnnnnnnnnnntaaagttccagacgggtagcgatttcaggagtgatcgcgtactcaacaccgccagcgaagaccggagaaacgccggtgtcgtggtttttaccataaacgttggatttagtgtctgcacgccataccatgccacccagacgagtgtagatgtccaggtcgtcagtgattgggtaacccagtttagcggtcagttgaacgccctgagctttgtatgcaccgttttcaacgctgcctttgtacggcatacgacctaaccagtcgtaacccatttcaaagccaacatacgggttaacctggtaaccaccaaaagcaccagcgcccagcttggttttcatgggtcgggccattgttgttgatgaaaccagtgtcatggtactgggaccagcccagtttagcaccagtgtaccaggtgttatctttcggagcggcctgcgctacggtagcgaaaccagccagtgccactgcaatcgcgatacgtgtctttttcattttttgcgcctcgttatcatcaaaatacgccatgaatacgccaacgagatacacggttanatcctcacagggggatctgtcaatattactctacgatatctcggcttatgcgagcaccctggcgatgt

SEQ ID NO: 13567 - DNA, 476 bp, Arabidopsis thaliana columbia
cttggagcttgcagagttcacagtaacacagaactcggaaagttggctgcgaggaagatcttagaacttgatccgaatgagcctgcagcttatatacagctctcaaacatatacgcttgtgcaggtatctatataattcaaacacaatcagataaaactctttcttctactgatctaccttgtgtgaaagtgacactttgttgaatatttctatgtagggaaatgggaagaatctacggagatgaggaggaagatgaaagagagaaacttggttaaagaaggaggttgcagttggatagaagtgggagataaaattcataagttctacgtaggtgatacagctcacccgaatgctcaccaaatatatgatgaattggatcggttaattacagaaataaaacgctgcggatatgttcctgatacggatcttgttcttcacagctagaggaggagaatgatgaggcggagaaggagag

SEQ ID NO: 13568 - DNA, 576 bp, Arabidopsis thaliana columbia
aaaaaaaaagtaagtctctgaatggcttcgttgcggcaaaagaagaagcaaaatcctgcgaagagggcatggaaaaactttacaaacatggtcaagtcgaagttcagagacatggagatcgcttcatcggtcagagaatcaacggctcgtgtcttccggttcatttctcgccgtctcatcgttccttttagaacaaggtaccttcaaaacaatagctacacggacaaatactactatagccggaaccaaagttctcgacagtttctcaacttcatttctcgatctctcaccaaaccaaagcgtcgtcagtatggatacgatgatgaatactctcaaatctatcaataccaaagccaatcacgcggtgaggggacaagtgggagcaaagagaatgttgtgagacgaatagaagagcacaaagaagaagaagaagaagaagaagaagggatgccggagattgctgattcgatggaagatgcttggaggagagtggtggctgcatcgcctcatctgcaggttaacgagagagccgacgagttcatctcaagtttagagaaatatgaagatggagaagag

SEQ ID NO: 13569 - DNA, 561 bp, Arabidopsis thaliana columbia
ctctagtcccctgcttataatcttacatagttatctcttgagacctttagtctggcctcttaacttctccagtttcgcattgatgcttttcttttttactttagcaaattaatatcagagttccttatctgcagattgacagctatgatgaaccagatctggctcagaacttgtcaagagctggactctctcttccatgtattgtgaaaccacaggttgcctgtggtgttgctgatgctcacagcatggtgaatatctcatactttccatctagatttgatatctcgcaatatctgttgctcttttcacagcagaacaaaaaaattcctcgttttcatgtgtttctcacaggccattgtcttccgagtcgaggattttaagaatctgaacactcctgttcctgccattatccaagtaagtcataatgtaatatggataccaaatctaggggcacactcctaaatcaagatgtcaagcatagagaaacttctcaaccgatgttttgcaggagtatgtggaccattcatctaggatttttaagtattcgtcttgggggaacga

SEQ ID NO: 13570 - DNA, 573 bp, Arabidopsis thaliana columbia
tggagcttgaacatagcaagaagaaaaggaagaaaggatctgaaattgattgggaggatttggttatacagactctggtcttacacaatgtgaatgaggaagaaatagagaaaggccattacaaaactttgttagacttgcatgttttcaactctggagaggtttgaattgaaatgtttttctcttggaatttttttatttcttacagtataattcatttaaggatgtaaaaatcgttctgaatgcagaaattatcaaagcaagcatcacaagacgattcaacaatccatgtaaatgtttctctgaaaatgattaataagataaactacttgtttctttaataagccctgaaagaaacaatttaagaaaaacaaaagtctaatactgcttatgactgactaccaaatccatttcattgatctctctgataattagaagttcctcagcttgtattcaatcagcctgacatgccataatcttcaacatgatcataaaggttgtactttcgccagtccatctttccacaagatgctcatccctacaaacacaaatcacaagaaattatctgagaca

SEQ ID NO: 13571 - DNA, 793 bp, Arabidopsis thaliana
tgcagccgcatacgccacacctatcgacctcaaaaaccttataccacataataaaacacattttgagttattagtcaatacaaaagcagctaaacagttaaaaatgttgttgtataactcacggagatagaaagagacgaggatgacttctaacaagactatccatttcatcaaaagcttcaacaccagtttgccaaacaaagaaccagttctcatgttcagacaacaactgcgagtaacagttaagcaaagctatgttaatggcattggctcctaaagacccaccaagcaaaagcacaactttcggttccgacacagctccagcccactgtccgaagaagctcacacgcgccgctcctttcgacgagtatcgtctaagcgtttgtcttatcgggttcccgtagacgacacacttcgcggcgactcgtttggggaggttagtgactgtacagttgaaaggagcgaagattgtatcggcgaagaaagacagaatccagttagtggttccagggattgaatcttgttcttggattacgaatttagttcttgagatcacggcggcgaaacagaccggaaaagaggcgtgtcctccggtgccgatgacgatttgtggttttagttcgcggaggattttgtaggattcgaaggtggattggatcaagcggagagggaatttgaggaaagaggtgaaacagaggaatggtcgggacgatgatgatccgacggtggagattgttgagaaatcgaatccggcggatggaaccgtcgtgctctccatactgtttgggaatcc

SEQ ID NO: 13572 - DNA, 656 bp, Arabidopsis thaliana
aaaggtacttccggcccacggaggtcgacaatctgaaaggagacgcaagcaaggcaaaggaaatgttgggtggaagccaaaagtagggttcgagaagctggtgaagatgatggtggacgaagaccttgagctggccaagagggagaaagtgctcgccgacgctggttacatggacgctcagcagcaaccttgatatggggaggtggcaaagaagagtaatcattatctgctttttcattgaaatgtaattttgtttcatttgttgttgttctctttcgttgtttcaagttgttcaactccatacactgccaatcgtccattgtggattttgtatcaaaaggcaaacaaagcatatttattacatatgaattttccccttatcagaacaatggtttcttactggtcacaagcgattgtacaaatcgaaaagcctaaagatgaaatgacaaaagaaaacaatgatttgtaacaaaaagatcaatcaatagcatcatcatgcatctatgcaaaatcagaggagatcagaaagtatgctgtagaactacacgtattcgattcaccaatctaactaccattaagagtatttactcttatgctcgggtgtagaagcagagttgtagtagtattatactgactgaacgggagatgcagagaaa

SEQ ID NO: 13573 - DNA, 578 bp, Arabidopsis thaliana columbia
ggaaatgcagaacaagggaatgcacccagatggggttgtcattagctgtttgattaatgaactaggtaagatgatgcttgtccctcagggtaaagcctttcacgggttcgtcataagacattgtttctctttagacagtacagtttgcaattccttgttatcgatgtactgcaaattcgagcttctgtctgtggctgagaagcttttctgtaggataagcgaagaaggaaacaaagaagcttggaatacaatgcttaaaggctatggtaaaatgaaatgtcacgtaaagtgtatcgagttatttagaaaaattcagaatcttggaattgaaatcgactctgccagcgcaacctctgtcatatcttcttgttcccacataggagcggtgctactagggaagtcgttgcattgctatgttgtcaaaactagcctggatcttaccatctcagtggtcaattccctcattgatttgtatggaaaaatgggagacttgactgtagcttggaggatgttttgtgaagcagatactaacgttatcacttggaacgcaatgattgcgtcttatgttcactgtgagc

SEQ ID NO: 13574 - DNA, 937 bp, Arabidopsis thaliana columbia
cacctgttccttgtccacgtgtctctggattcaaaacaataaatataatttcaaaaaaacaaagatccgctacctttcaaatttgaattatgcttgattgcatcagttgaacaaagaagagaaaaagtaaagatagcttaactatacataccccactaaggctactaaatccaagtcctgcaccaactgtcaaccgatgtgatccaccaaagaattataatgattcccgtggtggtaactcagccttatgggaggtgtatccgtgctgtagtttccttgaaatatgttgataggctctgtaagaaaaagcaatacattttgtttcataaatttcttgttacactaaagaacataaagagctttcataatgtgaatcttaatcgcacctgtgctatatgagtaaatgtggattggcctattgtacatttctgctaaagcttggatctctacgttgtttccatagacctatcacaattgtatcaaagaggtttcaaaagagattgttggaaccgaaggctaacaaagtacagccatggataagagcaaagcaccttatctcttcttttcctcttcaagtaagaggtaaaaccttcggttatgaactgagaaaagtgatccctctcttgttcctaaaccattcattgtgaaaccagtaagttctacaagttcttaccattaacactaaaaacagtaattctgtgctccgtccaaaacaaggtacatgcaaaaaatatgattatatttacaataccgaagtttaaaatgtatatcattaacgcatacaagtacatgccgttgttactctctttgttttatccacttacctttagattgatgctgtcttgaacccaaacacatagtcatatatattagccatcaaatggtacagatttatgcttttaactattattcctttcttggtggatggttgactaga

SEQ ID NO: 13575 - DNA, 543 bp, Arabidopsis thaliana columbia
tacaagtcaatcgctgcatccatctttcccagattacggaatcctgaaatcaaactattgtagacagacacatttggcatcaatcctagttccggcagttcagagaacaaagtatatgcggttttcatgtcattctttttacagaacccgtctattagtgcaccgtaggctggaagatcaagtttcaactccatgcttttcatttcgtgtgtcatttcaagagctagatccattcggttacttttgcagaatccattgatcaagctggtgaaggttacaacatttggagatttaccgttttcactcatctctctgtaagtttcgacagcggaatcagtatcacctactttgacgaatccatctatgatgctattgtaactcgtgcaactcatggaatagcgcttttctttgatcaaattttgcaacatctctttggctttagacgtctgaccaactttacacaaaccattgatgatcgtattatatatgacttcattagcttcgaaattggaagcattcatctgattgatgacatccaagcat

SEQ ID NO: 13576 - DNA, 506 bp, Arabidopsis thaliana columbia
ttcatccgtaatggtttgttgagaagagctgaaccagcacttttgttgacaaccatatctatcgggcaacccatgttgatatctatgaaatcaacagtgcattctcggtctataagttcaactacgcgcgacaccgtgtcaggataagaaccgcaaatctgaacaccaaacagatcttccgatgaatgtcgtctaagcagagcccattcagaagcttggccctataacaaatcattttgcaggttttcacattatgacaaagaaaaggtttaatcattcttgcagcatagctgtgagtgtaattagtggcctaacctgcaaaagatttgtgcacatagccatctcaccacaagtcacatctgctcccaacactttacaaagtcttcggaagggaagattgcccacggttgttaagggtgcaaggtacaacttatccctaaaatcaattagctttttcttttctcgagggtgcactttagactactatcagtttcaacaattttgat

SEQ ID NO: 13577 - DNA, 1998 bp, Arabidopsis thaliana
ataatacaactatcacctatttattaaacaatcacctccattaacaattcaccattatccatatcactagttcactgctataaccgtattgccgccactaccaccatcatttttaccattagtaccaccactacaatcgttatcatcatcaccattactaccgtcaaccccaccattatcgctatcgtcaacgtcaccacaatagtttacctcgcttgcttgggttcccaatattgtatctctcaggatatagtttttcaatggggatctgaaaatagtatagtacaacattttatttctatgcatcataaatagtacaatataaatttacttacaaactatttactattttataaatacaattccgattttaaaatttcaaactatgttgtatgtagaaaaaaacataattttctatttaataaatctcagaattagaatctattttttagaaaagatatataacaaaaatatacaaatgagtaaaaactaaatgaagtgatactaaatcatctcgcagactactccaccccaaaattatcttttctcaacccttacatactactttattaatttatacatacataatattatattcttaattaaacttttaattttggttatacacctaattcaccaaaacccatctatcttttctccaaacgctttttttttctctcacttcaaaatctccccgagacctctcgccttctctcgcagccaacgatcccatccaaaaccaaaactcgctctccggtgatcgtctttcctttacctcgccgaccttctccgtcttctctataactcatttctcttcttttctcttttctagttatattgagattgtggctgcaagagaaacggcaaaatgctgctactgaagcaaatctcaccaccgttccatctccaccaactccgccgccgtatctccaccatcatctccgccggattcactctcaacctcccaaaactcgaaccttcctccgacgccgaactaatctcccaaatgttaataacaaatcacaacccattccacttcatggaatcatctctccaactcaacggcatctccctcactcccaacctcatccaccaaaccctcctccgtctccgtcacaattccaagattgccctctccttcttccaatatctacgctccttacgctctccttcaacaacaccaacctctttcaatctcatcatcgatatcctcggccgtgttcgtcaattcgacgtcgttagacaacttatagtcgaaatggatcaaacttctcctgagaccttcttaatcctcgttaaacggttaatcgccgccgggcttactcgacaagcggttcgtgctttcgacgatgcgccttgttttctcgagaatcgtcgtttccgtttagtcgaattcgggtttttactcgatacgctttgtaaatacggttacacgaaaatggccgttggtgtttttaatgaaaggaaggaagagtttggttctgatgagaaggtttacactattttgatcgctggttggtgtaagcttaggaggattgatatggcggagaagtttttggtagagatgattgagtctgggattgagcctaatgttgttacgtataatgtattgcttaacgggatttgtaggacggcgagtttgcatccggaagagagatttgagaggaatgtgagaaatgcagagaaggtgttcgatgaaatgcgtcagagagggattgagcccgatgttacgagtttttctatcgtgcttcatatgtatagccgagctcataaagctgagttgacgttggataagatgaaattgatgaaagcgaaagggattagcccgacgattgaaacgtatacatcggttgttaaatgtttgtgttcttgtgggaggttagaggaagcggaggagttgcttgaaccaatggtggagagcgggattagcccgtcttcagcgacgtacaattgtttttttaaagagtcaaaggaaggaaagatgctaatggagcgatg

SEQ ID NO: 13578 - DNA, 399 bp, Arabidopsis thaliana
cctaatatctaacatccaagtgcgggttttttgcaaagcaagtatgcgtctctgcttcgtgaaggcgatccaaaagagttttcttttcagacgagagcttatctatatactattcgaaattcagaagaactgcgtgaaggagctattcaacaattagaaaatgcccgggcgcgcttgcgtaacgtagaaacggaagcggataagtttcgcgtgaatggatactctgaaatcgaacgagaaaaattgaatttgattaattcaacttataaaactttgaaacaattagaaactttcaagcatgttacctgacggtgtgcacatacctgaagaagggtatttgcagcctcagattcacttaatttttgggtgatgctagatttctcctttgtcatagattga

SEQ ID NO: 13579 - DNA, 646 bp, Arabidopsis thaliana columbia
  unsure (1)..(646): unsure at all n locations
gtcttgaattgagctcgttgttgctgcatcagttatcttgcatctagttttgtaattcccttgtcttactgtaattgacaatagaggagtcaagtcactgtgattctgttattggttatatttgttcttatgtgtgttgattccattgcttccactttattgttttcagaaacttttgcgaattactttggaaagtttggagaagttgtcgactctgtaatcatgacagatagaataactgggaacccaagggggtttgggtttgtcacttttgctgattcagctgttgctgagaaagttttggaggaagatcatgtaatagatgaccgaaaggtagatatgattgattagtttgtatgtcgtaaatcgtctgctctgattttgtttagctgtttggatgctttggttaattccttttaaatgttaggttgatctgaaaaggacacttcctagaggggacaaggatactgatatcaaagcggtatcaaagaccaggaaaatctttgttggtggacttcccctnttttggaagaaggtaaaagttctcctatgttttctgttattgtctgtggttataactgttgctgataatgtgtgtcatatttgtagatgactgaagaatatttctgtgtatatggtgcataat

SEQ ID NO: 13580 - DNA, 540 bp, Arabidopsis thaliana columbia
gtaattgaacaggttgcattataaggaagaataaatctgcccagtcgagtttctgatcttctgaaaccacaaaagcttgtccaaacccttccatcaccgctggtgtctgccacaacttctttttttcttccatgggaaggttgaagaaatcttgaatctctgactttattttgtccaagaaacttgggtctattccatggtttacaagctgttaaggaccatacaaagacataaccaaataaataaatttgaaacggaaagttttaggctccattttggctttaacatagttgtaagaaacgattttttctgaataatttcatcaaacgtaatctatttaattctgatacttgcatggaaacaagggtaataagctccacgttaggtctaacatagataattttgtaaaaaaagtgaagtttgagattttgcctggaaaaatccatattctttgcaagcaaagtcgagtttctcaacctcagagtccacggcggtagaagacacaaccgattcatgtcgatgatggggatccggatatga

SEQ ID NO: 13581 - DNA, 578 bp, Arabidopsis thaliana columbia
cccaataaaaaccggcctaagcagccatgacgacgccgtgccggaccattaacgctaatgctatcgccgcaccgtcgccttcgggattgatctttaacgggtttcgtgatttcgtcccgattgaaaagaggcttgttatatcaagctttcgtggcttgaaactaccgtcgaggacgacgaagactattacgagctctgactggagttggagttataggtctccgggaagattggcgtctgcgtctacgtctacgtctgcgtctacgtctacgtctgcggctgtaacatcgaattctacgaatagatttgaagctttagaagaggggattgagaaggtaaatgggttgattgcagatttacgaaatcttggtaaagctgagttttatagggatttgaatggttctgtttcattgtataaagctgagatttttaagggttaggtaaaagagttggtttcaatgatcatgatattgattgatattagacaaaatcttggagaagctgagttttgtagatttttaggggtatgaatagctcaatgaattatagaactgactcaaaaattatttactgaaatt

SEQ ID NO: 13582 - DNA, 577 bp, Arabidopsis thaliana columbia
cttccaggtgacggagcatcttgagaatgctgccaagaatcttagcgtcaaggtcgttcctattgttggtgggatgttttcagagaagcaggaaagacgtttaaaagagaaacctgaaatagttgttgcaactccaggaaggttatgggaacttatgtccgctggagaaaagtatgttgtagaggtatgcaatgcataaacggagagtaaaaagaatcatgtgcttccattagtccggtatcttgcttttacattaacagattttgatgtagttattggatttatgcgtagatgcagtaatcagtttgtaatctaataccattttcctgaagttgagtatgtctgctaattaaggcacgtgtaaaattgttattactgttatatagctattcttagacactaaattgttctgtcgttttctaatcatctttggcagctgcattccttgtcgttctttgtgttggacgaggctgatcgcatggttgaaagaggtcatttcagggagctgcagtctatactcgacttgcttccagtgacagataaccgaaatgaagggaaaacgcaaactgtgaagagt

SEQ ID NO: 13583 - DNA, 521 bp, Arabidopsis thaliana columbia
tacctcttgtttcttttaaaatcttcataatacagaatgacttttgttgatcaggtttattggctttccattgattatcttgttgttgccggatcagcagtagtgagttacccctttcgtttaaattaacgaatttaagatagaagctcttaagttatttgtagtatataactcttctcgctttcccaggtttgtggtgcatatttgactgcttccatgtatgtggagtattggtgtgaggagaaatttggcaatctaagccttggagatcctgatttttcttatcatgataaggtactaaacaaggaatgcatgttatcgttcctctggtttccatcttaaccaactaactcattatgcttattgattaatgagtagtaactttatcgtcatctatgaaactttcattggatgcacttttacaaaattgcaaactcaggtctccatgtaaaaaaggggattggtaataagattttatttgcttggtttcatgcagcagagaaaatggttgtttgtgccga

SEQ ID NO: 13584 - DNA, 276 bp, Arabidopsis thaliana columbia
gttgagagatcagctaagcagtccagatttgctgaccgaggaacttatagacagaactgtctctaaattcatcaaccaagtaaaagacggaacttgggaatcaggcgggtggcctcagacattcactgactactccatgtctaagcttgcagtcaatgcttacacgagactaatggcaaaagaacttgagagacgaggagaggaagaagagatttatgttaacagcttttgccctggttgggtggagactgcgatgacttgctacgccgaaatatg

SEQ ID NO: 13585 - DNA, 524 bp, Arabidopsis thaliana columbia
gtacttcagggacttgtaggattcacaaaatggttatcaatattgactagttgagtagtcagatcgtatggtagcaattaattctgaatgatttaggagaagcaggaaattttattaacaagttttagggtttgttctgaagggcgtatttagattcacttctatgatcgtaattaattctgtatgctgttgaaactgtatcttgtggtagttttaaacttggttttctgtaggtgaacattccgaaaactaagaacacttactgcaagaacaaggagtgcaagaagcataccttgcacaaggtgacgcagtataagaaaggtaaagatagccttgctgcccaaggaaagcgtcgttatgatcgtaaacaatctggttatggaggtcagaccaagcccgtcttccacaagaaggtatactcgcttttccttgtcttgatctctaattactgtcttgtatgtgagaccaatttaggatttcagaattgactctgtgaaatatgtcttataggaatgatttgttaa

SEQ ID NO: 13586 - DNA, 508 bp, Arabidopsis thaliana columbia
tgtggctgctggtctcactcaatatagagcttactcaacagatgaggtttcttcttgtaatctatacattttccatttttaatgatcttgaaaaacaaaagctaatatataagatttgtttgttatggtttattgcaggttatggctttgcttcaaaggggaaatcaaaacagaactaccgagcctactcgttgcaatgaaacatcttctcgctcacatgccatccttcaggttagaatttgcattcttctcagtttcatattgtgtcaaatcaatagtgtatcatcgactttgaggccaggaatgtcttaggttgatcttttgttgcggttctctaggtaatagtggagtataagactagagatgcttccatgaatatcatcagccgggtaggaaagctatctctcattgatcttgcgggttctgaaagagcgctacgaactgatcaaaggacgctcagatcactggaaggtgcaaacataaacagatcacttcttgcattaagtag

SEQ ID NO: 13587 - DNA, 758 bp, Arabidopsis thaliana
cctacaaattcatccaagccaccactttttgatttcatctgttctgcgaaaactctgagcccagctgccacgtcacccatatcatcgtactctgacgcaactctcaggttcatcttctccaatagatctagatggttgttcgttccctatttttatccaattcaatttcagatctgtggaaacaaataaatctgtaaaatttcggattgattttcacctggagctcggatttgaccatagatgaaacactcgtgaatagattttgtagcgattcagctagatcatctcgtgaatccgccattgatgaggatatttacttcttttcgcaaagacaaagacaaagacaaataaacaatggctcttctgttgtttagggcactttccatatttgttgaattagtgatatttaggttaagctacacgtggaggcttattattcgttgatatcaactattgtccatgtctgtaagcctctccctacgacagaggttttcagagcagtaacaaacaacttacacatgagagttaacattgcacagtctgagattatactcgctagattcttttcaagtcttgaagaacaacatgtgcagcgtttcttccaggtgcacccataactccgcctccaggatgagctccgctgccacacaagtagagacctttcaaagggcttctgtaatttgacctgtttcacacagtccaacaaagttttgaatttcataatcataaatcgtaaagactgttttgagtacttcgga

SEQ ID NO: 13588 - DNA, 456 bp, Arabidopsis thaliana columbia
attgatgtagatcttccctccgaacccagtctggtccatgattcctatttgagctatgtccgaaagttactgctcatcgtagttaaccatcatagcgttcttattgttgtaagttagttgttaaggactacatgatttttttgggattatcgaataatttttcgataattggtttggtagcgtgataataatgtagctaccggttctattccacctccacaagctgtttccagagataacactgaggttagcagatatatggattatgggttaacaattattataccgctcgccgtctgaattggttttggttttgctatagtgcgggaacaatactcctaatgatgaagattcccctctgaatccagtatggatcatgattccgaggtgagatacttcgaaaaatacggctcagcgtagtaaccatcatagtattcttattcctataagttagat

SEQ ID NO: 13589 - DNA, 752 bp, Arabidopsis thaliana
agtggtgttggattgattgcacatacactcaggaacagggtactttgtaacatctcttccagctttgctaatccttagttctggctgtcctagagattgtctgtgtaatttctttatcatcttctcaaactctgtttcagtcaatgatgagttcacaaagtatggtagcatatgtcttttgtttggcgttataatcttcttgtgtccttcataagccctgtgcccctgaaagtttaattttatggcatctcttagtaaccaaccttaagaatgtgtaaatgcacaccagaggttgacctttgatacaactgagacctaagaatgtgtacctgaattgcgtggcccatgttccctccatgagatgccataaacacatcactctccttacacactatatagtcgattgctgccattatcgaagctcgttttgcgaaaggtttgagttcaagaggcaacgcaatatcgtacttgttgtagagatgtgggaattcacttgttaacggtttcaaagcttcctttccaccgagcggttcccctcccgcccaatagatcctcgcatctcttggtgctccaagagctctaagcagcctgaattcaaaaaagtaaaaatgagaaccgatgtctctctcaacacacaagaccttgtaagaaaaaccggtagctcactcatgtacctagttacttgcgtggcatttaacggacagagacccgcgagttttctctcgttagatgtcatactagacttggctgtt

SEQ ID NO: 13590 - DNA, 887 bp, Arabidopsis thaliana
tcatctctctcaacaccatgtatgcaaaatgtggccaagtgcaactgccaagattctgtttgataagatgaagtcacctaacctgattttgggaacgccatgatctctggctatgcgaagaacggttatgccagggaagctattgatatgtttcatgagatgatcaataaagatgttagacccgacaccatctctataacatctgccatttcgcgttgcgctcaagtaggttctcttgagcaggctcgcagtatgtatgaatatgtaggcagaagtgactacagggatgacgttttcataagcagcgcattaatcgatatgtttgctaaatgtggaagtgtagaaggcgcaaggttggtttttgaccgaacacttgacagggatgttgtggtgtggagtgctatgattgttgggtatggattgcacgggcgggcaagagaagcaatcagtctgtaccgtgcaatggagcgtggtggagtacatcccaatgacgtcacttttctggggcttctcatggcctgtaaccattcaggcatggtaagagaaggctggtggtttttcaaccggatggcggatcacaaaataaatccacaacagcaacattatgcatgtgtcattgatcttctcgggcgtgctggtcatctggatcaagcttatgaagtgatcaaatgcatgccggtccagcccggtgtaacggtttggggagcactcctaagcgcttgcaagaagcatcgccacgttgaactgggagaatatgcagctcaacagcttttctcaatagacccatccaacacaggccactatgtacagctctctaatctgtatgctgcagcacgtttgtgggacagtgttgcagaggtgcgagtgagaatgaaggagaaaggatt

SEQ ID NO: 13591 - DNA, 946 bp, Arabidopsis thaliana
gtcaacgttctgacctagaacctccacgtcatcagcttctccccatcgtagtggtgccacgttgactttcccgccgaatctctcaacaatttcagcgtttgcttcggcgttgaagttgagattatctaagacgtgtgggagatccgtcaccgtgacgttagcagagagagtgattgccgcagcgatcccgacgaggccggttccagatccgagctcgagtatgttcaacggcgatggttttttcagcgacaagagtgtggcggtgagtggactcttgctagggtcacgtcggtagttatcaagcaacgtgacgaaagtagaagccgctggccagagctgaaaggagagaccttgtgacgtcagctcacgaatcacgactgttgactcgatggagctgatgttatacttctggagctccagtgcaccgtcacgcagaggagtaggaggtaaactctcaccgtcgagaccattctcgcctatgaggagcattttagcttcgtatgtgtcgttttcctcatcgtcgtctcgcagaggaagagtaatcattccactttttttgcggcgccgatgttgtcgctcgcttgttcactttccatgtttactgaactagggacctttaggttaagttacacgtggaggcttattattcgttgataacaactgtgaccatgagtctgtaagcctctgtctaagacagaggtgtttcatagcaatagcaaaggccaattccctcacgaatacggaatacatcaatgtgcagaaagtgaagacaaaacaaattgatgtttttggaatatttatacatttgatgtgcatgaatgcatcattaaatcactggtgacttctgtacagatcgatgctccctagttgtagtctcgaggtcgaattcacgtctcgtacacttaaaaaccggaacttgcaacatacacattagatatgattatga

SEQ ID NO: 13592 - DNA, 508 bp, Arabidopsis thaliana
cctgcattttaaatacatgatgtgtcatttcaaacactaaatcaatgcggctatcaagttttttttgtcatgtttcaaacttattcacctgattcgtcctcagaaagttgataacgtccttggcacctgcatctccaaaaacaagatcttgttccagctgcccaagatcccgaagtcctgtgtctctgattattctattaatttttccagctagctgaatttgattataaagtaaaaaaaaaaaactgtcagcaaccacatctaacattgaattttgagataatttaatggtgagacaaacctctacatgagtggagagtttgtcaacttgttctccatattgcggcaaagcctgaactattttctgtagatctcgtgtagacaactcgctaccgtccctgcgtcacattagccaaagatgttagcaatacatatcaaaaaagtctgtgagggatcacgaatccatatcgaggataacaagaaacttaaagtcttccagatatcaaac

SEQ ID NO: 13593 - DNA, 520 bp, Arabidopsis thaliana columbia
tctagagatctcctcaagcaacaacatcaatttctcatgtaaatcactaatcattaatcctgtgcatgaatataccttttcatttgcagaatttctttatgtttggatttggcatgtcttccaggtttacgttgtatatttaggtgctaaccggctaaaaaacgctgctttggcttcaagccaccaccttcatcttctttctaaagtcttcacaaggttaccttcttcaaaactcatctcttctacagtcctttttttcttgtcagtcaatgatctcgtccatgaatttttggagatgtcgttgtagcaaagacgatgcggaacaatccatgttgtacagttacaacaatggcttcttaggcttctcagcaaaactcaactcaacacaagctgcttctttagcaagtaatacttccatctttatattttggcggcaatatagttctcatcattaaagaaatcggtttggttttggttaccttgaataacgaactttttatcggaaccaataaacatgtaa

SEQ ID NO: 13594 - DNA, 532 bp, Arabidopsis thaliana
gtgagtttatcatagctgaacattggactatatatatcaaataggatgttcctgtcgagtgtagttggttaacccataaagacaaaaagaacagttgtaccattgactagctatatcaaatatatgattagagatgatgatatacgtgaccataaatatttaataagcaactctcacaaatagagcaaaacaagaaatgttgaagaatatggaaaccaaatcatactctttacgtaaattttagcaaccattagatccctaacaagccttcccattttttttccttctggattataaaaagaaaaagaaaagaagcaaggacacgaatcttgagttttgaatgatcttagattggtctttgggaattaaggaccacgtttccttcggaagcataggcaaccctgttgctggtcgttaggaatcatccctcctcccttggttgtgtcaatactctccaacattggtacaacctcatccatctccggtctcttgtccggatttgcatccaacatcgcttcatcacagctgcaag

SEQ ID NO: 13595 - DNA, 579 bp, Arabidopsis thaliana columbia
tttcttatatgcttttgtatgtattagtattatatcaatatgtaactctgtcggtattgaccaattgaaattaatagaatgtaattggttctgtcaactttgtttacaaatatttcttgtcgatccagtttaacacgaaacaaccccaacgaatctgaggttaacctaaaagcaaaaaagtatctaaagacttttaacttttggtgccttgtttgggttacatgtatggctcatctgaccctgtaagagagatgggaccaaatgaaccattgccttccaaagttgcaagaacataatagtcgtttcttctcttgtgtggtctctctttaaaccgcacagccaacacctgaaaccgcacaacaactccaacagcaatctttgagaggtcgtctttctgaaaatgcggtttctcgtcctccgacaatggtgagtggacataatgataatgtggcattttcaagagtgagaggtatgcgtatctgagtggtcctgacctgataaaagctccgtgccacaacactttttttacagtccttgcaagatactcctcttgcaggcaagaatgtgcggcatgtgaag

SEQ ID NO: 13596 - DNA, 654 bp, Arabidopsis thaliana
atcaggtgcatcaaaaaccctacccagtattatgcaaagtaggatgcaacaatattgtttagatgtgttctctaaattatcccaataaaactaactggattcatatggttaatccctaatgcacgtaggttttgcgcaattcaatcaacacaggtggggactgatgaagatgctctgaaccgtgtgattgtcacacgagcagaaaaggacctgacgaatataactgggctgtactttaagaggaacaatgtgagtctcgatcaagctatagcaaaagagacatcaggggactacaaggcctttcttctagctttgctaggacatggaaaacaactttagagttcatcctcaacttaacaccttaaaacagttgcatctcttctaattttctagtatggaataaaactatatttaacgctgaagtaataataaagttttctgtttgatgcttcctcaatcagttctgttgtttagcttttcatagtaaaacaggaattacataattttccttaataaagacattctttgaaggacacaaagaaactaaacagactcactgaaaataagggaaacatgtacatgtatgggttctttcctccttagctgcgtaatatggctgcagcaataccagcaacaacccctacagcagtaaca

SEQ ID NO: 13597 - DNA, 490 bp, Arabidopsis thaliana columbia
ctcgccgaagagaatgggcgtgtcacaaactcagttacggcatatcttggcggtaggcattgtgacacagactggagcatacttcttcttggcagcttctgttcctctctttggctcatcgtctgccattgccaccttagctaaggagcacacagctgcagctgcactgtgaagacaagatccctcctcatcttcatgctctgttcttgcttcttgttctccaagctggttgtgttttcactcccggaggctttgaccaccgtgaggcttcgtctgctgttgctggagatgtttgccggaaggtttgagacggtagggagaaatgaagatgtcatggtcattgacgccattgcaattggtaagttggattccacgtgtgatctctttatctctctctgtttcttgtgtatctgatgacttggtgatggattgtgttttaaaagttggggatgaccagttccttatccagaatatgaatttatagcaaatg

SEQ ID NO: 13598 - DNA, 680 bp, Arabidopsis thaliana
agctatgcccaccgtcgtttggtatgcgtattggccctctccatcatcggtaccactcattctgacgcatcggaaaagtgcatccgagctcacttcatctggaaatcttgtctctcccatctctaaccctagcaaagttacacaaagttagggccaaaacttcacaacaaacatttatcaaatcctaacaacaaaactatgttcatttttcaaacacaattttttgttctttattttacttagcttcttacattaatatttaatagtttcatcattttgaaatggaatttcatttttacatttcttagattgcttattgcaatttcgaaatgatatttgatcgaagtaaaactgatgcattatcatgtaaaaagaaagatttattaggcaacaacaatgaaaaactactgaaaccaaacctgatgagtctaaagtagcatgttgattaatgtctctatacttcccaactctgccgctaccgccggttgggttggaggttggcgtctgtagctgctgctgccgctcacggcgtttggcaatggggatcacgtgctcctcacgtgggtgggacagtggagtccgttactcttgcagcaagttctacaccgcccgtgcgtgcaccctttcttggcttggtttcacactcttgacagcttatcgttagagatctcgatgacgtg

SEQ ID NO: 13599 - DNA, 369 bp, Arabidopsis thaliana columbia
cctgtcgcgttccggcgaggaatctgaaacggttacgatctaccagcaaacgatggaaccgtttattcaaagatgataggagattcgcaagagagcacatgcataaagccccaaaggagtatctacctctcatgttgacaagcgagtacaggatctgtccggtgagcatcaatctccaaggagatgttccttctgtagtgttaaagagagagcttagcctaccagatccggattattcacatcaattcgatataggtcgagtctttcactgcgacggcttattggtatgcaaccacgtaggcaagaatccccgatacggatctaaaatctgtggtttggacccgctgactggtcaaaccaggtggatcg

SEQ ID NO: 13600 - DNA, 590 bp, Arabidopsis thaliana
ggaataacaataatcatcccgagccattacatcaaaccaaggcttattattacttaatctgcctcggcataagcagtttcgagatgagcttgttcggcttctctaacttctttctcagtcttccttcctttcttggacttgtagtaaacactcatgaacgttccaatagctctatacttcttgcggcactcctcatacaattcaccattaaacattctccagaagctcttctcgtcgagctcagacaccgcgtactgaggctggaatccatggttctctatcagccatttctccatcctacgcactgcttctgatccatcaaactcttcacctcttaggacacagccaggtgcgtagtagactccaacatcagtgtacatctgtgcatcttctgtgtctccttgtctgttttcgtactcgaagcctggctctgggtagatttggcctttgattggctgcttgaagagtttgtgtgggcaaagcgaaattggatacacctgaaagagaacaaacaattcatgattttgttaataacatcaaaagaaactttaactagaagatgatcaatcatgaaaccgagcttttagttt

SEQ ID NO: 13601 - DNA, 636 bp, Arabidopsis thaliana columbia
tcagacctaatctattttgcaatctcaccacctctcccaagaactccctgctcttctcacaagacacaagtaacgatacacagtatcttctaatccagcaccattattatctgtatcatcagaaaaaaactctcttacctcttatcaaatatgaaaactaactaaaacaagatctcttaccataattgttccttgaatgagccattttagcaacgatttagtgaaacaagttctgaaatcacaaagccagaggacgctgaagaacatacgaaacagaaaattagggtttaagttaggtttcaaataagcaacagaaacaaacattcataacaccaaaatccttcttcgtttctctatagatagattatgtaaagctcacatcaagaaacctaatcaacgaagatcaatacgaaaatcaattctcacgcaaccaaccgatcgataaatcttgatagtacttgaacattgcttagaaaacggaaaactcgaaaacagtaaactgttaccagagaatgaaacaaccgatgatcggtgaatccgccgaagaagcgtcgtctcgccggaaaatagcacggctctctccgtctttttcttctgtgggttttggatttgaattgaaagagtgtgaagatgaga

SEQ ID NO: 13602 - DNA, 415 bp, Arabidopsis thaliana columbia
tgtgaacgttgaaccttcgctcacccggcttgtcacagtgagttggcctcccattaactcaacctgtaaacaaacagagaaagattaggataacgagcttcattagtttcttctgtagtgttgtaaaatcctaataatagcttaccagctgtttacaaatagcaagtccgagaccagtcccaccgtattttcgggcatgatcagcgcttgcttgcatgtacttcttgaacaaacatggaagagcgttttctgcacaagaacaccaaaacatgaaccaggttaatatataggttagttggagttttttagtcttttcatgttcatttgtcagaattgcttgcttgcctgggattccaattccagtgtcccatacgtcacagcaaatccaaactgaagtctcggtcaaaccgttttg

SEQ ID NO: 13603 - DNA, 454 bp, Arabidopsis thaliana columbia
atctctaacgtccgccagtgtgtgaagaaaaagaaaaagattgtacctttccatatgcgaaatgctttctggttgataggagaaccaaatacagtctgaatcacatcaaacagtatgctctctggagtgttcctcagttcctgaactatctgataaatcgtcttcccgttttcaaagtaaatatgattgtttggatgctttgttttacatccagcgtgcctctcgaatgcatacgcgttaagcaccttgaatgattaagagtcaaagcaaagtattaaccagtgagtgttccgcaaccagataaagaaagcaaaaacttttttgttgacttacctttgtgaaatcgcaagtttgacatccgcagagataacccgatcctttgatgactcctcgaagctcctaattttaagttgtttcaatgcaataacaaattccaaggcttaaggaaaatggt

SEQ ID NO: 13604 - DNA, 526 bp, Arabidopsis thaliana columbia
gccagtgtgctctaaaggaaacgcacagacatacaaaagattggctggctaatctagccagctcaacccaactttgcaagaaaaatatgcgaaaaaatcagccttgcgctgtttatgcttcggctcggcactgcaaatcacacggatgacaccatcacgcttaacgattttgcagttacggcataatttcttgacggaagcacgaactttcatttttactctccgtaacttctcgggcgaccaattatcggccgtagcctttcaggttcgccttcttcaatgcagactcatactgactggacatcatcagagtttgcacttgagccataaagtccataatcacgacaacaacgataagcagtgaggtccaccgaagtagaacggtactttcattgcatcacgcatgaactccgggatcaggcagataaaggtaatatacagcgcaccaaccatgggtcaggcgggtcattactttatcgatatacttcgccgtttgctctcccggacgaattcctggtacaaatgc

SEQ ID NO: 13605 - DNA, 393 bp, Arabidopsis thaliana
gactgacgaagatttcatgacgtaacaacaggacaataaatgagaggcgcagaacttcctagagagtacatatctgacacttatcactcaatgcggaagagtgagattcagatggaggaagataaaggcagggggtttcaactgatgacaggcagtagttggattagtgtgatttacaaatctaaagacacgagtcactatatcccatgtgacgcagtatagatgtggaaggtgatatgttttatatagtgtctggctaaattattgatggtacattagtgggttttgagaaagcagagtaagaagatgttttgcggagatgtagtgatgggatattggcaattggaaaactttgaggatattatgatttgaatagtgatttgcatgatgtgg

SEQ ID NO: 13606 - DNA, 1022 bp, Arabidopsis thaliana
caaaagttcatggatacgcacaatgtatccaaaacaaatcaaatagcaataaccaaaacaaatctcacaagaatatgtatgttatgtagtaagtaatattcctaataacaatgtatgcatagcacattcaaagtcaaacaataatatccctaataacaaagtaataatgtatgtgtagacttgtgtgtagtcatatattaataattatagtattgtttttggcacgatgtatccatattcagtctttttatattgtaattatgagctcggtcaataagtaacacgatacgtctcgtttgcctcaagaaaaagattcgtctctgtgtataaatgaagacttggccaagaaagaaaaaaatcagatctcaaaaaatggtttcataactctcgtttttctctttatcgattcttctttcgctcagtgcccaattcaacaggtatttttgtttgtttctcatttttttaaagcatttttatacataggattttgtttagtttttggacaaatccattggctttttactaaacgttttaacattaatattaacaacgtagttttcttaataataataacagtttttctttttcttttggtaaaaaggtataagtattcgatttagttatagttcactagttcaagcaaactcataaaaatatatcctgaaatcttcgtacgaggtaagtaactcaagtctttcctcatcaggtttaaaccaatcctatgaatagaggaggttgtggtggtggccctggtagaggcggtcgtggttttggtggccgcggaggaggtcctggttttggtccaggaggtcctggttttggcccaggaggtcctggttttggtccaggaggtcctggttttggtccaggaggtcctggttttggtggccggggcccgagaggtcctggttttggccaagaggcctggtccttggagtggccaagaggtctcgtcctggtggaggaggaggcctggtcctggtccttggagtggccaagaggtcccgtcctgcggagaggag

SEQ ID NO: 13607 - DNA, 556 bp, Arabidopsis thaliana columbia
agaggatccccaaaaaaattatttcgtatgttacatatttgataatgttcaaaggttgatcttacagtttttttatctttctacttttggaaatttctttaggtttattatagcgaggacacatatattcttcctccagaagctataaagggaaaatgcgaagttatgaaaaaaactgatatgcccttatgtcgtgagtatccaattttagaccatgtctacttctgtgaccgtttttatgactcatccaatggttgtctcaagaaggtatatattaattaattttctaaatagtttttgaagataatatatttattgttggttccgtaaaaaagttgaacggttgtttctcttaactattatgtaacagttgccttacaatatgatgctgaagttctctactattaaagacgacacacttctaagggaaaagaagactgaaactggttctgcaatgcttctgaagcccgatgaggtcctaaagggaagcgtctactacactagatatttttgcaggatgtggtggcttgtccttatggactagaaaggctggtat

SEQ ID NO: 13608 - DNA, 573 bp, Arabidopsis thaliana columbia
cttcattcccaaggaaagctacagtgacagcttcttgttcctctgtttgctccgcagcttccttctttggtctcttccacttctttgtggatgaagtaccatcatcctcgaaatcttcttgttctctgtctctgtgtagatacacccacagtttcctctctgaatcgaaattggacacaagggtcccgctcatagtgcaaacgatccaaggccccactcacgacttgattcacttgtgaatcagacacatcctccacgatatactgcgagtctcttattaaggtacaaacatcagctcttgtcccaatactaccaggcaatctggcggcagatctctcactagacacaggattgtgacatgtggtggtctctcgcgtttcaacatgaaatggtcacgagctttcgaggttggctttcctccgcctcttctcagaggagcaacaattgacttcttaccatcagcagctgtgtaaacaaaggctctgtccggaattgagtactcagaaattctctttgcggaaataggctcttgcttcttcagaactctgggtaatcgtactaaggctcttttgt

SEQ ID NO: 13609 - DNA, 582 bp, Arabidopsis thaliana columbia
tctcttcattaacttatcatgcatatatatctaatatacatgtggttacatattccttaagataaatttttgaaatcttatacttctgttgtttttttggtatgacaaagttgcgagaagaactacaacaaggagtgtgataactgtagctgtggatcaaactgcagctgcgggtcaagctgtaactgttgaagaaattatcagcatggtctcaaaccaaggaaaatgggaaaaaaatgtgttttatgctaagagatctttgtgtatgttggaataaagacttggcattgtgttgcgtaatgagtaagagtaactattaagcttgcttgacttgttcctgctgtgtaatgtttttatttgtaacctaaatcataaatagtatatgtattcttttgcgtttgtatgtgtatatgtctcctctctaacgaaaaccataatttaaaaggctatacatattttcacgttttgactaaaatactcctcgcattttgcataatcatataacaaagaaaattgactacaataaatcgttaaactatttcattggacaatagttgagcacttctccaagacaattcaatt

SEQ ID NO: 13610 - DNA, 558 bp, Arabidopsis thaliana columbia
gccagtgtgctctaaagtaaaacccctattccattgggcgtgactgaaaaagtcaccaaacagcacaaaccgaagagtgagaaacctatgctttcaccgcagcggagttggaattactggaaacggatgagcgtctggatgcgctgctggaacgtctggaagcaggcgaaaccctgagtgccgaagagcaatcctgggtggatgctaaactggatcgtattgatgagttgatgcagaaactcggcctctcttatgacgatgacgaagaagaggaagaagacgagaagcaagaagacatgatgcgtctgctgcggggcaactaacggattgccgccgtgggccttcccgttctgctgataacccttccggttatatgttatctggtgtggttattcgttaaactacagcggttgtcgcggcgacaaaagtggctgcgcaaccggctgatgacccgaaacgggcatccgccggtacgccgtagccgccagagacgccatcggaaggagtgagcatgtctgtacagcaaatcgactgggatctggccctgatcagaaatat

SEQ ID NO: 13611 - DNA, 602 bp, Arabidopsis thaliana columbia
accgatatttggtatctgtaatatctgcatgatgctatcccttgtatgctggaaaacacgattcccaaatgtaatagacgacttttcaaggtttatcgtctgtccggaagcagtctcgtagtctttaaaaatcgcaagcagatttgagctatttttatggtccgccttgaggaagaagagtgagtcatccgcaaatagtatatgtgaaatctgaggtcttccattactaacgcgtataccttggattaatctctctctattcgcttgtgttatcatcgagcttagaacgtccgcacataagatgaatgattgtggcgacagagggtctccttgcctcagtccgcgacttgcttcaaaaagtccatatgggcttccattgattaaaacagagaaagagactgaacgaacacataccattatccactttatcaactgtgacgcaaaacccttttttcgtagtacacctccagaaaattccattcaatccgatcatatgctttacttatatgagttttaatggccatatatgaattagcacaccttttttggactcgtagagagtgcatgatctcatgagcaatgaccacattatctgtgatgta

SEQ ID NO: 13612 - DNA, 607 bp, Arabidopsis thaliana columbia
tcccttatgaaataattaaggcttacgagaatgactgtgtcacgagcggctaatgctaaaatatcagcacaagagacaactccaggacacgcggcttcgagctgcgttttggcgttgtctatgacttcaaatccttggagattgaggttcggaccggcggttctctcggtgttagctccggatataaggatcgaaccgtcacaaccttggacaaaacagtcgtggaaatgcattctcagtattccgggtgcgattctggggtcagaactgaaaccagcattcacggcgtttcggacaatagtctcagctctaggacacgtagttaagtaaaacccaatcctagtgccggaaacaggaccaggccttgcggtggcttggcatgaaccgagatgatgagacaattaaggaaggttattaataagcacaatgatctaaccaaacccatcttgtgtttaaattttagggttttagagaagatgaagtgtgtgtttaagttatagtgagtagagttagttcgttatagagtactatttatagaggagattgattagtcacagaatgacgtgtgagtcacaaaactggctttggtgtttgtgggggatagatg

SEQ ID NO: 13613 - DNA, 322 bp, Arabidopsis thaliana columbia
agggggaagatccggtggccttgaacttaggatcaatgggaaaaggagaagcttgggtgaatggccagagtataggtcggtactgggtctcatttcacacttacaaggggaacccttctcagatatggtatgatattgttcactctccttatttaaataatcttggtatattagttggatattattttttgaagctatgttctcctactttaggtaccatataccgagatcttttcttaaaccaaacagtaacttactagtcattttggaagaagaaagagaagggaatcctcttggtataactatagacacagtgtcggtc

SEQ ID NO: 13614 - DNA, 509 bp, Arabidopsis thaliana columbia
ttccatatcaccctgaaaaagccatgatcgggaaatcaagaggtcgtcactggataaatgtctagcagcgaaaatgaaaatggattcaactagacacaaatgaagctaatgaaaatgcatggaatggcttaccccattggactctggcctgcactttgcatgcactataggacctaactgagacttgtccatatctgttgttgattcttcaggagcattcatgtataccgcacctttgtacatccattcctcggtttcatcactataaaagtcttcaaatggctcaccacataatgcacatgaagtttggtcttcatctgcaggaactgccatatcttcgtcatccttcttttctgttgttggctccgtgggcaagaaccctggtactgcttcagctccaagtgcttctgcaccactgagccacatgctagcacttacaaaccatttccgagaagggttctgcttatggttcttggacatcctgttcttggttacatgccaatccatgt

SEQ ID NO: 13615 - DNA, 485 bp, Arabidopsis thaliana
catgatctttagatatatcatgactatacgttgtatatatatttgtttcccttctgctcttgtttcatgaagccaatctacacttcgatgactacgaattcatttcaggttggatgagtttatggcagggtttaacactatatccttaaagctcaaagaaatgtatcaggttagtttaccttttgaacattgtttacaactccaaaagcttttggctaataacaatagggtgtataatgaagatatccagaactgagaagaaaacttaagaatgctgagtttttcaaatcttacaactagaagatacttctttgcttggcctatcttatagattttatctttgtctctgatgaattatacaaacatgattctgcagatgatcactctgggaggtgatgcagagctggagctggtagactcgctggaccctttctcagaaggtgtggtattcagtgtaagacctcccaagaagagctggaagaaca

SEQ ID NO: 13616 - DNA, 549 bp, Arabidopsis thaliana columbia
ttttttcaagaggcatatctttagtcccttaagttgcatggaagaagaaatgaaagatcactggctagtttgtgtagctttttctagaaagtaattttcatttcagagttcaaaagatgtactggttttcttgcagaatgacattgttgcttggtcctcctggttgtggtaaaaccactcttctacaagcactttctggaagactttcccattctgtaaaggtttgactaaaatacataggactgttgaactaacatcgaataatatattaaagatcacaagggttatcttcactctacaggttggaggaaaagtaagttataatggttgcttactttcagagtttattccagaaaaaacgtcaagttatatcagtcaaaatgatctacacattccagagctgagtgtgagagagactctcgacttctctgcgtgttgccaaggcataggaagccgtatgggtgaggacctgatttgtcatattcattcaaaatggagggtatttttgaacttagttcacattaacaagctatggtgtattcacagaaa

SEQ ID NO: 13617 - DNA, 484 bp, Arabidopsis thaliana columbia
  unsure (1)..(484): unsure at all n locations
nnnnnnnnnnnnnnnnnnnnnnnnnnctaaagctgcgtcagggaggacgaggtcgcacattataacgatttcgtagcaattggcagctaaatactggtcttatcagggaagataatcaacagctaacatgtaaataaccttcaacaccgtgtaatttgcaacaagccgcacaattcacgaaattagcgccatcatcgacggaacttcttataacgtaaggtgaaaagctgaaaagccagccctgcgaagatgaggggctgcaatgagataatcttcacagaccacaaataatgtagggatgccaggatcgcgacaagatagacgacattacgcagcggttgctggggattacccaattttcactgcatcgtctggatagatgtgaatgctaaagcacgcaaaattaaccgattgacaatgctcagcattaaataggttcgagtgattaatttgtagtcaaacaaaatcagattattcacccatg

SEQ ID NO: 13618 - DNA, 574 bp, Arabidopsis thaliana columbia
gctaaaataagccgagtttatccgtgccaatacacgagtaccacgatcctctctttctttggcgtgattcaatctgctttgttgagtttgatctcggagaggagcacatctatgtgggtcgttaaagacaagttccaagttttagctttactttattcggtgagtaatccaatatactatttaatcaacctacaagatctatatgtcaacatatataaaattttattttagttgtaatttgtaaacaaagaaaaaaagaaacaaaaaactatttatgtttgcatttgacatggatattttctttcttgtcccccaatgacttgagttcaacttttttcatgtcccatatctatcttttttgctatcttttcttcttcgataaatttagtttccgaatccaccactggtgtagggtatcgttggatcgggattgtgctacgtgggaatgtcgtggtgtcccgccaaagaggtgcggtgttcacgtcgagcttcatacctttgattcaagtctttgctgccattttcagcttctctttccttcatgagcgaatatactgtggaaggtacctaatgt

SEQ ID NO: 13619 - DNA, 583 bp, Arabidopsis thaliana columbia
caaagtactcgactttctcgtacaaagctacacaagaacaaaaccctcgaatctaaattgctatagagaaagccacaagtgatagaaatggtaacaatgacaagagtaatagtaagtacctgaatataaggagtaagaagagaaagttgcaatgcccaaccaaattgaactccagcggcaactgtacaactaagaaccaacgtcactaaactacaattcttcgacacagattcaccatcagccgaatcagaatgattcgaaggagaagcagattcagagaacgacgaagaaccagattcgttttgacgatgcttggtgaccgtctcaagttcaatttccttcctcaaattcctatacggaaccgagatcgacaccgagtcactcatcgtcctcaacacacagatccctaattcgtatcaaaatcaatttctcattccgatttagatttctagggttttgatctcgcgatctagattcggagacgatgatcggagagtcaaattcgggcgggtgaatattttgatgaaaccgatttttttgacgtgattgagagagaagacgcggaagtgaagaaggaaggaag

SEQ ID NO: 13620 - DNA, 732 bp, Arabidopsis thaliana columbia
ttcttctcattactcaaagatactggacttatagatggaaacccatcgatctgcaattcagaggggaatgatgcaaatcttacccgagcagttatttgctatggcatgtatccaggaatctgctcagttgtggtgagtacttctcctgaatttatttgccctgcagtggcctctctgtattcagcagttagctttattgagcatctatatgacacatgcagcataatgagagatcattttccctgaagacgatggaggatggccaagttcttctttactcagtacgcatccatccagttaaaattaatgatggtggtatacctaacataacagtttggttggaaatttgttacattcattttttttttccccatagaattctgaaaatgcaagggagacaaaaataccatatccgtggttggttttcaacgagaagataaaagtgaactccgttttcttgagggattcgacagcctgctctgactctactcttatcctctttggcggtagatctccaaaggagacactgtgagccttttttctctgttggacttgcttgtactcttgtttttgttatcaggattgacagcaatttcattgtcaacttttgtttttgggctttttggcaggatggcacctgaaaatgttgggaggatacttggagttttcatgaacctgatgttcagagatatccaaccttgaagaagacttgcgagctatcagacaagtgag

SEQ ID NO: 13621 - DNA, 1066 bp, Arabidopsis thaliana
tacaaaacgctgttccagctgatcgcacgtttgggactcaaaatccaagcaatcatgtcttttcaccaatgtggtggaaacgttggcgacatcgttactatcccgatcccacaatgggttcgcgatgtcggtgacaatgatcccgatatctactacactaaccgtaaaggaactagagacatcgagtatctctcaatcggtgttgataatcttcccctatttgccggaagaaccgctgttcaggtagtaaacttcaagaaaagtacacatattgcatgtttttgaccaaaaaaaaaaagagttgaaataaacaaattactacttttgtttttccattagttgtacagtgattacatgagtagcttcaaagaaaacatggcggatttgatagaagctggggtgattgttgacatcgaagtcggacttggcccggccggtgaactacgttatccttcttacccccaaagccaaggttgggtgtttccggcatcggagaattccaggttagttttgtaaatttagttacacttcttttgtttttatgatttttgtccctcactaaacggtgcgttttggtgattttagtgttatgacaagtacttgaagaaagatttcaaggaagcggcggcgaaacagggcaccctgagtgggacttgccagaggacgccggagaatacaatgacaagccggaggagactggatttttcaagaaggatgggacttatgtctcggagaaggggaagtttttcatgacatggtactcgaacaaactaatttttcatggagatcagatcttaggagaagccaacaagatctttgctggacttaaagttaacttggctgccaaggtattactataaacatatagggtaggaaaaaaaaacctaattattaaaagaaaacgaaacctaacaaacgaaatgcttgagctaaagagtgaactgattttcttcataacactagaagactaaactgaatacgggatatctagaacaatagttgaagttaacttgtctcgcaaggtaacttgtgtagatgagtctaaattgagtatgtgaatgtggta

SEQ ID NO: 13622 - DNA, 513 bp, Arabidopsis thaliana
tgagcaaaatatgattatcccaaaaagaggttataaattattcgaggagattattgacaacagtgctctctatagatcatttttccaatggaaagatgaataactctcaccgggaataaaagatgttgatttctctgaacccaaaagctattaaaaaaactccatgaagtttccttctctaactctgtagagcggcttgagcaatctcgagagcttcttcgactgaagatgcgcttgcgagtttagccttatcgacaagtggttggcttcttgctagctttggtagaagctggaactcctgtttcaagagatatacataacaatggaagcaattaaaatccatatagttaacatatttacatgaaaacaaaacccatgctgatgtaattgctattgtcaagtttcaatgaccgttccaaaatattctaattttagtctcgcagatctaaagaagcatgatgctctaaagattggctaattcagaatgttaacgagggagatgctaagaaagac

SEQ ID NO: 13623 - DNA, 1749 bp, Arabidopsis thaliana
ttccattgttcctttttttcctaagcaaagagacaatttaggataacttgtcgatattttccataaacaccatttcttaattttgggatacgttttccttattatttttcacaaattcaaacaaaatcttcataatatattttagctatcaaatcacactctcaatacattcaaaacttccataaacactcttagaaatcactaaaatttagtagacagaaatatcagtaaatatttgaatataagtcatttaagcgaacattctataaactgtgtttggtatcaatgttttatagctaacgattaggtgtaaattacacattcacataattactaagatataggttggggttgcatttttttattaacagaaatatatggttcatcttgtaatttgaaaacttaaacccactattttataattttgtcagaagaacaaaaccttgtctttggcttttgttcgtaacctttgtttacttgatcaagaaaaaacattaaaatccgaccaaacaaggaaatatacacattttcaacgcggacataaattttcattacagcgtcttactaagctgttctgttctttaacgcggtctcttcctctcttcaaaattaaacttccgatttttcaccttttcatttccagaatttgttttttaaaaaagagatttttgtgagtgaagagatttagagtaatcatcgggtttaactcgaaatttcattttatggattctctagtcatctctcttcacggcgattcaactagcgtcgtctcaacgcaacactccaccaccacgctctaaagacgccgatctctgcaacggcgtgttcgtttcctacacttacttaaccggtaccaagattataccaaacgacacgaagaaccagccgtaccggttcgaatcagagatcacggtcctaaacaacggccgcgacgagcttaaatcgtggcaagtctttgttaaattcgcccaccgcgagattcttgtttcagcgaccaacgctgttctctctgacggttctagcctcccggctagcgttgagaacgggacaatcttcgccgggtttccatcggcggatttgaagacggcgatcatgacggccggcgacgtaactcagatggaagcacgtgttgagctcgtgggtactcagtttggagttgctccgccgagtgttccgcttccgaagaacatcactcttgttaatgatggatggtcttgtcctaaacccactcaacaaggtatcaaaatcatctgaatcttatgacttgaaatcttgagattttttaatgtattttttcatttctcgtttaattgttcataatttttttaatgaattgttgcaattttaaatattatgtgatcttgggttgcttatgaaggcattaccaagagttttaaaagtcgagcaatatgatcacattgaccaggtctatttgtgatcaatagagtggttgaaaaattctattgtttatatagatttcttgtaaactaaaagtttgaactagtcttattagcaattgagattagaccttaagtttacttaggaaactatctcatgcttggcttttctgataaatgtgtggaatatctgattaaacattttggaatttaagctgttcagtttgcatatttgtttttcttttacttcttgatcataataagactcttattgctgcgagcataaatgtttcctttgtgtttcactgacatttcttttcttctctatggctttttccaggtagtaatgttc

SEQ ID NO: 13624 - DNA, 612 bp, Arabidopsis thaliana columbia
taaagatatagattacaaatgagaagttttacgggtcagaatcgccgtttgcaatatcatgttggttttattgaattttggtgggttgcagtttctctttgtgtttaccagtttctcttttatctccatctggttaaagcagtgaggtttatgtcttcgatcatagaatactttcctgtttaaagtacaaccagttatgggttattgtgtgaatttgctgcctccatagattgactgtaagattagatctttaagttcagtgcctaagcttttctagccaaatgtcttgttatttttctaggctggaatgggtggtggaactggcacaggtggtgctcctataattgcaggggttgcaaaagcgatgggtatattaacggttggtattgtgacaacgcctttctcatttgagggacggagaagagcactccaggctcaggaagggattgcagcctcagagataatgttgacacctcattgttatccaaacgacaagttactagcagcagtctctcagtctactccagttacagaagcatttaatctggcagatgatatacttcgtcaaggtgtccgtggaatatctgatattattacggtatggctttgaaa

SEQ ID NO: 13625 - DNA, 222 bp, Arabidopsis thaliana columbia
caggtgaatttggttgtcaattataatcttcccactaaatatgaaactggagagccagattatgaggtgtaccttcacagggttgggagagctggccggtttggtcgcaaaggtgagttttgattcttctttttttctttctcaagtgtttccataagttcttatcagtttctgaactatgtatttgtattgtaggagcggttttcaacttgctgcttgatg

SEQ ID NO: 13626 - DNA, 504 bp, Arabidopsis thaliana
cacagcattattaaacttcttcttcaacctctgaagtttagtaacaatttggtttttggtagcatcgaaatcgatcagtttcttcacataaatgcaaaaagcatcaatatcctcataaggatctcctttggtagatgtgaaatcaataataccttgaagcaaagcgatttcatccgtctcactgaacaatctctgaaacatcttcttagcatcctctgaagaaatcttcttaacctcatcattagttatcggcttcttcacatgctcagtgtccgatgtcttctgcttcttaatagcttcaggagcagcttccttcaaaggacgcttagccgttgaactctcaggtacagtcgcggcagatccagacgtctctggaattggtttagtccaacaggcttcagcttgatcgtcttagcaggctcggactcgggctcgggcccagaactggactccgattcagattcgccttcagagtcagattcaggcttttgcgaagactcgact

SEQ ID NO: 13627 - DNA, 465 bp, Arabidopsis thaliana columbia
agaacatgcttttctctgtcagttttattataagtgtttctggtctgtgttaggatcctcgacaaccttcctctggttgttccaattgaaagagtcgaccagggttctccctctgttgtttatcagcttggttatcatgttggtcttaaaggccagtacgatggggtaagtaggtcttaattgttaagacactaaatggaattcatgctagatcgttcgattttctaattttgtttttgcatacgcagagcaaagagcagaagttctttatgcacaatcacttggcatttacagtgcgctatctacagagatatccaaactgatgctgcaagaatcgtgggatttgaggttaaccttacaggtgcagttcctgttcataatttgaatgtctcttgggatcccctgtcattcagaactgatattcctccgttgatttgtagtgtggagcatgagtatgagcgagag

SEQ ID NO: 13628 - DNA, 944 bp, Arabidopsis thaliana
cgtccacattagcctataaaatcactaaacctaagagcaaagcacattcacggcgactggaaagtagaaaaccttattgcttcccgcagatctctctctctctctctcgtaactgtttgttcgatggcactgaagaaggcggaagaagtgatcgagagccctcctacttcaagtgaagaagaggaatctggctcataatctgagtctgaaggcgaaactgaatcggagcccgagcccgagtccgagcctgctaagacgatcaagccgatgcctgtcgtgaccaaaccaattccagagacgtccgcgaatgtacctgagacttcaacggctaagcgtcctttgaaggaagctgctcctgaagctattaagaagcagaagacatcggaagttgagcatgtgaagaagccgacaactaatgatgaggttaagaagattgctggagaggatgctaagaagatgttgtttcagagattgttcagtgaggctgacgaaatcgctttgcttcaaggtttaatcgatttcacatctaccaaaggagatccttatgaggatattgatgctttttgcatttatgtgaagaaactgatcgagttcgatgctaccaaaaaccaaattgttactaaacttcagaggttgaagaagaagtttaataacgctgtgaagaatgcgcgtaagaagggtcagacagaagatgaggtcgagtatgctaaagagagtgagaaaaaacgttttgacttgtccataatgatttgggggagcaacggtgttttggttgctggtaaatcatcaaagaagaaagttgcacccaaagagatgaacctgaagaacagacgcaaaggttgtgaacgaaggtcctccattggtagagagatggtgccgttcgggagttcttgtggtttggatgaatctaattactacgggttgggaaatgttgaggatggact

SEQ ID NO: 13629 - DNA, 561 bp, Arabidopsis thaliana columbia
gttttgaagcaatttgtgtgtgtttggatgaaagtagcagatatgcaggaccagctggtgtgtcatggttgtaggaatttattgatgtatcctagaggagcatctaatgtgcgttgtgcgttatgtaacactatcaacatggttcctcctcctcctccacctcacggtatcgatttctttgttgaatttgaattgaggatgaggttaatatgctctgcaattgtattataacttgggttctgattctgaatacagacatggcacacattatatgtggtggttgtagaacaatgcttatgtatacgcgtggggctagtagcgtaagatgctcttgctgtcaaactacgaaccttgtgccaggtatattaataatatcgtgacatccatatcaatccttttaaagaccatgtattatattgctttataaggtcttttagtcctttagaatcttctttcacacttttgtttgataacattgttctgtggagatgatgcttacgtaacgtatttccacttttcccagagatgtatatgaatctgaattctgaaaatatctgggat

SEQ ID NO: 13630 - DNA, 479 bp, Arabidopsis thaliana columbia
tctgcaatttgtctttttgagttaagaaaccgatgagcatgataaatattttgaaatcctgagaatcaacaatctgtgtctcagtatttcgtaaggtaagatacattggaaagtattcaacaaaaacgtataagcaattatgtgtttacatagagaggtcctagagttttcaattgggattctgacactgtttatatggaggagtgttagcttcagtttcctctaccaaaaaatggaatgtacaatctagtataataatatgtggttttaaacacctcaaagaatcagatcatatggttgatcttagtattaggtgaaaactttcctttttcgtgtcgtcacagcttctgcctcaggttcctctcgaggcgggactcttaagtgcagcttcataatatcatacactgtgaatccgattgccacagacggtacaacctaaagaaacctgaaaggaaaagtgtttgtactttggttgtcat

SEQ ID NO: 13631 - DNA, 545 bp, Arabidopsis thaliana columbia
  unsure (1)..(545): unsure at all n locations
aatctcagttttcgtcttctccaacaatctatgatctgaatttgaatctgagtatgttgaagaaggacttactcgctgaggatagcgacggggttaccatcggaattgaaaagagcgacacgtgtagactcgccgatacgtgctttttgttcatcgtcaatagcgagaacaataggcacggacatgttaacgacggagccgtcgtcaagacgtagcgagttaaaatgaagagtttggaggaactcggattctctcatgaaacctccgagtggacttgcccagccttcgcttaatacatgcatccattgcaagtcaatcgccgtcagctcaacacgtggcaaatccgccgcctcgtgtttcttctctcgccgctttggctcttccacgatgagctctacaagcttaccaccgtcgggagcgattaatccggctcggattgatcctacgcggcggcgtagnggatttggaagggaaggaaccgcggcgaaggggagatcggagtttggagatgatttggttagtggttgagagaggaatggagtttt

SEQ ID NO: 13632 - DNA, 485 bp, Arabidopsis thaliana columbia
ttctaagtgagtgttgtctctagattataggcagtgttattgtcctggttttgcgggaaattttaatctataacattagttactttcggtttaggttcgtatgtctggtgccatctatttcaactgcttgaactgatgatatttggtatttgaaagaggaacttatgtaacagcttgtgtgaggttattaaaatctttgtacctcacgtcttcaatatttgtatcttttgtaggttggcccagtcaatataatagttggttctcatgtttggattgaagatcctggagcggcatggattgatggtgaagttgtcaaaattaatggcgaagaagttcatgcacataccacaaatgggaagaccgtaagttgtctatcctcctcccatgcttttgcatgtaaatttccttttgagaaataatgtcactggaatgaatagggtgtttctgcttagggtgtctgtttaactttgaacaaaatgtcacta

SEQ ID NO: 13633 - DNA, 655 bp, Arabidopsis thaliana
acttaatccactggaacaagtaacaacaaagactagaataaagtatgcatacatacagaagagcttactcagtagcaaaagctgcttttgttatgtcagtcaaaaactcttttgaaagcccaccatagtctaggccagcctcaggaaggccagattcattcacaaacgagacatggatggatgattttagcctgctaccaattgaattcagttgttgaaatccatcttcaaccacatgacctcgacgaacaactatctctattgacctcgcaccaggtgcatccacttcaccagccattttccttgaagctttatccttgcttataaactctctaaacacatggaccctgcagggatagcacaacatgaacatcattcaacagataaagttagttagaagttattgtagcacaaagataaaagacatggaaaggctatgaagggtaatcaacgtaagattacctctcctcaaatggaaagacatgcggagtaattgttataacagaacccatgcttggagttgtaagaacatcactggttggtaacacctcatgagtcctggcagcaaatgcaattggaggtctactagttctaccaggttagagccacagggcagaagcactgcaagggtagctgcaatctctttcatacaata

SEQ ID NO: 13634 - DNA, 489 bp, Arabidopsis thaliana columbia
actggacctagagatttggccaatgatcaggtgaggatagtgacgcgtgacaatggagctaagatggatgtcaagagaggggatttgattgaacaagttaaggacttgctagagaaaatccagagtaacctctatgatgtggcaaagagaaaggttgaagaatgtactcaaaaggttgaaacttgggatgaatttgtggaagctttgagccaaaagaaactgattttagctccatggtgtgataaggttgaagtggagaaggatgtgaagaggcgtaccagaggtgatgaaacaggaggaggaggaggaggagctaagactctatgtactcctcttgagcagcctgaactaggagaagagactctatgctttgcatcaggaaagccagccaagaagtggagctactggggaagaagttactaagctctatgcttttatgatgtcatgaccaaattggtactcatatctctctactgattacattggaat

SEQ ID NO: 13635 - DNA, 432 bp, Arabidopsis thaliana
aactgtctgagctagcttctctatggtctcttcttgctcatcagatttctttttgagatctcgcaagtcgggtgtagaggctgtgcttggtctagtgattgaattcgaaggctgaggttgagccctgatcctttcttctacagctgaccattgcgaagtttcgttgatgtcaaactgcagcttgatgtgcttcccaaggttgagacttattctcccatctctgacatctatcatcgctcccactgaggctaagaaaggtcttcctaggattagaggatccttaggttctgcttccatatcaagcacaatgaaatccgtgggcacttccactccattaatcattactggcagatcttgtagaaggccgaagggttttcttgaagacctatcagcaaggattatagtcaggtcgcaaggattgtactgagtgaa

SEQ ID NO: 13636 - DNA, 570 bp, Arabidopsis thaliana columbia
ctaccatgcacaatgttcatgactgattgtgatccctagtaaacgggtttgggagccactggacttgagaaatagaaaggttcaagggtgtagagggtcaagttgtcgtggctaaggaacttggagttgtcgggagagagtggagctccggtgacacctttgttgacattggtcggagtcttacacgtgaagaccggagagctctcgagtttcactttgcagctgctgatgttattcaccttgtgtgagagtccgtacgtgatgaagtagaagtatcccttcaagtccgttgggtagctagagattgtaaccttagccactagctttccatatgaatccacgacaggacacacaaccttaaccttgccccctgtcaagtacatcaccggtttggtaagatgtcatgggatgtaacacatataatgtgaaatcgaaaatgtagttgcacttggatggggtaggttttgtagccagatttgcacaagatgaaacgttcgatggcgatgtcagggtttgattttggcaagtatggagtcttaactggtgatgtgtaggtggtttgtggtttgg

SEQ ID NO: 13637 - DNA, 597 bp, Arabidopsis thaliana
  unsure (1)..(597): unsure at all n locations
tgcattctcgggatagtgttcctcaactgtctgagctagcttctctatggtctcttcttgctcatcagatttctttttaacatctcgcaagtcgggtgtagaggctgtgcttggtctggtgattgaatttgaaggctgaggttgagccctgatcctttcttctacagctgacctttgcgaagtttcgttgatgtcaaactgcagcttgatgtgcttcccaaggttgagacttattttcccatctctgacatctatcatcgctcccactgaggctaagaaaggtcttcctaggattagaggatccttaggttctgcttccatatcaagcacaacgaaatccgtaggcacttccactccattaatcattactgccagatcttatagaaggccgaagggttttcttgaggacctatcagcaaggattaaagtcaggtcgcaaggcttgtactgagtgaatccagcttccttgccactgagagtgcattaagcttactgaacncccaaatcacaaagacaattgctgaaaccaattgaccgatggaacatggtagagtgaaagtcctggatctccagttttcttgacactcccttacagtg

SEQ ID NO: 13638 - DNA, 492 bp, Arabidopsis thaliana
ttctcttctggtggataatttatctcctcagaccgtcttgaagtaaacttttttctcgggatagtatcaatcccgcattttgattgagctttctcttgcatctgatccaatttactcttaagttcctcaactgtctgagctagattctctatggtttattcttgctcatcaaatttctttttgagatctcgcaagtcaggtgtagaggttgtgcttggtctggtgattgaatttgaaggttgaggttgagccctgatcttttcttctacagctgtcctttgcaaagtttcgttgttgtcaaactgcagcttgatgtgcttcccaaggttgagacttattctcccgtctttgacatctatcatcgctcccactgaggctaagaaaggtctcctaggattagaggatccttaggttttgcttccatctcaagcacaacgaaatctgtaggtacttccactccattaatctttactggcagatcttgtagcaggc

SEQ ID NO: 13639 - DNA, 683 bp, Arabidopsis thaliana
ctcttctggtggataatctatctcctcagaccatcttgaagtaatcttttttctcgggatagtgttattcccgcatttggattgagctatctcttacatctgatccagtttactcttaagttcctcaactgtctgagctagcttctctatggtctcttcttgctcatcagatttctttttgagatctcgcaagtcgggtgtagaggctgtgcttggtctggtgattgaatttgaaggctgaggttgagccctgatcctttcttctaaagctgacctttgcgaagtttcgttgatgtcaaactgcagcttgatgtgcttcccaaggttgagacttattctcccatctttgacatctatcatcgctcccactgaggctaagaaaggtcttcccaggattagaagatccttaggttctgcttccatatcaagcacaacgaaatccgtaggcacttccactccattaatcattactggcagatcttgtagaaggccgaagggttttcttgaagacctatcagcaaggattaaagtcaggtcgcaaggcttgtactgagtgaattccagctttcttgccactgagagtggcattaagcttactgaagctccaaatcacaaagacaattgctgaaaaccaattggccgatggaacatggttgagtgaaagttcctggatcttccagttt

SEQ ID NO: 13640 - DNA, 587 bp, Arabidopsis thaliana
acatgatccagtttactcttaagttcctcaactgtctgagctagcttctctatggtttcttcttgctcatcagatttctttttgagatctcgcaagtcaggtgtagaggctgtgcttggtctgttgattgaatccgaaggttgaggttgagccctgatcttttcttctacagctgtcctttgcgaagtttcattgatgtcaaactgcagcttcatgtgcttcccaaggttaagacttattctccagtctttgacatctatcatcgctcccacggaggctaagaaaggtctccctaggattagaggatccttaggttctgcttccatctcaagcacaacgaaatctgtaggtacttccactccattaatcattactggtagatcttgtagcaggccaaagggtttttttgaagacctatcagcaaggatcaaagtcaggtcgcaaggcctatactgagtgaattccagcttccttgccacggagagtggcattaagcttactgaagctcccaaatcacatagacaattgctgaaaacaattgaccattggaacatggtagaatgaaagttccaggatcttccagtttt

SEQ ID NO: 13641 - DNA, 647 bp, Arabidopsis thaliana
tccttagaccatcttgaagtaatcttttttctcaggatagtgtcaattccgcatttcgattcgagctttctcttgcatctgatccagtttactcttaagttcctcaactgtctgagctagcttctctatggtttcttcttgctcatcagattttttttttgagatctcgcaagtcaggtgtagaggctgtgcttggtctggtgattgaattcgaaggttgaggttgagccctgatcttttcttctacagctgtcctttgcgaagtttcgttgatgtcaaactgcagcttgatgtgcttcccaaggttaagacttattcttctgtctttgacatctatcatcgctcccacggaggctaagaaaggtcttcctaggattagaagattcttaggttctacttccgtctcaagcacaacgaaatctgtaggtacttccactacattaatcattactggcagatctcgtaacaggcaaaggggtttccttgcagacctattagcaaggatcaaagtcaggtcgcaaggcattaagcttactaaagctccctaatcacatagacaattgctaaaaaccaattgaccaatggaacatggtagagtgaaagtccatgatctccagttttcttgacactctcttacagtggcctag

SEQ ID NO: 13642 - DNA, 718 bp, Arabidopsis thaliana
atcatcatattcaacatcctctcttgagagatgagtagcagaatactcaattcttctctcctcgaaataggcctctgtctcttctggtggataatctatctcctcagaccatcttttagtaaactttttcctcgggatagaatcaatcccgcattttgattgagctttctcttgcatctgatccagtttactcttaagttcctcaactgtctaagctagcttctctatggtttcttcttgctcatcagatttctttttgagatctcgcaagtcaggtgtagaggttgtgcttggcctggtgattgaatccgaaggttgaggttgagccctgatcttttcttctacagctgtcctttgcgaagtttcgttgatgtcaaactgcagcttgatgtgcttcccaaggttgagacttattctcttgtctttgacatctatcatcgctcccacggaggctaagaatggtcttcctaggattagaggatccttaggttctggtttcatctcaagcacaacgaaatctgtaggtacttccactccattaatcattactggcagatcttgtagcaggccaaagggtttccttgaagacctatcaggaaggatcaaagtcaggtcgcaaggcttgtactgagtgaattccagcttccttgcaatgaagagtggcattaagcttactgaagctcccaaatcacatagacaattgctgaaaaccaaattg

SEQ ID NO: 13643 - DNA, 559 bp, Arabidopsis thaliana
ccagtttactcttaagttcctcaactgtctgaactagcttctctatggtctcttcttgctcatcagatttctttttgagatctcgcaagtcgggtgtagaggctgtgcttggtctagtgattgaatttgaaggctgaggttgagccctgaccttttcttctacagctgtcctttgcgaggttttattgatgtcaaactggagcttgatgtgcttcccaaggttgagacttattctcccatctctgacatctatcatcgctcccactgaggctaagaaaggtcttcctaggattagaggatccttaggttctgcttccatatcaagcacaacgaaatccgtaggcacctccactccattaatcattagtggcagatcttgtagaaggccgaagggttttcttgaagacccatcagcaaggattaaagtcaggtcgcaaggtttgtactgagtgaattccagcttccttgctactgagagtggcattaagcttactgaagctcccaaatcacaaaggcaattgctgaaaaccaattgaccgatggacatggtagagtgaaa

SEQ ID NO: 13644 - DNA, 791 bp, Arabidopsis thaliana
tctgtatccccacattggagaccagcaacgattccgatcctccccaagcgagacatccattggataacgatctcggctcctcctgcagctgctccgttttggagaatgcttaatgcggcggctaatggtccgattgcgttggagacgtcgttgcctccgtgagcgaatgacatgaagcaagcggagaggacttgcatatagccaaagattccgtagactatttcgagttgtgtacctgttggtcctgcgatatcggagaggaaaccaatggttttgggttggttttgagatgtttctggtgattttgttttagctaggaggtgaccgagctgtttgcggatgattctgtcgaatactatggctcctgctactccacaggctaaggcttgtgatagagctattggaaagatcttacttagaggcaatgcggctgaggagatactggccacacctacaaatacagcgacgggagcggcagcagccgctgcttgtcctgggtttggtgcactgtaaacaaactgcacagaacgaaagaagagtgtgaaaatgtagcagaagcttgagtatgactttagtgatctttcagaattagaaagttagtttcttggtttgttttacttactctcctgatgcatttgtagactaggaaggagacaagagctcccagtataggagagatgacccaagatgaagctactttagctagggaactccagaaaacggcaccagctcctccatatacaagcccaaacccaaccattgatccgacgatacagtgagttgttgatact

SEQ ID NO: 13645 - DNA, 513 bp, Arabidopsis thaliana
tagaggaagaggatccccctcaaacgtgtaaaggtcgcataaatcgagatcaagattccagattggcaaaggaggtgtatttcctccaaaactcagaaggttctggattagctcctttcgactgttggctttgccttcgaggaatcaagacaatggctttacggatagaaaagcaacaggtcttgacttgaaccccctaattaccttgaaatgttgttctcttttcttttcttttattggttggtttcattacttacaatagatggcaaaaatcttcaggaaaacgcacggaaaattgcaatgtacttgtcttctcatccaagagtaaagaaagtgtactatgctggtctaccagatcatcctggtcaccatctccacttctctcaggtactaaaaagcataaactgatctacgaaaaataagaagaaaatagattaagttctctatctaagatataactgttttcatatatgcaggcgaagggtgcaggatcagtttttagctttataactg

SEQ ID NO: 13646 - DNA, 574 bp, Arabidopsis thaliana
gttagtatgtaaactctgtatacatttgacctaagctatagtccctttcttaaattcataaagataagagttatttttttgtcacagatttcaattagaaaatttattttcgtagtgacatgctatgttcgatttttttcctataatttaatcataaatttatcacatatatttttgtagggtttagggtaacagacaaaagttgttgtacggtaaaaccaggggaagaactttgtgcgacaaatgaaccggtctgtccagttcaaagacggtatgtgtactgggacaatgtccacagcacagaagcagccaatatggtggttgcaaaggctgcttatgccggactcattacgtctccttacagtctttcttggcttgcaagattatagggacaacattacaaaacagattaacattactttatatatatgctgacctttattcttcaattcaactgtattatttaacaaggaaactttgtttcaacgtgtgaacgttttttttaagaaaagaaaaaagaatatgaatgaataaataatgaaatataaaaatgggtgaacattctatatgggat

SEQ ID NO: 13647 - DNA, 536 bp, Arabidopsis thaliana
  unsure (1)..(536): unsure at all n locations
caggtcagactcatcccccatttctttgaaatatctgcttttcttataatagtgttaaactttccagcagtgctttccacctcccttatggtgcacctccttggtcgttttcttgtcggttaccggagccctagccgccgatccctacgtcttcttcgattggactgtctcttacctctctgcttctcctctcggcactcgtcaacaggtttcaaaaatcttctgcattaatcatctatttccaatctcaaagtttcgatttttgaaattcgatttctaggtaattgggataaatgggcaatttcctggtccgattctaaacgtaactacgaattggaatgttgttatgaatgtgaagaataatcttgatgagccattgcttcttacatggtaataatgtctattattaagttcaattcaatgtatctgtataattgaatttgtaactaaaactatgttgtttgtaatggtggtgatatgcaggaatggaaccaacataggaaaaactcatggcaagantggtgtttgggaactaa

SEQ ID NO: 13648 - DNA, 644 bp, Arabidopsis thaliana
taacggccgccagtgtgctctaaagggttgtggtcggcttgccagatgttcgcggtcgtgagcagatcctgaaagttcacatgcgtcgcgtaccattggcacccgatatcgacgcggcaatcattgcccgtggtactcctggtttctccggtgctgacctggcgaacctggtgaacgaagcggcactgttcgctgctcgtggcaacaaacgcgttgtgtcgatggttgagttcgagaaagcgaaagacaaaatcatgatgggtgcggaacgtcgctccatggtgatgacggaagcgcagaaagaatcgacggcttaccacgaagcgggtcatgcgattatcggtcgcctggtgccggaacacgatccggtgcacaaagtgacgattatcccacgcggtcgtgcgctgggtgtgactttcttcttgcctgagggcgacgcaatcagcgccacgcgtcagaaactggaaagccagatttctacgctgtacggtggtcgtctggcagaagagatcatctacgggccggaacatgtatctaccggtgcgtcaacgatattaaagttgcgaccaacctggcacgtaacatggtgactcagtggggcttctctgagaaattgggtcactgctgtagcggaagaagaggtg

SEQ ID NO: 13649 - DNA, 516 bp, Arabidopsis thaliana columbia
gctaagtttgccctaccagtggactccgaacatagggcaaaagtgttcaaaccactatcattcgctaaaccacatatgagagccttccacttaggatggatctctttcttcacttgcttcatctccaccttcgcagccgcacctctagtccccgtcattcgcgacaatctcgacctgaccaaaaccgacatcggaaatgctggagttgcatcagtttccggcgccattttctcgagactcgctatgggtgctgtatgtgaccttctaggggcacgttatggaaccgccttctcacttatgcttacagctccagcagttttctccatgtcgttcgtagctgacgcgggaagctacttagccgtaaggttcatgatcggtttttgcttagcaacgttcgtatcatgtcagtactggacgagtgttatgttcactggaaagattatcggactcgttaacggatgtgctggagggtggggagatatgggaggaggagtgactcagctactaatgccaatg

SEQ ID NO: 13650 - DNA, 579 bp, Arabidopsis thaliana columbia
cccgttcctccagtgaccgtccctaagctaccccttcctccgatttcagggctacccatacctccagtggtaggtcccaatctgccattgccgcctttgccaattgtaggtcctattcttccaccgggaacaaccccaccagccacaggagggaaggactgtcctccaccgccagggagcgtaaagccaccatcagggggcgggaaggcgacatgtccaatagacacgctgaagttaggtgcttgcgtcgacttgttgggaggtttagtaaagatagggcttggggatccagcagttaacaaatgttgtccgttacttaaaggcctcgttgaagtcgaagccgcggcttgtctctgcactaccctcaagctcaaagctcttgacctcaatctttatgtccctgttgctcttcagcttctccttacctgtggcaaaaatccacctccgggctacacttgttccatatgataaactcactccacttataaagggtatgctattctcctctcatattacttagaatttcaatcttctataagagatgtagatattaaccaatatggttttaggtttaatata

SEQ ID NO: 13651 - DNA, 542 bp, Arabidopsis thaliana columbia
aaggctcgcttcgcacagatgacacggtctccatcaaagcctctctctgagatcgatcagagacatcgcaaacggatccagcaactcgaaaaccagaacggttccaatcactcaaacaattctccagctcgtactcattccgagcgcaagtgtgaacttctgctccaagaccagccaattcctccacaatcgcacgcctgagaatttaaacagtaacacacactactctgagaatttgcgtttgataaaggttcacacttgttgtgaagagagacaaacccaattccacgagtgccgccggtgacaagagcagacattccattgagagaccatctttccttggaggtaatggcaatggaactctgtgatgcgtaagggacgaagacggaagaggaagaggatttgtgtttagggtttatgcgtttgaaagagaggcataaatgaggtttaagggaagaagaagaagaaataaagtgaaggttttgaggtggatttgtgtcaagtgagaagcatgcaagcacatttatcagacagagtttatg

SEQ ID NO: 13652 - DNA, 1934 bp, Arabidopsis thaliana
ccgttccatttctagaccggaaaatcctctgggctgtgaaccgctcccaccgtttgtgtcgcccccaaagttcgaccacaaagagtttgatcagccaccgtttttgatcggagaaacggacaatgtagaagagagaaagaagaaaacgattgtggtgatgctaccactgagcacatctcagctgcagaagctacgaagtaaagccaacggaagcaaacactctgacccggcgaaagggtttacaaggtacgagaccgtcaccggacacgtgtggaggtgcgcgtgtaaagcacgtggccactctccggagcaaccaacggctctaggaatctgtatagatactcgtagtcggatggagccacctctgccacgcggctacttcggcaatgctactcttgacgtggtcgcagcaagcacctcaggtacgtgttttttctttcttttctattactatccatagaaattttgtttgttttgtgaatttgaatacacttcttcaaaatttaatttagtcctctaaacaaaaattatgattttgttcattacttttatattccaattatatatattatttatttattaatttttttcaattcaaaaatattacaaaatattgtaatttgtttatcttagaattcgtgtcaaaagaccgtcaaaacgactcttttatgaaactgatggattatcattaatttctactattgctgaacaattaaaattatctgaagaacttggatatatgaaacttttcttggttgcttttcatccacgtaaatgtaggttagtacgtactgattctacaatgcaaagtctgtttcgataattttgttatgcatataggtgaactgatatcgaatgaattgggtttcgcggcgagtttaatcagtaaagccataaagaatgtaacaaacgaatacgtgatgattgggatagagtatcttaagaaccaaaaagatctgaagaagtttcaagatctacatgccttgggaagcacggaaggtccattctacggaaacccaaatcttggagtggtgagctggttaactttgccaatgtacggccttgatttcggatggggcaaagagttctacacgggaccaggcacgcatgactttgacggcgactcgctgatcttgccggatcaaaacgaagatggctcggtgattctcgcgacgtgtctacaggtggctcacatggaggccttcaagaaacacttttatgaagatatctaggccttatatgttttttatatacatgacgtatacaaatatttatgcactttcatttgaattctacttatattgtagtgattattgaattgtaataacagattctaaactatatattattgttcttactacaatggaattaacatttaaacaaaaaaaaatgctatagaatatcgtgctttctccagtacaacatttagtatgatcttgcatgcaatgaatttgacttagattgggttgtttgccaaatccataacaaaactcaatgatggaaatatgatggcatgttgttacaatttagcaatactaattctaaattaatgcaaggtatttggaagcagaatgatatctttttaggctttactagcaatattatagtacaagcagtaaaatgcttataggagacgtaatgagtccggcaaacgcagcctttacaacgaccttattagctgcttctgtgctatggacattgtcccagtagacgtaccgttctcgattcggacaaaccggtttatttgcggcacaaagttcttgccctgattctaccgtacaacaacttttgtctgttaccgtaaatcctacaaaattacatgtgaaatattaatgatctaactaattaaagaacataactaaagaagtagttttgcaattatgttactatgattagtaaattttctaattgtacgaatcattaatttttgaccc

SEQ ID NO: 13653 - DNA, 553 bp, Arabidopsis thaliana columbia
gtaactgtgacgccaacggtcaattcaacgccgttgttcataaaacctgcgttgattgcagccgttgagatctttgggactaagtgatcgcacaaccaattgtcgtcgctatggagttgatcgtggagtaacgattggatgtggtggtgactacaactagggagactgaaattgatgggaagtgatttataggaaagcggagtggacgtttcggctcgatggccagtgacagggtttataaggatctcatccttaatggtattgacgatgaggaagatcgagtttgtagagactttcacagcttggacctgaacgctcactatgggtttgggaatgggatcattcatgtttggaagaggcttctcaaagagattcacaagaagtcgtaaattgagagaagagaattgtgaagatttaggagataggggtaacgtagtaagatatatataagcgtctgtgtgtcaactatatcttaggctaagattagcgaagatttatatcttaagaaatatctaagttatatcttagctaataaattgattaaatttaataa

SEQ ID NO: 13654 - DNA, 1771 bp, Arabidopsis thaliana
agcattcctggaccaattctataaacagccaatcaggcatatcatggtacaggtgaaagaaacttatccaatacagatcttatcacctgcccatcaacgctcaaccgtctgctcctctcgtgcgtgtaggaataatcaaaagaggagacagcatgcctattactaagaacccaattctagtaaaaacgataacaacgattcgaggttctcaatcaaggcagaaagcaagtaagtcctacagctaggaggaaagctcctctaggggacctttcagacatctagattctataggaagcgcaagggtttgctgataggggatagcaattgattgtggagaagcttccggatgtggcccttagtagaacgacaaatattgttataacgtgaacggacatgtgtacttccacttgaggagaagtcatgtcttttgcaatgttctaagcacacaaaagtttcatagaacaggtatgattcttgatttgatggaagctttaacgattgaggaggaggatgggatcaaatatgttggaacaggtctagaagagaagaagagaaaggcaatgagcatgatctaagctgtgtaagactaacaagacttacctacaatataagctgtgtagtctgttgaggaaaacattgatgagtctataagttgcatgtgaacttaaaaacagcaaagtttagagtttatgtgattacaattaatgatgctattacaaatttcaaacctcttcttgaatttagaattttaaaccttgataactaaatttcataaaatgcaatagagtagctagatgacaccctaatttgcatcctctgttccaatcatcatcatcgatcatagagcacagtcctacacatcgggcaagtgtttttgcggtttagccactccacgagacaaccattgtggaagacatgggaacaactcatgcgagtgggtgctgttttcgaactggagactagactctggagacaaatggaacacgactctgcgttcaaactctttgtttcctctacgctcatgaacccttgtagaaccatcctcgatatctttaatgctgcctcgtcgacacggacgtacttgtaagtaaccgcgacgctcacggtcaagtcaacaaaacctgagctgatagcacttgagatctttgggactaagtgatcgcacaaccaatggtcgtctctatggagtcgatcatggagtaacgattggatgtggtggtgactacaactagggagagtgtaattgatgggaagtgatttataggaaagcggagtggacgttgcggttcgatggccagtgccagggtttataaggatctcatccttaatggtattgacgatgaggaagatcgagtttgtatttccttgtgatggagagcgagagactctctcagcttggacctgaacgctcactacggctttgggaatgggatcattcatgtttgaaagaggcttctcaacacaaaacagaagaataagaatttgcaaatcgtaatgagagcaaattgagagagaagacaattgtgaatagctttagggttacgtagtgagtatatatatatgagctgtgttcaacggtcaatacatttcagattctagtttccttttgttctttgttaccaataaatttccttttttgccacaaagaaatttccgtttctttaattcttcttttgggatgatatctgttatttcttttgttattcaaaactacttgtattaactattaagagacattactcaaagtttgaatatttagatatcataatta

SEQ ID NO: 13655 - DNA, 745 bp, Arabidopsis thaliana
ctattgttttcgtcccaacccgtaaacatgtccgcttgactgctgtggatctgatggcttattctcacatggataacccgcagagtcctgatttcttgttagggaagctggaagaactggacccttttgttgaacaaatccgcgaggaaacactgaaggagacactgtgtcatggtattggatacttgcatgagggtttaagcagtctggatcaggagattgtgacacagctctttgaagctggacggattcaggtttgtgtgatgagcagttcattgtgttggggcactccattaactgcgcatttggtggtcgtaatgggaacgcagtattacgatgggagggaaaattcacattctgattatccagtccctgatctgcttcagatgatggggcgtgctagccgaccacttcttgacaatgccgggaagtgtgtgatcttttgtcatgcaccgcggaaggagtattacaagaagtttttgtacgaagccttccctgtggaaagtcagctccagcatttcttgcatgataatttcaacgcagaagtggttgctggggttatagagaacaagcaagatgccgtggattatcttacatggactttcatgtacaggaggcttcccagaaccctaactactacaatctccaaggtgttagcacaggcatttgtctgatcacctatcagagctggttgagacaccttgtcagatcttgaaccagtaaatgcattgaggtagaggatgag

SEQ ID NO: 13656 - DNA, 583 bp, Arabidopsis thaliana
gataactggtttccaggtaacgaaaatcacttgtttaggagcaatatccggtgaaacaaaacgcgttgttcttgatggctctaaaagttccttgctttgtctcatttcatattttagtttgttcctgggagctcatctgaagtgcttgtcacatcttccgattcaaggatccgtgttgttgatggaactgatctagttaacaaacttaaaggtaaacagacaaacaatcgccttttgaagtttcaagctttgtcttctgtttacgagccaaagtatcgatcttttctgttttcatttcatttgatagggtttcgaaatacgagcagccagatctctgcctcaatcacagcagatgggaaatacgtagtttcagcaagcgaggattcacacgtgtacatatggaagtacgaatcccctgcttctcgaccaagcagaagtaacaacaacaagaacgtgacagtcacaaactcttacgagcatttccatagccaagacgtctctgcagccatctcatggcctggaatggctcaacagaaaactggggaaccaaaacagagcggggtttacggaagcacaatacttg

SEQ ID NO: 13657 - DNA, 568 bp, Arabidopsis thaliana
tgtcggatcttggtcattgcttcagggttcttagagagaagccagaaaaaccaagtgagagctgagctggttgtgtctcttgccgctatcacaagacccaaaatagtgtctctgatgaatttatcgttactcggtttcaagtgtttatatttggtcgtgtctatagtcatgtaatatgttaaaacgtccatggcctctccttttgagtcatgaatcccatgatttttgatctcctctcgtttagctgatatgatcttccctagcatttgatcgaaaacgtcgagacctcttctcatcttcttctctattcctacaccgatccaagattggatactccacaggaaagccggcttgagatgtctatagaacatggcatctgcaactccatccatcgcatcagcgaactcaaccttaggcatttcaacggagagagattttggatcatacccagccatcaaagtagaagatgtgtcaaacaagaatctctggaacaaatcttgcaagtcgacaagaatgtgttctcaacagcgttatcaagaataggaacaagcccttgacttaatttgct

SEQ ID NO: 13658 - DNA, 916 bp, Arabidopsis thaliana
tcgaaatatacacaaattgatattgctacagaatcttcttttgtcttctcatcaggaaagatcacaatctttaggctaagtaatatttatcttgaaagcagacgtgaatatatttgcaaaaggtacaaaagtttccaacttcactattatcaagctagtaaataatcgaacaatgaatagacttaggactaaaacttacaacttttcttttagggctcgccctgccggtgtatattccttcttaagttctggttctggttctttctcatcttcaccaccactctgcaataattataaattaggaatactggtaattgtcacgacaaaggtattcataaccacaaaaagatgcttttaggagtagagtaaaatggttacctcatttacaggtccactggtatgtggggcatatgcttccctatacgaaacagcctttctcaaacgcttccctctgccaagcgctgcttcttcctcgctctgatattctcccatctacatatacagttgtccgtatgaaaattagctaacaagtaataagcagttgaaacaagaacatatgctgccaagaccaaagccaagacgctgaactcagagaaagagggaactccaacctcatacgcagaagcctgtcacatacatataccttctctacggtatacctgttgcatcctgtctctcctgccaagcgaatggatttgtcatgcatttgttgctaactgccgacacaagctggcttgttaggaaaaaaacccttttcttcttcttatgaatgttgcttactctgtccactgcgatacaactgttgtaagctctgttttacagcttgtaatgggatttctgctctcttttcaatatatcccctctctttttcctaggaaagcctctgttgaatctatctctctccgttcggaatggg

SEQ ID NO: 13659 - DNA, 495 bp, Arabidopsis thaliana columbia
aaatcagtggggataatcccatccaacaaacactcctttcttagccttgggatctaactttccttcttgtgtagtgtacatacacaatacacccgaacctccttagaccttctaagcttggaattactgaagtccacagctcttcagggatcttgttctcgactgcagatgatggagacctattgatcagatacactgaagtcgatgctgcttcacccttaaattacttgtcaagaccactttcactgaacatgcttctaactttgttcattatggtcctgtataatctttctgcaactccattcttctatggagtataagtacacgttctgtgccttactatttcttctttcttgtagaagccatcaaactgctgattacaggactccaatccattatcggttctcagcttaatcaattttctatcactgtgtgtatccaccatcgtattccattcagtgaatgatgtgaacgcttcatctttggtgttaagga

SEQ ID NO: 13660 - DNA, 975 bp, Arabidopsis thaliana
ctgcctagtaccctccacggatccccaatagccgctgctaaataatcctcctccaaatcaaatttcaccatgaagaagcttctagggagattcaacactgacatccccccatttggcttccatagctctctcaatcgccgatttaggtctgcaatcgtgatgtggcgtcctaagactttgacaaccagacactgtaggtacaaatcgttcatcgcgtcgaggacttcctgtccaatcgtgatgatcgcttcaccttctgccccagtcagaaactcgacattcatcctcgaagccacaaactctgcactcaatctcgtctcaggaattggaattcctccacagtagcaactttgaaccttatcgacccactacggcgaccccgttaaaccccctcccggcggccggccgttctcctccatgtgctcatcgagatctcctggattcacgaccctagcggcgctagggttttctatcgacatcgccttttcaatcttttcgattgaattatggaaacagctttctaaaaaagattttaagatttgttaatgattgagttataactacagagctaattcggtagagtcttaaagaaaatcgcgtcgaggacttcctgtccaatcgtgatgatcgcttcaccttctgccccagtcagaaactcgacattcatcctcgaagccacaaactctgcactcaatctcgtctcaggaattggaattcctccacagtagcaactttgaaccttatcgacccactacggcgaccccgttaaaccccctcccggcggccggccgttctcctccatgtgctcatcgagatctcctggattcacgaccctagcggcgctagggttttctatcgacatcgccttttcaatcttttcgattgaattatggaaacagctttctaaaaaagattttaagatttgttaatgattgagttataactacagagctaattcggtagagtcttaaagaa

SEQ ID NO: 13661 - DNA, 611 bp, Arabidopsis thaliana columbia
gggaaagaagtgaaagacaaggcgaacacgactcctccaatggacgaaggcttctgcaagttttcatccatttggtctcgcatggccatccccacgcttccaacgcagattatcggcacgataactcctatggcagcaatgtacttgtgctttcttggtgccttcccaatggctccaacgtccgtcttggccgccgtgaggaagaggaagtaaaaaaaccccatcagtcctatgtttgcgcatatgtaattcgcaattggtgggaataaatagtaattgaaatttctgattcctccaaacatcgatggtcctatcatcattccacccttcaaacacaaaaatccatattacgtcaatattagctccaaaacggattttatcaactacaaaaaagttaatacaagataggtgacgacgaacaatgatctcactgactatacgaggttggcgaaaaggtcgaagggcaatgctaacaactttgatgaagaaaatgatgatgattgcttcgatcaaaaaggtcgaaaatgcgtagttcatagcattttcgcctttgaacatccaaacggctgcttactatgaagttccggcaaacactggaattttgggagaga

SEQ ID NO: 13662 - DNA, 971 bp, Arabidopsis thaliana
cgtaaattacatatagatgctcatgtagataagaggagatatctgtttgggccacgtctcgttgccaattaagttgacattggttttgtgtcccatcaaagcaaaagagaaaggcatcaagaattcattaacaaaggtctcgctcctaatagccaacgtcgaacctagcggtggtccatgagggaccactgccccagccatatgggtccatcagctatagccatagcgaacatgtcagtgaggaaacaagagacaaggacacccatgagaatattgacgatgtagttttggttcacgagtcctccctcaggcgttttggcgacaatccattcaaaggatcgtttcacaaccaaaagcaaacaagcggccatgatagccgccgatatgagaaaccatatgacagagtatgctcctcctcctccgtcagcctgcgccatggcttcaaacaaaacaagcacgtagaccccaaccatgtctccaaggagagtcactgacatggcgaactttcctatctcagagttgagaaggttcatgtctctcaaaacagtgtaaatgaccggaaaagaagtgaaacccaaggcgaacgtgacccctccaatggacgaaggtttctgcaatcttatatccattttgtgttttagggcagctcccgtgctccccacgcaagcaatcggcaccaaaacgctaactgcagcaatgtacttatgctttcttggtgctttaaagatttctgcaacgtctgttttggcagccgtgaggaagaagaagtaaaagaatcccatcagtcctatgtttgcgcatatgtaattcgcaatcggtggaaacagatagtaattgaagtttcggtttcttcctaacatggacggtcctatcatcatcccacccttcaaaacacaaaaccatgcattttgtcttaaataatataattagctccatcaatggaaatttattaactatgtaaaagaaaatat

SEQ ID NO: 13663 - DNA, 521 bp, Arabidopsis thaliana columbia
tcagatatacccagctcctcccagagtgtacctcagcggtatgatgtccttgagacagagccatctaacttcatttctgaaccatctcaggctgaaatccttctccacgtacttggaaatgggtcgggaataaagacagtgggatatggaatgctggagactgtatcactgtgtaaatccaacaaatctggatcttgtctcagttctggcagtggagattatgagatagagatagatgaaaatcatacatctcctcctcatatggtcattgaagatcaattagtggaaatcgacaaacatgttacctcgctgccttcttgttctggcagcaaagttgatactgaagagctagacaagagcatcgtctcatcagctagagtgaaaagtgagccaacagctttgagctcagggttaaaaggaaagttggataactttcctggttcaggaacagagaagagcaaactggtaagcaaggtgacaagaaatatccacggtccaaaccgcggccgatgaagaagata

SEQ ID NO: 13664 - DNA, 759 bp, Arabidopsis thaliana columbia
ccttcttcgttcgtggtgattcctccgtgactgtcgacgttgttgccgtcgatctctgtgagcagaagaccggagactctttttggatcttctctgacgttagtttcaacttctggagtttttcttcagcgtctattccaccgtttcttgtcacccaagctttcttctccacattaggataatcctctgtttttgagaaaccctaattagaaccctcacgaacaaattatggaatctagtaataactacgtgacataccctttggagagcttagaagaatctcagatcctttgaggacatattcattatcagagataggagtgataagatcatcgtccaataaatcttgccatacataaccattcttatacctcctgcaatatatagattactagataaatatcgtaatcaagaatgtgacaaaaaatcattcttttgataaaagttatacctcttacaagaccaagaaaatgcatcaggcatggcatcgcctcgtgcgtctgctaaccatttcttcacatctgcgtttttaagcacaatttagacgagattgatcgaaagaaaaagagaccaatagagaaggactaattaagaagagggaattaacctcggagaaagactccattacgagagagatgatgaacacgcaagagatgaggatggtcaacgtgacccgaacggctaaggaaataaactaaattcactcttcttacttctcctcctccaccattactttccatctctctttctttttgtttt

SEQ ID NO: 13665 - DNA, 519 bp, Arabidopsis thaliana columbia
tgtgttcttttaaaatatgtctttgttcatacagaaaccaaacaaaatgtcttgtgtaattctttttgtgtatagactttcatgtattggtttcttggtttctgtcataatttataagagagatccgacgaaacatatttctaaagtatatttcatattttataagatagaaaacataacattcaagcatgatgatgataatcatcaatcatcaatcatcaatcatcatcacttcatttattattctaaatagtagtgacgaagataagaccagcattaaccactataatcagcgaaacttgtcactaattaatcatgattaacatttccttaacagcttggggaaggaatcttgcaactgttggagactttccttgcgttaggggagctaacgtattggcggagggtagggttctcatgtaccacaaaggcatggctgctgctctctcagctttgtgcaacacgcctccgatggcggcgacgatgacgtcatcgccgcgcacatgaagccagctgcat

SEQ ID NO: 13666 - DNA, 661 bp, Arabidopsis thaliana
tgaagcttcactaaacaattcatccaactccaacttccgcaacatgtttttatgtttatctaacttggagattccatttagacgacattcgtccatctcttcccagatctgcatacccctctccatactatcttcagctttgttatagagcttcaggacctcttgagaagcctcactttctaggtctaccttgcttttgagtgcatgataccagcaaagctttgcatgttcaaactgctcttgcccaagtgctagaagagcttcgtaaaaatcaggtttaaccttaattgcttcttcatatttctctgcagctttgttgtactcgttctgtgtccacacaaatgcagcctcaactgcttctattatagcttctctagaggcatcctcgggtatacagacttgcttccttgccttggacatgtgaacgttaccccagttcaacaaagctagtgcccccatttcttggaacttatcagcagcgatttgaaagagttcctgcgcatcttcaccagtgacagcatcctccattgcttccgtatacagcttcatcccaaggtcatgaaggtccacgtacgaatcagaatcaaacccaacatggttcttaaacaattgcgcaaactggaaaatccagttctcaaagcacccagatgctttgtcagat

SEQ ID NO: 13667 - DNA, 591 bp, Arabidopsis thaliana
tgtgatgcgagaagcaatgtgtaacgcagaggtggatgatgacgtcctcggatatgacccaacggctagacgtcttgaagaggagatggctaagatgatggggaaagaggctgctctgttcgtgccatccgggacaatggggaatctgatcagcgtgatggttcactgcgacgtgagaggcagcgaggtgattcttggcgacaattgtcacatccatgtttacgagaatggagggatatcgactatcgggggagtgcatcctaagacagtcaagaatgaagaagacgggaccatggacttggaggccattgaagcagctattagagatcctaaaggaagcacgttttatccatcaacaaggttgatttgcttggagaacacacatgccaagtacgatgaattattaaatatttgactgttaaagcagagcctcgttcgaatactatgcttatatgtgtcaataaacggccatgcacctgataatgcagctctggtgggagatgtttgagcgtggaatacactgagaaagttggagagattgcgaagagacatggcgtgaactccatatcgacggagcccgtcttttcaatg

SEQ ID NO: 13668 - DNA, 901 bp, Arabidopsis thaliana
tcgtgttttaaagttatgtggaccaccaaccgcatgttgtggctttaggagctgtcaatttgtcttgtactcgtctgaaggatgatatttatgaggtaagacttcatataccataatgacactatgttcgttgacttatgctattgcaatgtacatgttccgagtttgatcttgagataaaggacctatatccatatggttctggataactgtggtcactggtttacttaattagttcctcagtgcctactttgtagagacctggattttgtgtgtttttcatcaatactttcaaactcgctatacctttttagacttcaactgctttaccgaaaatgataatgttatatatctgatgaaataagcttaagtttctgcttttatatcactttgtgaaaacttaatcgctgtgtttcaattttcataactactcctcttgaatagtaaaattttgttatgctttattctatatatcaggtcatattccagatggtggaggaaaaacctagagatgtcggacatgggatggatgatttaagcattgtttatgtggatgaatcacttcctaggctatatgaaaattctcgaatctcgggtgaacagctacctcagcagtcagggaacgtgagacgtgcagttgctcttggacgctatctccagaatccactagcaatggtggcaactttatgcggtccaggtcgggaaattttgtcttggaagcttcatcccttggagaattttcttcagctagatgagaagtatggaatggttgagcaggttatggttgacattacaaaccaggttggaatcgatattaacttggcagctagccatgattggttcttttctcctttacagttcatttctggacttgggcctcggaaagctgcatccttgcaga

SEQ ID NO: 13669 - DNA, 528 bp, Arabidopsis thaliana columbia
cttctaaagtacgagtctaaagaacaagcggtcgcagctatggaagccctcaacggaagacatataatggaggtatgtgcttattacatatacttctctcgaacattcttgttattttataaagacttgtatggagagtgtgacaatatcacattctttttttcttcttttagggagcaaatgttcctttgattgttaaatgggcagacacagaaaaggaaagacaagctcgaagacttctaaaagttcaatctcatgtctccagactcgatccgcaaaacccctccatgtttggagcattacctatgagttatgttcctccttacaatggatatggctatcatgtaagttcttgttttctcatctacttggattgaactttttggactcatgaggtttgaaaaagctgtagagattggtgtattttggttgcaagactttttttatttgatccttaaaacttttctctataacaggtgcctggaacttatggctacatgctaccacctatccagactctacatgcat

SEQ ID NO: 13670 - DNA, 581 bp, Arabidopsis thaliana columbia
ctgataatcttaatcgtatacaaattaattacaatagagctatacgatctaatgatctatatttttatcaccgatcgtctagatccggtatttaatatttatgccaatggagttaatttgtaaaagagaaaaaaaaacaaattctatatattataattcaccagttaaatttctcatacaagttgaagatatactttcaaattatctaggcaaaagttttgtacagttacgcctaaaatttgacaatattatttcatctccaagcttcgaaagcccaaaagagaagtggtctctttctttgccaaccctaaaaaatcaaatccattgctcatgtcactccccttgctgctacctccgactacatcgcatctcattcttccgcatctgcactccatgccgtttatcatccctaagctgcacttgaaacaacgtggcgttgttgactttccatgcccttgaagacgatcaacatcatcaggaagactgattctgagctcaagattcaaatctgggaacttttcttgaactgggcactcatcttttttcttctttgaacgtaagcattgagattttctctgatt

SEQ ID NO: 13671 - DNA, 553 bp, Arabidopsis thaliana columbia
tctaccatcaatttgaagaaagttgcaaaacactggttaaattatattgtatcttgttttccctgttattacttttcgttactgatactctcttcatgttcttgttggaagtcggtgcttatccgaatgtgcagaatttatttggagaacttgggatcaatgatcggttgcagtggaaggaacactccatgatttttgctatgccaagtaaacctggagaatttagtagatttgacttcccagatgtcctaccagcacccttaaatggtgagagaataaacttatcgcatattcttacttgctagtcagctgttataatattactgcttcaagtaattaaacttttaaactatctgatgaaaacagtggttgaactattagttagtggcgccatgtatttggtttgataaaattggattaatgtgcacacacttgttgaatgtaaaacaaagtatgatgtaattgagtaaaaaagtgaggttagtaactatgatgcatgtatttatttgtattgatcaattcaagctaattatagattttgacatttaatagt

SEQ ID NO: 13672 - DNA, 702 bp, Arabidopsis thaliana
tgctttcaaaagaagagaagtttatgctcaatagccggaatcctgacctagccagttgccacatcagtaagtccccttacgatgctcttcgtcaaagtgaatgttttcagtctctgatgaaaatgtatttacgtgtgtgtacctctggtgaatcagaagaaatggcttcctcttcacacactggcatcatgtggagagttttatctggttgattccttgctaaagcacaatcttgatatcaatgcaaccgatgtggtatgtctgacttttttgaagctgttgcttatgtgcacagtgattatgttagttggcgtctcttcctagtgttgtttccagtcttgtcgtatctagggcggcttgacagtacttcaccgagcaatcattggtaagaagcaggctattactaactacctgctgagggaatcggcaaatccatttgttcttgatgacgtaagtggtcaactaatgatatttatatcttgttatgatctcccttgcgcttcagatactggatctgatccgtttggtttatgataggaaggtgcgaccttgatgcactatgctgtgcaaacagcatcagctcccacaataaaacttctcctactgtataacgctggtataaacgctcaggacagggtaggatgatgtcaagcattcattgtaagacaacatcattgttgatcaggtggttgacaatttggc

SEQ ID NO: 13673 - DNA, 223 bp, Arabidopsis thaliana columbia
gctaagaggatgaggagacccatcagaagaagaccaaacaaccaaggcccaccaaatgtgtaaattaactcctcgagtgcggtgtaacagtgttgcatgtgatacctttccgatatgcatcgatatggacatggtgtctcagagacaccacctgtattccaaggtttatagtagagacataagcattttcagcatcagcttataggtcctatgtattaccata

SEQ ID NO: 13674 - DNA, 518 bp, Arabidopsis thaliana columbia
tgcgtttaggatctttgatcggatgtcgaacaagacagtggtgacgtggaactcgattgttgctggctatgtagagaatggtgaggtggatgcagcctgggaaacatttgaaaccatgcctgagaaaaacattgtttcttggaatacgattatcagcggtctggtgcaaggaagtttgtttgaggaagcgattgaagttttctgttctatgcaaagccaagagggtgtcaatgcggatggtgtgacaatgatgagtattgcatctgcttgtgggcacttgggagctcttgatctagctaaatggatatattactacattgagaagaacggaattcagcttgatgtcagacttggtacaaccttagtagatatgttttctaggtgtggggatcctgaaagtgctatgtcaatttttaatagtttgacaaacagagatgtctcagcttggacagcggctataggagcaatggctatggcaggaaacgctgagcgagcaattgagcttttcgatgatatga

SEQ ID NO: 13675 - DNA, 533 bp, Arabidopsis thaliana columbia
aatgaatatcaatcaaaaatctcgtcatgtgatatcattttttcataatatggataatatatcttgtgttatatttatatataaaccatcatcatctcctacgcttctctcctcaataccatctggaatcaaaatctccgtccatcaccaaaggaatgaacaaagtcagtaaaccgagaccgatgaggttgttaagccatagccattacggtgcagcttctgccatctccatgcagtctcaagactctctttgagattagtgtgcttagctgtccagttaagttccttcctaatcttgcttggatcactgtaaacctcagcgtaatcacctgcacgtctaggcaaatagtcgatcttgatctcaacaccagttgctttcttgcacgcctcaacaaactctttcaccgagctacctactccacccatacacaacaaaaacagtctttaaaatccatttgctaaacagcaagagtttttcttcagtacagtactaatgtaggccaagagtaacaatacctttcccggtgccacat

SEQ ID NO: 13676 - DNA, 459 bp, Arabidopsis thaliana
atacaaagtaactaaaggcctagctgataagtttggcgatctcagggttctggacactccaatctgtgacaacgccttcaccggtatgggcattggagccgccatgacaggactaagacccctcatcgaaggtatgaacatggggtttctactcttagccttcaaccaaatctccaacaactgtggtatgcttcactatacatccggtggtcaattcactatcccggttgttatccgtgggcctggaggtgtgggccggcagctcggagccgagcattcccagcgtctcgagtcttacttccagtcaatccctgggatccagatggtggcttgctcaacagcttacaacgctaaaggattgatgaaagcggcgataagaagtgagaatcctgtgattctgtttgaacacgttctgctctataacgtcaaggagagtattccggatgaagatacatatgt

SEQ ID NO: 13677 - DNA, 503 bp, Arabidopsis thaliana
gtttccaaacatggatttttaggaaacgcgtttccgtaataatttttgcgtttccgaaacgttttcaaaataagttagaccaaaactatattataaaatttggtctcacttatttgaatttttaatacagattaggtggtcgtgtgaagaaactattatcaaactcaattaaaatttgtataagtttatatggttttggagtattttttggatatgtaattccggttaacatttattttgaaactacacaatgcaaaactacagctgtctcaaatttggttataactattgttctactgcagttaggtatggccggtgcactaggaacattatgtggtcaagcctacggagccaaacaataccagatgctcgggatctacctccaaaggtcatggatcgtcctcacaggtggtaccatttgcctcatgcccgtcttcatctttgcgggccctatcctcttagctttaggtcaagaggaacgcattgttcgtgtggctcgggtc

SEQ ID NO: 13678 - DNA, 644 bp, Arabidopsis thaliana
  unsure (1)..(644): unsure at all n locations
tgccttttttttgtcaaaaatacaaagtgtgaccaatcttctcgtatgaatttacagacatgaactattgcttttcgaggctcttcaggaaggtctggaagaagagatggacagagatccacatgtatgtgttatgggtgaagatgttggccattacggaggttcctacaaggtaaccaaagggctttcctgataaatttggtgacctcagggttctcgacactcctatttgtgaaaatgcattcaccggtatgggcattggagctgccatgactggtctaagacccgttattgaaggtatgaacatgggtttcctcctcctcgccttcaaccaaatctccaacaactgtggaatgcttcactacacatccggtggtcagtttacgatcccggttgtcatccgtggacctggtggagtgggacgccagcttggtgctgagcattcacagaggttagaatcttactttcagtccatccctgggatccagatggttgcttgctcaactccttacaacgccaaagggttgatgaaagccgcaataagaagcgagaaccctgtgattctgttcgaacacgtgctgctttacaatctcaaggagnaaatcccggatgaagattacgtctgtaccttgaagaactgagat

SEQ ID NO: 13679 - DNA, 936 bp, Arabidopsis thaliana
taacattatgttttgtttaattttcagcaccaatgtttcctttttcatatatagaggatatataatccttgaatattatggaataagaaagagctttaacatgtttgacttttttttgcttcatttaatacactgaaaacaattaattatgtgaaagaatacaattgagttgtttaattcttctgtgagcctgtgttcaactagttagttttgggagaacttctcttatcaatttcagtattttccaactatttagatagaccgcttaaaaatatatatatagagaaccaaatttgaacctaaatcgctttaaggaattaaacccatcagcctaaaacacggttaactcaattaaaatttggttcagtttataatatatgattttggagtatttttcgaatatatgttatttcatgaaactacaatgtaactgtctcaacattggttataactattaatctaatgcagttaggtatggccagtgcactaggaacattatgtggtcaagcctacggagccaaacaataccatatgctcgggattcacctccaaaggtcatggatcgtccttacaggttgtaccatttgcatcatgcccatcttcatcttttcaggcccgatcctcttagccttaggtcaagaggaccacattgttcgtgtggctcgggtcatagccctatggctcatagccatcaacttcaccttcgtacccgccttcacttgccaaatattcctccaatctcagagcaagaacaagatcatcgcctacgtgtctgctgtaaccttagggctccatgttttcttctcgtggctcctagtggttcatttcaatttcgggatcactggtgcaatgactctacgctagttgcgttctggatgcctaacattgtgcagctcttgtatgcacatccggtgggtgtaaggatcatggagagga

SEQ ID NO: 13680 - DNA, 886 bp, Arabidopsis thaliana
ttcaatacacaatatatgatctctttaccaacaagagtttataggttatatacattttttagttatcaacatgcaatatccaagtttaaagtttaaatattatagttgtttatatataagcgtttatcaaacctacttagttcttgttttataggcaaaatatgtaaaatatttaaccataaaatagtttttttttggtgtaataacgaaccgtcaatgaaacaatatgcagttaggcatggctagtgcgctagaaacactatgtggtcaagcctatggagcaaaacaatatcatatgcttgggatctacctccaaagatcatggatcgtcctcacaggctgtaccatttgccttatgcccatctacatctttgcaggccctattctcttggctttaggtcaagaggaacgccttgttcgtgtggctcggatcatagctctatgggtcataggcatcaacttctcttttgtgccttccttcacttgccaaatgttcctccaagctcagagtaagaacaagatcattgcctacgtggctgctgtctccttaggggtccatgtcttcttgtcgtggctacttatggttcatttcaattttgggatcactggtgctatgacctctacgctagttgcgttctggttgcctaatattgcccaactcttgttcgtcacgtgcggtgggtgtaaggacacatggagaggattctctatgatggccttcaaagatttatggcccgtcttcaaactttctatgtcttccggtggaatgctttggtaaggtttcctctatttttttaagcagcaaaccatataattatcaattagtctaggatttgatcctaaagttttgattacaatagaaatgcgtgtgggatcctctatcctc

SEQ ID NO: 13681 - DNA, 554 bp, Arabidopsis thaliana columbia
ccaacaagttcacttcacttctcatgtctcatccgaaaaccttctatggaacgcactagacatgtattcttcttcttacacacaccatcaacacatttacaatgcttagttttcagttttcttagcccatatcaaaggcccaacactaaagcccaataaactctttcccgcttcgacggccattataataaactcagctattattaatcttaaatcctgatactgtaaattactcaaatggcttggcttcgtttcttctcaagaaccctaaaatctctcccccaaatctcatcttcttccccaaaccctaaccctaatttcagaacctcacctttctcaacctcattcctcatcacgaaaacaccagacaaattaaaaaaaaagcgaaaaaaaccagaatccgccagaaccaaatcaatccaacacgaatcaaccaaactcccacacttggaatcactcgtttcacgcgacgcacatttccgattcctaatccgatccaaagaattcatctcaaagcaaccggagcgaatcctccgactagacgacgccggaaa

SEQ ID NO: 13682 - DNA, 573 bp, Arabidopsis thaliana
gttatattaagctcagttaggtggacattagaatccaatcgaatgattcattcttcatgaattaattttagtagcccccattgttttatgaccatgttggattttgagtgatttgatcttaaattgattttgggattgtcccgtatttgtaatcttcaggacccagcagaggctgataagctgttgaaaatccagagggagttggatgagacaaagattatccttgtaagtgctgtctccggtcctttcttgtagacccttatacataagcggtacttccttttctaagtttcagtatacttgccaattatacataaatgctgttctgtcggtgagtttactttcttctgaaaaacaccaaaacaagaagaaagtcttggtagttatgatggatgtcctgtctccgtaagactgattttttgttctgtattgtagcataaaaccattgatagtgttctagcccgtggtgagaagctggacagcctagtggagaagagctcagatttgagcatggcatcacaggtaacattctaaagtcacattctagagattcttatagatttagtttctttt

SEQ ID NO: 13683 - DNA, 1119 bp, Arabidopsis thaliana
ttgattgtctcgggggaagacagtgggagggtgttgaaatacaatccaaaaacaaaggagactaccactctcgtgagaaatctccagtttcctaacggattatccctcggcaaagacggctcctttttcatcttttgtgaaggatctattggaaggtgagtccttcatcttaattcctctctgacttccacatcattgtctgtatatatacttggcataacttctgcaatcagcatttctgattgaagctaaaatggaacgattagcatgttgtttccatatcgtttcaatgattctgctagaaacaaactccaatactgtgaacagaatctaagtcattttttgttgttgttgttcagattacggaaatactggttgaaaggggagaaagctggaacgtcagaagtggtagctctattacatgggttcccagacaacatccgcacaaacaaagatggagatttctgggtggcggtgcactgccacagaaacatattcacacacttgatggcgcattacccgagggtgaggaagttctttctgaagctgccgatatcagtgaagtttcagtacttgctgcaggtaggtggttggcctcatgctgtagctgtgaagtacagtgaagaagggaaagtgctaaaggtgttggaagatagtaaagggaaagtggtgaaggcagtgagtgaagtggaggagaaagatgggaagctttggatgggaagtgtattgatgtccttcattgccgtatatgacttgccttagttcgtttctttttctattcaaatttgtatatttctagtttggctatgggattgcaatatgcatctcgttatcaaactatatttgacgtaatcaattcaaacacaaacaattactaaatacagtatcctttttgccatgtctttagtcaattagtctttcaatgagctaaagtttttcgggttttttttcttttttttctttttcggactttaggtttgatcatcaaagaagacaaccttataggtgtcggtcgtgtaaccatgatgtattcggttcagaatattggttcgattcgatactaattgctgggcttaaacaacaaatctatcaattactgggctgggctggccacgtgaa

SEQ ID NO: 13684 - DNA, 518 bp, Arabidopsis thaliana
agtcgatgttgaagaaaggcgttgatttcaacaagagtctgtattttgtatcaggagtttgtggcgtgctatcgaaacaagtagctaacgaggcacgttgttgcagtagtcgtgggaggccatcggtcgtgtggtcaacatttcgactattgcgtggttagtcatcgacgaagcagtggaatgcgcttcaaagaagacatcatatgggttgtcatatgaggttagtttgtttccctcagcaagttgggtgtttttgatatacacactccaacttgagggagggtaatatggtacggtcatcagagcagcgaaatgcgctcagaccgttgttcaagttatcagagctgcggaatgcgctcaagtcattgtttaggttacggagctgctgaaggtgctttgaccattgtttaggtcacagagctgctgaaggcgctcagaccattgttgaggtcacagagccgctgaacgcgctcaggccattgttttatcagagctgtggaatgcgctcaagaggttgt

SEQ ID NO: 13685 - DNA, 1092 bp, Arabidopsis thaliana
gttcatagccgagatgatcttccacgcacgtgtcgaaaaccatccatgccgcacgtatgagccagacactgccgacatcttctacgtccctttctacggtggtctctacgcttcaagcgtgttccgagagcaaaacctgaccaagcgcgacgagctagctgtcagattagtcaactacattagtggccaacgatggtggaagagaagcaacggtcgtgatcatttcttggccatagggaggacagcttgggatttcatgcgctcctccgacactgactttggagctaacatgctcatgcaaatgccacgtgtcatgaacatgtcggtgctgaccgtggagaggcagccttggaatggtgacaatcactttggtataccgtatccttcttattttcatccgtacacgtcagcagaaatggtgacgtggcaggacaagatgaaaaatgtcgagagaccaaacttgtttagttttgtcggtgggccgagaaagggcttggagaaagctgccattagagacgagctgatcaagcaatgcgctgagtcgagccattgtgagcttctcaagtgtgaaaatggagggtccaggttttttacttttatcatgaatttgacaatttcgcaattaagtattatttaatacactcactagtcaccaaaatttcttgattggaggggcccataatcataaactttatttaatttttattgacaactggcacattgggttatactttattgggtagattacattttttgtggttaactctctctcaacttatttgactaagaggtgtaacaacaattcaactaggagacttggttgttgaactatattttaagcgttttgtgtatccttaactaagaggagtaacaataattcaacttattttttgtcttcatcaggaaatattgtaaccttgattatttttactcaatgtaggtgtcacaacccaatgacggtattaggagtgatggctaggtcacggttttgcctacaagcaccgggggactcattcacgcggagatcaacattcgatgcgatgttagccgggtgcataccggtctttttttcaccccacactatgtatacac

SEQ ID NO: 13686 - DNA, 958 bp, Arabidopsis thaliana
tggcatatgataaagcgggggatgcaaaggacgtggcttatgagaaggctggcattgccaaggatatggcctatgataaggcgggcaatgcaaggacatggcctatgataaggtgggatctgcttatggcagtgcgcagaaggcaaaggattctggttatgagaaagctggtgaggccaaagactacgcctacaagaaggctggcaatgcaaaagacatagcttacgaaaaggcccaagatgcaaaagactttgcatatgacaaggcgggttacggatacgacaaggccggtgatgtgattaggatggcaacggataagagcggtgaagcctatgaaggagccaaagaaaagtcaaagagtgccaaagacacggcaggagaagcaatggatgattctattgactacatgaaagacaaatcacacaatgccaaagatggagcaactagaggatttgaagaagccatggaaaaagtcggcgaaaagtacggtgtagccaaagaatccacaaaatatgcttatgaaaccgcaaagaaaaaggcttctcaagttgcgggagaaataagagaccgttatgctgagctctaaaatcaatttgttatacaataaacacaaagtctttaagttaaagcaatgttgaacaaagagaagtaaaaatagtatatatatatatatagaaatctcttacaaatccttcttctttgctgcttgtttattgttgtgcatccaaactttaaacacttgtcttttaactttaatctcacgacaaaaccgattcacttcatcatcttctagttttgtcattctccaaccaatcttctcagcaaactccatcatcttctccttctgttcttcattaaactttgtcctaaaccgtttcttgggttgataatgatgaaaatgatccactccataaccactaaaagattgatgaaacttgtttagacctccgtcgatgac

SEQ ID NO: 13687 - DNA, 586 bp, Arabidopsis thaliana
tgaatcttgtttaagactttaggaactatttgctgtgtcaattattcttacttttttttggaatatcttcaggacccggcagaagctgataagctgttgaaaatccagagggaattggatgagaccaagattatccttgtaagtgccgtccctggttcttgattgttgacctgcatgctttgcttcctttttacattccaatacataccagttccctccattaagttcttgtttccaaggtcgcttaaacatggtcgttttatgctgacttttgttttatactacagcataaaaccattgatggtgtcctagcccgaggtgaaaagctggacagcttagtggagaagagctcagagttaagcctggcatcgaaggtaacattccaccctagtattacttactactgtttcttcagtggattctgagggtaatgggagatagatgaaatagtttctgacatgagaatattggtttgttttggtgtttggatgaaacagatgttttacaagcaagcgaagaaaacaaactcatgttgtacacttctctaagctgtaatgcaactcttgaatgtccctctatagaatag

SEQ ID NO: 13688 - DNA, 458 bp, Arabidopsis thaliana
cttcttgcgggactatggaatggttgctgcagctcgatggattgctaaacttagtgttccttgcctcctcaaggcccttgatgagaatcctagtttcaaggttcaggtaaacgcgcaaatcttaattcatttagagatccgtattggagagattattgatactttttacatgatacacattttgtcttgagaattgcactgttgaaataggaagtcctttatctactgtatcgaatctaaggagcatctttgtttcagattgtaggtcattctcttggaggtgggacatcctcgagctatgcgtatattcttcgggagcaaaaagagtttgcctcggctacctgttgcacttctgcggcgattaggcggattctatctactaatggtggtacttttgaggcactcagtatatgctagacagccttaattgtgatgctcaactctttatatgtcaatta

SEQ ID NO: 13689 - DNA, 504 bp, Arabidopsis thaliana
ctctatggagataccacattcccctagcgattccttgaatgattttgagtcgagaaggccaatctaattgaaattcttcgtggtctccgtgtaatcggtgaagcaaattcaaattaggaacaaattcgaacactagcaatttctcgtcttgtcggaaatggtaagctaggggcgttaatacgttcttgtgttgcaagcttcctagtttcctaatctccttgtcgaatacgtcaacactcacttgattcattaccgtcacacgtttcaccactaccgtgacaccgtttgaaagaaccgctttgtaggcagatcccacgcctccgctacttcttggacggttgcttccaccgccgggattaccaagcacgtgagccgccgctttcatcaagtctgataaacggaaaacacctttttccttgttcaccataactaggtctgatgtcccgccactcctttattcaattcgccggaccgactgctcctactctgccttgagctatttga

SEQ ID NO: 13690 - DNA, 576 bp, Arabidopsis thaliana
ttcacttttaacgtatattcttcgggagcaaaaagagtttgcctcggctacctgtttcacttttgcaccaggtacacccaatttaatgattaatggtggtatttttttgtcttcagttatctgctcctctcccttaattgtgatgctcaactctttatatgtcaattagttctctgggtcaaaaattgttaatatgcactgaatttcaaattgaacaactcgcagctgcttgtatgacttgggatttagcagaatcaggcaagcacttcattactactattatcaatggatctgatctagtcccaacattctctgcttcttcagtcgatgaccttcgttctgaggtatatgacctgctttgcttatatgtgaagctacattcacaggatttatctctgccaccattaggagaaattttcctgattctgtagtggtacaatatattgctaaccttggtatatcaaatagtggatacaagcctgcaattttaacttggtacttctgtagagagaaaatgtatagagatatgatctttcccctgctaaatgattcagtctttccagacaacttagatat

SEQ ID NO: 13691 - DNA, 1045 bp, Arabidopsis thaliana
tccacaaaagaaacaagaaacatgagatatgttgttgttgtggtaatggaacaaagacacatgaaagcaataattgggacataaaccgtagggaaagtgttgcttgtgtaagaaatcaacacaccaagtttttccgacagctccatcaccaaccgtcacgcactttacgaacctcgaagcgctcatttcccctcaaagtttattaatttcagggaaatttataaaaaaaaagatctcaaagatttagcctttggaattggagactcttgatatttctattgatcgaccatctgggcattgcggattcgaaacgattggagtttgtcccagagattagaaaccctattacccaaaaagatagaggggaaacaaaaaaaatgaaaactggaagatggcacaaaaaccgaaaaaaaacaaagagttagttagagttagctttggccgggaaaaatggcgttgaaacgttccgctaaccaaacttgtctttctatttccgattattgtggatttcctcttttaatagctcccaactaatcaaaattaccaatcgattgtgtgtttatttatgggaaatcaaattaggcacttgtctttttctgccgctcaaacgaatcatctctcttttcttctgttacgtacacatcacgagtgtttgattatcattaaacttgcttacttctttaagcaatccccttaactacctcactaactaactaactaacacttctccaatgttaataataccttggtaggtcaccttccaatgatttgacttggctaagaagtagttgaattgatgaagtttcaagcagtgattcaatgaaaagtcatttaaccaatttcatttcgaaaacagcataaactcaacctaacattcaaccaaaagattagcttggatcaagcaaaaacagagagcaaatggtaaaacaatttgtctttctctctttaaggaagcaacctcttaacctcctcttgatcctcaccgatgctcttagcttggttgtacacagactcaaaggcttgcatacacacacttgaaaaccca

SEQ ID NO: 13692 - DNA, 591 bp, Arabidopsis thaliana columbia
gtaacttgattacctctgtatgattatattattgatctatgcatgtctgttgctctgtactcagacttaatatctttctattgtccatttggatttttgtgtgattgcagtgtgaagaagatagagcgaccagcgccacactcgcaactcgatgcagatttagctggtggaatgggaatgccagacaatggtccaaagctgatgtctgcctgagtttttacagttattttccttatttagttaatggaacccgaaattttgttgtaaaactataatctcctaaattaatgatacaggttttttgtctgttgccaagtatctatcatgcagttactggtttagcttcacttagaagtttaaatctgataaatcatatattgtttgtgttggttgcataaaaaacttaaccatataagccataccaatcgttgttttgacaaaatagaaagaacaaaacactagctctctcagctgctgatatgcgtttgtaattgagatcacattatgcagaccttgttctcttccggggaactattgccttccacgagcaatacgccaaagtgaagcatagaagcagaagaatccataaga

SEQ ID NO: 13693 - DNA, 603 bp, Arabidopsis thaliana
tgcctcaggttcagctctggctaaatcactcttcttcggtcaattgcttcttgagctgctctaaaccgaagttctcttctggctgtttcatccaaaggtaattagctgcatctatccatcctctatgaaccacatacttcttctctctaacggcccaacgagccttctctgttcccacatccattgccacaacgtgtgtcactgatgcatccacttccgttgcgcaggtggctcccagttcctcagccattttccacagggggtgatcttctggctttgccttggttgggaacacccgactgaacactattttacatcctttaagtatctctttacgcacttgtttcagcattaacctaacatctctgtttgatatgccttcatccacattctgaaacaaacgaataatataatcaacaaactccaacaagacaagagataagttttatttagatccagtgagtgcatacctcaaagaatagagcatgcgcttgttttaggactttcaggacagttgcaagtgccccatctggttcactctcatcactcttcaactccgatagagacttgtatctgtgatcaaactgcatgcagctcgaagaa

SEQ ID NO: 13694 - DNA, 860 bp, Arabidopsis thaliana
tttaatttacagaaattcacatataatcgaatccgaaacctactcaaatactctcaattaacaaggttgagtccagattagagtgtcggagaacttaccgatgagaatgcgagtaaccacccaagtcgggtttcatcttcagagaaaagcccaaatccgagtttagattcgagttcatcttccgcagtgttcactaccttaggcttcttcgaccaccgcgtatcctttcgatcccgtcttcgattatctccgctcattttgcggcgattataaattacgcgggacagagagagattcctatatagagaggagctttattcctggagaagctttgaaggagaatttagggtcaacaaaagggcttttactggtagggcttcgtggatgccggagaaagtgagtgaaagagtagagaggaaaaaaaaatcttttatcattttcccgcgcttttggtattggcaaccaaatcactgataagcccctcatttttggactctaattgggcctatctaaaagcccatctttatcgcatttgcattttggatttcgaacacagcctttccattcgagacgatgatgacaaattaggatttctagctcgaggcgaaaacaaacttccttcttgtagctgtaggtgttctcaagctccgactcacaagtcacaagtgtagactgtctccttgaactcgaatcacctccggtaaagtcttaaacactctcatatctcaattggggtatggagaaaatcggtttatgaaccaaataacttaaaccggatcgggtcgaattaattttcagttaaatgctggtatggtcgatacgactgtgacttgtaaggtggttgtggtaggtggagaagt

SEQ ID NO: 13695 - DNA, 1126 bp, Arabidopsis thaliana columbia
taatttcagactagatcttaattggttccgtatgtattactgatttccaaatcattaattattaatgggcctatctaagcctgtttaataaatgggccttgcgtcaaagtctccatcactgaaaccgccctttttaggttaatcaatactttataaccgaaactgatattttttctagggtttcctcttccgcattcgtcgtcttcagctcctcctacacagtttcttctctgaatcgtaagttttgaattaatctgcaaattcgtttagattcttatcaattagtcactaatttttcaattgatgattcgatctcagtacttaggaagctaaaatgggtagatgtccgactagaaaagtgaagaagaggagattatctcacaaaacagctcgccgtgacaaattcgaagtcaaaggcgatgacttggtttacacagagttgcgtaaaccggagacggagattaagccgttacagcttgacgaggatttgcctggaatgggtcaattctactgcttacactgcgagtaagagagattctatgattactctattgacgattcttttggtttatgaaacttttttttagcaaatacattatctttgaattactctatatgacccatttgtttgttttccttgatatgttttagtcgatacttctccaacgtatcagtgagggatgatcatttcaagactaagaaacacaagaagcggtatgtggattcttctccttccttggccttggtttctattttgttttgtgttcttggaactgtgtttggttcttgtgctcgtttactttcttgcttgcaatgttaaagctatttctcttcacttctgtgtacctaaagatgttttagcatttgtaatttgattacctttgtatgattatacatgtctgttgcagtgttgctctgtactcaagacttattatatgtgttttgtccacttggattgcagtgtgaatatgatgatgggacaagcgccacactcgcaactcgatgcagatttagccgggggaatggggatgccggacaatggcccaaagctgatgtctaatttggtattcacagagttgcgtaaaccagagacggaggatttacctggaatgggtcaattcaactg

SEQ ID NO: 13696 - DNA, 576 bp, Arabidopsis thaliana
cgcttctacatcgaacggcacactttttttgtttacagacactttttcaactacgatacgaattaatactgattccggttaaactctgaaattcatatgactgttgagagggaaaaagcaactccgattaaagagacaatatctcaaaacaacattctaaagaggttctggagcacaaagtaacgagaaccaaaaaagaactataagagttctgatgattaatgtatacatcaaaagacaaaaaccaagaaaagagtcgagaaccaaaccattgaaaggtcacgctttttaggtgttggtggcacgagtgtagatctgctggctcgagtgtgcagagaccatcctgatcaaaccttttgccattagctccctaatcgccctcctcgcaagagacccattaatctgatttttaacaattcacaccataacaaagtcagatactaacatttgaatcatgaggaagtaacaccaaccatacagtttttaaaaatgcaacagagataaaaagattgtatccctcatacggtcggagaggattgatggagtgatgagcttgaacttgggagcttcagtgag

SEQ ID NO: 13697 - DNA, 708 bp, Arabidopsis thaliana
tcagagcctggaacggtgtcaactcaaggatgttgtagctaccaagcctgagaagctcgattctttgggtgagtattgatctgtaacgatggagtttgatctatatatatatcgtagaaatctctgtatctatatatatgaagtattaatacttgattggaacagtggttgataatggggagaactggagcgtagggcagaggcagcttctatgcttaggcagggttatgttgaaacgcagcagacttctcttcctagacgaagcaactgcatccgttgattcccaaaccgacgccgtgattcagaagatcatcagagaagactttgcgtcgtgcaccatcatcagcatcgcccaccggattcctacagtgatggacggcgatcgagtccttgtcattgatgctggtaagacttaaaaaagaaacaaacttgtcatgttttcagttttacagaaatacagagttgatgaattatggaattttgaacagggaaagcgaaagagttcgatagcccggctcgcttgctggagaggccgtctctgtttgcggcgctggtgcaagagtacgctctccgatctgccggaatatgaatcttttacgccggcggggactgaaaatattttaaaaccttcttcaaatgagatttgtacaaagaaaattcctataatccacatgttttagattaaaaacgacatcgtaattttagtgc

SEQ ID NO: 13698 - DNA, 605 bp, Arabidopsis thaliana columbia
tgttcaggagatggtggataagggaaaatgagtaaggtgactaggaccggttagggttggttttgttgggacgactgaacttcactcgagggcgagacggtaattttaaataagaaaaaggttgggagaagatgaaaaagtgtgtcagtttcgaaaagtgttataaatgattgaaatcttaaataaagtgtcttaagatgcaaatatttcctttttcatagtcccaattacataatacaaagaaaatgatttaaataaaaaacacttgcacattgaaaataacaaaatatttaaaaaagtaacaactcctacatacataagtgaaagcccttctttgggcaatgaagtgtataattaacactgataaccaagatataacatttttcacagactgctcaagatggtgtcttcctcaaccgaatagccgacattctcagtgtatttagaggaattgcatagtgacaagaatgaatttacaagtttttctttatctttaattttttctagtgcaaatgttaaaatagataatttgacacgaaaaattcgtgttaaccgcatcacatcacatatgtgacaacattcctcagaaatgatttttttgagat

SEQ ID NO: 13699 - DNA, 571 bp, Arabidopsis thaliana
  unsure (1)..(571): unsure at all n locations
gacgaagacccacataagctctgcatagtcgtcatgtagtcgccggagacgcagtaccctccaccgccgacttcgtttccggcaagaaacgagtacaacatctgatctgaggtctctggttgcattatcttttgtttgcgccgccttcttttggttttttgttaattaatggggtttgtggagctttcggtgggttctgtcctaaaagatggattatatatacgtgaaatgagagggtagagagtgtagattattttttttattttttttattttagatgttaaatacttgatttttgtatttatatatatattggtggggaaaaagttgctatagagtttgaaatttttaggaagggtccttaattaggtcattgtcttgccaccatcatcattctaaatagttctatatgatccatcaattgaactgaagatacatacggacttttgggactatatagtatattactgcattccanaattcgaaaattcaaaaacaaatctcaaaaaattgaacattctttaaatctttacttatgaataataatgatgtttaccactaccataataat

SEQ ID NO: 13700 - DNA, 613 bp, Arabidopsis thaliana
cgctaaaatttatttgtgtaatgttttatcatatgatatttgtacttgataaacttcatttaataatagtaatagtgacataaatttaacattagagactataaaaaaaccatttcgaaacaaatcataagtagacccaatggagtacatatatttttatttttttgctacttttatttaacaccagacaacctagagcaagataataaaagaacaaaaaagtctccgatccttaacaagtcttgaacatcttaagaaaaacagtgaaagctctatacataactacaagtgaccttctggaccacaacattgtctcctcaattttagaaacttcttctgttcttaagccaaattgagaactcgtcaagagtgttcatgtctgccctataatgcttctgtgtgaactcaagaaacatagaccacgtaaaatcaggatactttctttcaccagacttcactccgtttactagttcttctggtggcttcacacttttcccctttcggacataggaagaatgcaaacgtctcctttcttctcgctgttcacaccgccgatgcaacaactcttgtatctccattcgttagaggtatgattgaaaaaaaatggtataag

SEQ ID NO: 13701 - DNA, 608 bp, Arabidopsis thaliana columbia
caatttcaatccatcacacataacaactcaaatttcattcaccagaacactaatttgttcatcaaactaaacaaactttctatatctcactgagtaacaaagtttttagtacctgagtacgcaaaattgcttggtgatcaggcttattcttagcactaccatcacctgctaatggttcctcccaatttttccgattaccattcttagcagacgaaccgactaaagcttcagaaacttttgagattccggctgcaatcaccgccatcttcttcttccctgaagaatctccaaccattggagtcatctttaaaccactagaaagtcttcttcccggtgaaatcgacattcttcttccactaggagaaggattcatcttccttccattaggtgatggctgtctataccttgacggcacaacaatcgatggctctctagctactttcctattctcctcacgcgccgccgctaagcttggcacaacgcattttgacggcaccggagacgcagatctcctccctttaccagaaaccacaggtgacggatctctctccaccgttacagctacagcaccagaacagttcttcttccctgatgagactgatcgttta

SEQ ID NO: 13702 - DNA, 709 bp, Arabidopsis thaliana
tcaattcaaatattccttcattaaattcgtgtttgtactttgtaatcgattaactcaaaaactctttatttataagagatagtcttagcgtttctcggttggtatgtctctaatgttgtttcagaaaacatgagaatagactaatatcttcaacaacatcaccacgcgtgagataagaaactatttggaatgatctgtatagtgaaaccttggatgtttatttccctgaacgcgagcatttacatgtcagtttcttctttttacacggagcgccacatgtgtaacagaactcgtgtttgcaatgtctgccaggaacaaaaagacagatagttaaagtcaaataatataaaagtaggctcaataaataacaaatgtccaatacctgcaagtcatttgttggcagccgccaccatgttgaacgatgctctgacactgggaacactttttccatccttgtgtcttcacaaaagactccaaaatcgccgcgtcagatttcaggtaagactccgacttcttgaactcatcgcatgtcttcttgtagtgccacggaacatggcattttttgcagaaagacaagccgcactccatgcacttccgtgcttcttctgagtgccgaggatttttgcttatgtgcctaatgaggtcgaggtccgacatcagaaaagaacaagatgggttgggacaatagactctgtctttaacggggata

SEQ ID NO: 13703 - DNA, 608 bp, Arabidopsis thaliana
ggccataatctttagttgttatcttctctttcatttcttttttccaaatgttttgttgttttatagatctagtttatatataagaacattgtttaaactagtgtatctataattaaatttaatacgtacatatactgaaacacacacatatctattcgactgacttagtatgggtcaaggatgacacaccacatgtacacagtacacgttgagcaatgaccactgcgtagtgtttgtcctttaaaaatcaaatttcagataacattatttcaacgtacataatcatcatacaatacataaaatttgctttatatttttagaacaattactaaatttagacccttttaattattgtttcgcaaaacataaataagaatctagtagatcttaacgtctcaaacccttttttgttgtatcaaatgaaatacaaaagagatcaacccaagagaggagtcctttttagcggagtaggacacttgaagccacgaggtggaggagtcttaccacagtcgacaagaacctctagagcaattgggataatgaggtcaatgttgagaagcttcgctctaatggtggtgcagagacaaaccgccgcgtcaagacccact

SEQ ID NO: 13704 - DNA, 985 bp, Arabidopsis thaliana
ctgaagcatcccctttcccaccactcccggcggcatccttctttctatcaagctgaaacgtaccaagaatcacctgcatttgcacaaatctaaggcgatcaatcaaagccagacctcctatcttaggaaatgatcagttttgtgtaagatggttggaaacaataacaatgtttcaatatatgcaagttgaaactatgatacaacagaattgtacctgaaccgggccagcagctgtgagatggctaccaatcgctccaccgatgatctgaccatctgaagcagataaagaaacgctaaggccgccggatttaccaccttgttcagttcggatataggatccagatagtgagagaatctcgtattgaccctgaataaattttttgaaatttgaggcaagtttaacaatgatatgcaaacttcaaagaaagtatctgaattaagaatctctttgctttatcaacatgctaactgtattgtgtatcaattttcctctatcacacagaatagagagaaaggatcagaaagaaaaaaccctcctctcccctttggaaagaaacaacaaagaagcaagctgagtactattttactgcaagagaaaatcacctcatatggtaagttgcctcctgatggagccggttggcgcaaggatgcattagagatagtgcctgatgcagaaagaacgcatagttcatgcttgctttggtttgcgaacatcataattttctggaccacatcctgacagtatcacaaagagaacacttagaatcattaaggatcctcctcgatttgcattagtatcaatgaaacaaaaagagaaatagaatgacttagaattgaaagaatgatagatattgtgcctacaccaacaaatctctattacaagtaaggatcttgagtgtacaagaacatgacatacctcgccaggagctatattaacaatatgcggagtaaaacattgtccagttttccctggaatcctatcctc

SEQ ID NO: 13705 - DNA, 972 bp, Arabidopsis thaliana
attactttatcaagatcaataacaggtaacggaacaagactttgcttaacacgctgattcctggaatccaaaaaggatactaatttcaaaaaaatcatttgacaatttcgctaaatctgaagaaccctaaagaaaaaagaatcgatttttggtttaccttcttgaagaaccagaaggtggggttgatttaaacaacaaattggaacgtctccttcgctttgaagaacttctttcaggagtatcatctaccacaaagctagcgattatcagatcttcttcgtcccaacccgccatagccgccgctgatttgaatctcgggctgatgaatatctctgcgttttcaccattcttctctctcgcgatcgatacttcctttgatccatttgatccatctccagatcgattagtaactctcaatggtgtttcactcaccattctctggatctagggtttgagagatttcagagaacgctccccgaaaagagagaaaaaaatgtgaaagatactatttccccaacggtcggaatctttttaaaaatcttaatttgtaaatgggcctttgttgggccaattgattgaaatgtttttcataattttccttttttttttgtttggtaaagatttgattttccttatttacatcactaatcgaccaaaaattacaagaaaaaaaaattccgacactggcaaaaagttccactgtagaaattcaaaactaaaaagagagcaaaattatggctaatgggctttattattaatctgttttttaatctttcgagctattctatgatgggccgaagagccctttttaaatctaacattgtcgtcttcttccgctttttcccaaactaaacgctgcgtttttttgtctttgaacttctcaaacacttgatctctaagccccgtatcattaacctcacagaatctctcagcccaatcagatggttcaacgggtcgggttctaaaccgggt

SEQ ID NO: 13706 - DNA, 507 bp, Arabidopsis thaliana
gtaattaaataaatacaatacttgtttttataaaagttccttcgtgagcaaagagaccccacgtgcaacgatataaaaagagagagagagatctataagtataaactgacggcgttcaagtcaacgttgcagtcaataaaaccgtcaaaagtaaaaagttaacggagatcgttatcacacggatctctctaagctaatccgggactcctcatcggcgaatccacaagcgaagttgcagactccggcgacattgtcaacgaatcttcatcgtcaaccatagacagaggcgattccaccgtagagtccgaagattccatcgaggatgtggctgagagcggaggcggcggcggtggagtggtcagcttccgtttgtttccttcggcggcgactttaacgtctctcgtcaagtaactcctcagacgtttcacgtcggcgagtttcacgggttttagtaaaaaatcctccgcaccttcttcaagacatctacaacagatttattgattaaat

SEQ ID NO: 13707 - DNA, 606 bp, Arabidopsis thaliana
tgttcagcctatgtccatgttactcaagacaagacaagtccgagagcagtcaaaggagttttcatgggatatccttttggtatcaaaggatatagagtctggttaccggaagaagggaaatgcactacaagtagaaatgtggtgttcaatgaaattgaattgtacaagggcacactaagtagtccagatggaaggacggagtaagctgaaaaagagtacagaaaattgaagaaagctggaaaaagagtgtcgttcagccatgatcttcttagaggtccttcaactagctactatgatttggaagactcatcttctcaaggtggagaaacctcctcatcttcatcagaaagttcagaaaacttagaggaatcagaaacgaatgaggaagttgatggatctgaaaatgagcagtctcttgatgattacttattagcgagggagaggaaacgaagaagtaatataaggcctccttccagatttaaagacggagattttgtagcttatgcattggcaacagaagaagacttggaaatagaagagcctaagtcttatgaagaagctatgaaacgtagtaagagaaagcagtgggaaagtgcaatgaaagag

SEQ ID NO: 13708 - DNA, 998 bp, Arabidopsis thaliana
taaatgattacaagaaagatctcacctgttttttccggcgagcgtggggtcttaaactgatcaaaacatgtattgagaagaaagaaaccacacaaactacaccaaaccacggcaagcctcaacctctactgcttccgtagtgagtagagactcactaacactcctcatcacagcttccaagactgctttcttgaaccattcgtctcccattttcattagaatctctttcaccaactcagaatccgatgctttggccataaccaaactcccaaggatctccccaaagttgtttggcgcttttggcagatcgatcccaatgtcatcgagcatagacccatagagcagacaaccattccttaagtctttaggagttagaacattcttagagaccagatgttccaagagcttcgccactggttcaacacaaggagggttcttctccaagccgagggagatagcttccttgacaagctcaggatggtaagacggggttttcagttcttctatgcattgtaatgcctcatccaatagacggacattgaaatattcctccaaaagcgagttggtctttctactgagctctactgtgttcaagctagtagtcgtaggaggagccacctcctgtggctgtggttgtggttttggcttctccacagtttgtctggtcggggaaggaacaggtttaggctgttgggaaccattaccttgcacaagggcacttggtctatcgttcagaaggcctccactgccctgaggtagcagccttgaattacctctctgagctgaagcagctgttctcgagtgaaccgcaaaagctcatgaccctcaaatcgcgagtctcctttctacaaaacacatacaagtcattagacttgaacctcagaattcgaagcaacagatgaaaaacatggttggatttactacgtataagctcaaaccaataaaatgtatataagttatatatgtaggtcctttatgagcatcaaaaactgatagag

SEQ ID NO: 13709 - DNA, 489 bp, Arabidopsis thaliana columbia
caataacaggttataatatagttgcggaacattacatgctgaagatatacttgaagaatataccccaccgacaatagaaacataaaagattttatccatcattgctaatatttatggggttgcaagtatatcgattatatacgttggtctatttatgagcactgtattctcttccctgcaacaacccaaaaactataagactaaataacttagcttccgacaactttaatgcaagagggagctaaacacacaggaaatcaaagctaaaaggtaaacgtaaaagttatgaattgtaacgcccgtgaaccggaaaatcggttagggtttgtatttaaatcgtcaggtttaatcggttgggttaattggaaaccctagagtgtgcctatatcagaagaaaactagaaattaggactttagttagccacttttcgttttataaaggagaaacagagacagaaggaaaagaaccagaatcgttagggtttggga

SEQ ID NO: 13710 - DNA, 840 bp, Arabidopsis thaliana
agttctttatcgaccatcctggtgctgttccgattactactgctcagggagaggagctgaggaagcaaataggagcacctacttacatcgaatgcagttccaaaactcaagaggtacgtagattagtatatatacccttgttgcagatttctaatgttaatgttaatgctaatgttgatgatgtgagagtgcagaatgtgaaggcggtgtttgacgcagccatccgagtggtgttgcaaccgccaaagcagaagaagaagaagagcaaagcgcagaaggcatgctccattctatgatgattggcaatctctgtttttatgtatttggttttggtatatcactcttctaacaatgaatgaatcaatgtgttaatggacagacacccaagtttgactggtcctttttgttcttaatattaatggagtttgtcggaatcaacgtttcttttgcttctacgattcagtcctatgcataattccacacaaacaccacatgttttgaatcagttttcattcccaccatttcttcagctgaccatattttgtatgttactgttttaaactttgcaaacatgtttattggtagagagtgtaactaggaaatgaaaagtaatgatacaagttttatttctcaagattactcttcatgcttctgcaacaagacgagaagccattgattattgatgatttgcctaacagaatgcaagaaataaattcattcaaaccattccattttgattttctcgtatttctcattcatgccaccatcttcttgctgtctctgaaactcgatgtaacgtagagtactatttatgaatgctctgctcctgactcaagcttc

SEQ ID NO: 13711 - DNA, 1349 bp, Arabidopsis thaliana
catatccattgaccaacgaacttgaaatctacactacaatgtggttgaataaacaacacaatgaacatctttatgcatgatctggtcttgtcttctttcgcaagcatgaagagaccacttctcatcccaatctgcgaagtaacagtcaagtcgtcataataactaataaacctcactttacaggtgcagtaagtttcacagtcttcataatgtgttcgattctctcagctgattcatgcatattcttcttcttgacctcttccaagagcagcaaacaagtgcggtgcctcggcgtgatatcttggctaatcatctcttcgaatagacaatacgcccactcacacatattagctctgcataacctctgtatcagaaaagtataagtcgactcatcgaggctgagatgatgtttagtcaccatctctttcaatagtttcccaacctcaacaacatctcctctcttaaaacaagatctcagcaggggttgatacgtatgaacatcgggattacaaaggtttgaactttccatttccttgagaagctcaatcgccttatcttcctcatcgtgatgacaatacatagcaatcatagagttataggtagatgtattaatggaaacaccaagctctggcatctcgactctgaaaacccgctcagcttcttctaaccgaccagctcgagcaagcgtgtgaatcaaacagttgtagaaaagagaatcgggtttacagccggatcttttcatccttgtagcaacccgtaaagcctcctcaaactctttctgtgcattaagagaagacataatagttgtgtaagtaatagaattcggaggagacccattagcttccatctcacttagcatttcatagaccttaataaactcaaactgctggcaataacaccttataatcgtcgtatagctaataacacaaggacgaaaaccatgacctttcatctcttggatcgtccaaagagcttcctcaactctatttgccttacaccaaccatgaatgaagatattaaacgtatgagcatttggtgtaatatgtgacttcagctgtagcaaaactactcgggcctgctccactcttttctccttgcaaagcgtatcgagcagtaagttcatcgactccgtgttcttctccaatccaaattcacccaacctatcaaatattcccacagcttcttcccactcccctgcaccagcaaatctcctcatgatcttagcaactgtattcaaagtaacaagtttatctcctctcattctctccacaaactccttcatccgatcccatttcttcgccttgccgagaatatcccagtgttaacaaaatatacactgttatcctcta

SEQ ID NO: 13712 - DNA, 598 bp, Arabidopsis thaliana
ttttgggtgaatcattgagtgtactttttctgtgtagttgtttgtttgttttttgagttctgatgctaaattccgttgtaaaatttgagttgtgtgattggttttaatgcttggtatcaatttgacagggatgagactggttttttctatgcgttggatctaggcggaacaaacttccgtgttatgcgtgtgcttcttggtgggaagcacgaccgtgttgttaaacgagaattcaaagaagaatctattcctcctcatttgatgaccgggaagtcacatgtcagttttctcactaaacttttattccttattgttatgattagtcttcttggttggtctatatctttgtgtattggttacattttggcaggaattattcgattttatcgttgatgttcttgccaagtttgtcgctacagaaggcgaggactttcatctcccacctggtagacaacgggaactaggttttactttctcatttccggttaagcagctatctttatcctctggcactctcatcaactggacgaagggcttttccattgacgatacagttgagcttgttctcctttcatctctttccaccaagtttttgata

SEQ ID NO: 13713 - DNA, 595 bp, Arabidopsis thaliana
taccaattattaacataaacaccatgtagaccaagcatttcaagcatagtttaactcatcttaacattggtggagagcataattgggaaatgaaatcttacagctgggggtagtgagtttgagagtcctgaagcaaatatcgtacaaggcctcattatcaagaaccatgcactcatcagcattctcaacaagctgatggacagacagagtagcgttgtaaggctcaaccacagtatcagaaacctttggtgaagggaacaccgagaaggtaagcatcatgcgatctgggtactcttcacggatcttagagatcaacaatgttcccataccagatccagttcctcctcccaacgagtgacaaacctggaaccctacacaaggaaatctcacagttcaaaacactagtaaagcattatcaacactaaaatcaaacagatctataagaagaagaagaataaccttggagacagtcacagttctcagcttccttacgaacaacatcgagaacggaatcgattagttcagctccttccgtgtagtgtcccttggcccagttgttaccagcaccggattggccacagacgaagttatcagg

SEQ ID NO: 13714 - DNA, 1177 bp, Arabidopsis thaliana
agtacaactggaaaatattaatagaaacatcacaggcaataacaagattaagaacaaaagtacagaaacatcaaccagatatgtcaaatacaagcagagaaaaaaactacaactggtagttgaggtgttccttttaaaaaaaagaaaagtagcaaacgactaaattgtttttgtttttaaagcagttataactaaattattctcagtactcttcctcctgttgatattcaccttcttcctcatcctcgtagtcaccttcttcatccgcagttgcatcttggtattgctggtactctgacacaagatcgttcatgttgctctccgcttctgtgaattccatctcgtccattccctcacctgtgtaccaatgcaagaaagcctttctcctgaacatagctgtgaactgctcactcactcgcctgaacatctcttggattgatgttgagtttccaatgaaagttgatgccatcttcagaccagtaggtgggatgtcacagactgtcgatttcacgttgttggggatccactccacaaagtaggacgagttcttgttctgcacattcagcatctgctcgtcaacttcctttgtgctcatcttgccacggaacatggcagaggctgtgaggtagcgtccgtgccttgggtctgcagcacacatcatgttcttggagtcccacatttgctgggtgagctcagggactgtgagggaacggtactgctgagaacctcttgaggtgagaggagcaaaacccaccatgaagaagtgaagacgggggaatgggatgagattcacagcaagctttcggaggtcagagttgagttgaccagggaacctcagacagcaagtcacaccagacatagtagcagaaatcaagtggttcaaatcaccaactgcacacagaagaaaatccaagtatgtgtaagctttagacatatccaaacagtacgatgagaaaagaatcaaagcagacagtaaactcaacaaactgatgatcatcaagtatcagatttctacttgcaacttaaccagaaagtattgttccaataagagtagtttaaggacctacttcggtgatgagatcaaaataggtaaacagaagcaatatcacacaaaacaagaggctaaagatatgtacaaaacgactggaaacagtaacaaaagtataagttctgcaca

SEQ ID NO: 13715 - DNA, 1102 bp, Arabidopsis thaliana
ttgtttttgatgctcaacatcttaattatacaaactggatataaccatccttggtgtatacattaaagttacttgatggagtagggcttattctcaggcgtgtctccccaagaaacaaaagaacctttcgatattgctgctgcagggctgtgtccattcgccactgcctagcgttccaaaaaaaattactttcccgctacacattattcagcttcttatgtttcaaaaatttttccttttattttacagaacctaccacaagtattaacagctaaagttcacaaacaattccagtaccgcataattaactacaaagtaatctataaacagctgcactaaccttaacgaggcatgttagagcaagtagctctgttatgacctgtttcaccgcatgtcaaacatttatcgcggtctatggttgaggctcttctgtccctgtcacattaaaatctctattagtgtaacattgggtctacttatttcaatatgtatactttgacgtaccgtatactcccccgtagaagggatccttctcttccttctacgtcctggaccattctcgttcttaggaggcagaaatttagtctcttgcactgttggagggatgacttcatcactttcattagacacatgataaataaacatttcatatgccccgcagaattgtgtaaccgtgtaatggttacctaccaattccgtcacaaggacttctttctttcttgctgcagctaaagcttggtagaagagtatttccagcttccaaaattgcaagcaagtacaggtcttcattgcaaggtccacgtagtactgctttacgccagacccaacttgaaaactccattctgaaacagctttaacaggtaaaccagcagaagccttatggtgccgaaggagtagctcgttaacctttggcgtgatgatttctcacaaacaaattagtttttttgctttctcccgtctgaaacaaaatcactccatcagctttattctgatagactccagtatagacacaattggtagctcaacaatttttgctatagcaccgttcaacacttcagcaatgttactactcatgatgttatagcgtttagcctgacaatac

SEQ ID NO: 13716 - DNA, 976 bp, Arabidopsis thaliana
gtgattcactaaacatttgatatgactttataaaagacgttgcataaggcaatgggtctataatcagacaacgttgaaggatctgtcacttttggatcatacaaatattagtatgattaatgttggtcttcatagatgatgtttcaaagaagtttttttacttctattataacatcgttgccaactatgtcccaacattgtttgtagaatcttgctgttaatccgtctggacctggggctttgtcatctccaattaggcaaatagcttcatatatttcattgtagctaaatgcttttgtaagatctaaatttactgtattagagagatgatttaaagtatgcaaattcaattggggatacttgtataccatttgaaccgaagatgtttgtgaaaatatcttgagcatggtgactaatctcatcgtctccagtaaacatttgatcctgctcatccattattgagttaattctgtttcgggaatacctagtttttgcgcaagcatgaaagaagcccgtgttacgatcgccctccttcaaccactgattacgacacttttgtttccaatatttttcttcatcactgaatgctttggacaaagactcttgtatctgggaatttgatgttgctctactctcaccatactttccattgctgtatttaatcttgactgaaggttttttattgtcacgtccgaatttaaattggaacagtgtttgagtcttgccatggcccgtctacaacaccggatacgttctgtaatagctgtttcttgaaggttgttgttggtgccccaacctacttgaaccacacgtttaaaggtatgtatttcaaataggcggttatcaaatcgaaatagcttttgacgtgttggagttgaatcattgatgtgaactagcactggtttgtgatccgatcccgtgaaatccaaaactctgtttctgcattaggaaaagctgctgccgaagccgaattaat

SEQ ID NO: 13717 - DNA, 460 bp, Arabidopsis thaliana columbia
ctctttatctcattaatttacttatttatgtattggccaaccacaccaagtggtataagttgggatacactgaatctattgatcaaattggcagaacagagattatactactcaaatgaatctctccctcatccaatttatttgcacaactatgaacaaaacttgtgagagttatgtagcaccatgtggctttcatatctaagaggtaagaaaaggttgaaactttacacactgaatgtcaggcaatgaacattacagaggagggtgtttaatttctttcaaactcaaccgtatccgtaagttacatcgcgtttcgctacaacagagtcaaatggtatttcgactctttccttaacaaggcaccgtgcttctccatcttcaatcacaagaactttccctggtggacattggttaggtgttctctccctctggtagctcggtgcgggagaagtccaaaaag

SEQ ID NO: 13718 - DNA, 1498 bp, Arabidopsis thaliana
cacatcatgtcttgagtcccacatttgctggtgagctcaggactgtgaggagcagtactgctgtgacctcttgaggtgagaggtcaaaaccaaccatgaagaagtgaagacgagggatgggatgagattcacagcaagcttacggaggtcagagttgagttgaccagggaacctcagacagcaagtcacaccagacatagtggcagatatcaaatggttcaaatcaccaactgcacacagagaatgaaccaagtatgtaagccatatagacacatacaacaaacaacatgatgagcatagcaacatatcttgcagaaacaagtatattataaagaagacagtatactttcacaaatcgatagtcatcaatgaattcatatcccatatgtaacagcaagcaacatataagattaaactagaaagtacttgcagcttcaccggaaagttttgttccaataagattaaagagcagcttaaggatttatagtgatgagctcaacattgataaaccaatagcacacaagacaagaggatatagacatgaacaaaccactagaaacagtgacaaaacagtaagttatatatagagaaaacttgcagatctgaatttgataccaattattaacataatcaccatctagacatagcattttaagcatagagcgactaatctaacatttgtaaaagagcacaattgggtaacgaaatcttacagctgggggtagtgagtttgagagtcctgaagcaaatatcgtacaaggcctcgttatcaagaaccatgcactcatcagcattctcaacaagctgatgaacagataaagtagcgttgtaaggctccaccacagtatcagaaacctttggtgaagggaacaccgagaaggtaagcatcatgcgatctgggtactcttcacggatcttagagatcaacaatgttcccataccagatccagttcctcctcccaatgagtgacaaacctggaaccctacagaagcaaatctcgcagtttaaaactccagtaaagctcaatcaaccctaatacaaacagatctagaagaagaaggagaagaataaccttggaggcagtcacagttctcagcttccttacgaacaacatcgagaacggaatcgattagttcagctccttcagtgtagtgtcccttggcccagttgttacccgcaccggattgaccaaagacgaagttatcaggtcgaaaggtctgaccgtacggtccagatctgagactatccatagtcccaggctccaaatccatgagcactgcacgaggaacgaatctaccgcaactcgcttcattgtagtaaacgttgatgcgctcaagttgcagatctgagtctccggtgtaccttccggttggatcgatgccgtgctcggcgcaaaccacttcccagaacttggctccgatctggttaccgcattgacaccctggatgtgaagaatctacgcatctttggttgattgagtgacggagaagagattta

SEQ ID NO: 13719 - DNA, 801 bp, Arabidopsis thaliana columbia
taatgttttctttaaaagtttgacttgtatttaacattttataaacttaaaacagtcataattaaactcaataatctttaaaactattttatttaagtgtgtaacaaattatacaaagagcccagcccattaagcttacaaaacaacctctaagcccaataaataatacgacgacgtttaattctgtaaaaataaaattttcctcttcttcttcccttcttctatctatctcaatctcatcgccggcgttagggttgtttttctcaacaatggtgtctctggccaagtttcactactgtgatcaaacactccacctccgactcgacactcaccgtaaaccgcagcctaaacctgtttcataccgaatcttacataaacctcctccttctcgcgtcatcagagcttcttcgttttcatcaaaccctaaaccctctttcctcaaaaccacctgcgtgaccttaacaacagccgccgctttactctccgcttccctccacctctccaccaaacccgtcaccgcagcaactctcgtctcacctcctcctccaccatccacggcggcggatctcacttccgatcaaatctcgtcgcgtccaaaggaagaagaagaagaagcagcgctggagaagcacctcactaagaatccaaacgacgtcgaagctcttcaatcactgatgaaaatcaaattccaaaccaaaaacatcgaccacgccttagagattctaaaccgtttgatcgaaatccaacccgaagaacaagaatggcggatcctaaaagctcaggtacaaacctacggcggcg

SEQ ID NO: 13720 - DNA, 951 bp, Arabidopsis thaliana
aacttgtgaatgtgtgactactttgaccgtaggaccaccggaatagacagctggatcccacaagaaagattttgtttagcataaagaaagcaacaaatttcataatcatctaaagaatttgacttgggtatttaaaaagcacaattccccaaaattagagatctatagaagtgaaaaaaaaagcatgggtccctaaaaaagctaaagctttggttcctccgtgacccgtccgtgatcttgtcacgtcagcgttccattgacgagactagccaatgagaacttgactcgtaagttggtttgacccattaggtataacggtcgtaatgttttaggcttaggaagaacccaaaaagagtaacaaacggaaaaagtgatttactggttttaataacaatctgggacaattaaaaataatgctaacaaaatctatcttaaattagcctaactctttcaaaatgaagtaaatacactattattgactctagattttaactttaaaggtttagaattcattttttttagtttaaggtttgattttttgggtttaagattcagggtttaggattaaggtttaatttttaaaaatatttagttatttttttttgcttttaaactatagattattttgctaattttggtataagatatgatagttttttgaaaagtccttttgaaaaactgtaaatagagaaattaaagatatttacgagattgccacttttgttaccttgactggaaaagttcccggcgggaacttagtggtgagaagatcacgcattctggcgacggctttgactttattagctaaaatgtcaagtaacggaagcagctcctcccgtttttaacggaaattgttccgttaaccacactgacggatgcaagcttttcacaaattccttctctttgatctgaggagacggtggaggattcccggagacccgttgaaggtag

SEQ ID NO: 13721 - DNA, 998 bp, Arabidopsis thaliana
ttcatgtagcttaatgatgtgtgatatggagtagaccctatctggctgaaatcacagttccattagatgtatgtatatgtcttcgtcttctctcatacaatcttacatttgattctgaaattgcaggatttcattccacatgctttgactcagtataagacctatgagaatgctttcttcagtaaagttacaggtatcttgcagccaattttcgtgaaaaagttatactggtagactactgtaatgcttaggaacgagtattttagatcaaactgagatataacagatagctgccacaaaacttttatatatacttgtagtgcatcttatagtgttctgaaactagaatcttcatgtcattccgattaatcaatcctcgtatcctctgctgcttttgttatcctcgcagacgaattgatatacgcaaaagagcatccggctgctgctattgggattggtgtcgctgctagtctcgttctgatgcgaggtatagcctctactctcttatcacttttacaacttacaagattccttcccgtagagcatccaaatggtcttacatctgttttacttatatgtgtcttgtatgaatttggttttctattgttcgacttacaggcccaagaagattcttgtttcgtaatacactaggccgatttcagagcgaagaggtatatactataccagcttcaaatttatttcttaacgttgttatgcttagttgccctggtctgtgtcccttcccttatttttacatccacttcaaaatcatcgtcgcttcaggcacaattcttgaaagctgagaagcatgttcaggagttaaacatgtctgtagacttgatgaaaaaggagatcaggaaattgcttgagaggacggctttagcagagaaggatatgagatgtggtctctctgagctcatgtatgccccaacatgtactctcccacttcttgtattaagttattgacatcatttatggtaatatgggtactctgttat

SEQ ID NO: 13722 - DNA, 1083 bp, Arabidopsis thaliana
tatgttccatgtgaagtcataaagcagcgaatgaaattcaaggcactagtagctcctggagctcttatatttcgaggaacagcgttccggtgcaaccaagaggtgacatgtatggttattacactggaatgttccaggctggatgctcaatatggaaagagcaagggccaaaaggactatatgctgggtatgtaacttattttcaggctattatgatgtgaattggatacatcattctaattgttgactcgtgtcaagagacccatgttattattttcctttttcctgtggcagatattggtctacactagcgagggatgtgccttttgctggtcttatggtatgactatgtaatatggcacttcagtgaaactattacctccgttcaacttagggtctttgtctcctcatgttcggtctgtttttccattcaggtagtgttttatgaaggattaaaggatctaacagatcaaggaaagaaaaagtttcccagtatggagtcacagttcgatagagggtctcgtattgggaggattagctggtggtacgttagaattagatcagttataaaagaaatccgtttcaaatagcttatccaacatattgacccatgtatgtctcctcaggactaagtgcttatctcacaactccactggatgttgtaaaaacaagactgcaagtgcaaggatcaacgatcaagtatgcctcgtgtgttaacagattaatatgatcaactaaatatcatccgcaattagattcaagaacttgtttcgattaagctttggtaacctcgttgagttttaggtacaagggatggttggatgcagttggacagatatggaggaaggaaggtccacaagggtttttccgaggaagcgtcccaagggtcatgtggtatcttccggcctcggcactcaccttcatggccgttgagttccttagagataacttcagagagaaaagtaataataataacaatgtcgtctcaaatttgagcatagagaggaaaacatcttctacttcagtgcatgaaggttagtgaggactagcgagattcttgtctccaagtataaagagtgagag

SEQ ID NO: 13723 - DNA, 796 bp, Arabidopsis thaliana
ctaggcactttgttctaaaactacaacggcaaacaaaagaggccaaaagaaaacctaaaagaaagataaagaggatgtaaatcagatcatttactggacatattatcgtcaatgcaaggccatttccgttgttagaacgcagcagaagaatacctctgttgtacaatgtcttcatctcgaatcaacaatgtttctgaaacttcctagtaaagaaggtttagtgagagtgtgcttcaagaaggatgttggtggcagcgttgacatcatttctggcgtgtacaagcgcctgtctcgctgcattctggtcaaatcccatagataccaaagtagctatggcttcctctgatggctctgtagttgacggcattggagctcgataagctctctgagaaacagaaacattacatatcagtaaatgaagatgtgttatttagattgtgataagagtttggctaaagaggcaaaatataaatggtgcagagataaagacttgccactgcttggcgacctaagttgggtgatgtccttcttggtggttgagaatggctgctcaaggagggtaaggaaaaccgggagaataacgaagccatgaactccgggaactgtcgtacatttaaaacaaacactagtgttagtaccactgtgttactaaagtgacaaaagccccacgtttgaggagatgaatgtagtttgtttttaagcaagagttgggaaggtataacctttgccttgcgaataccaaagatgttcaaccgatacaaggaaccagcaattataccgcaaattccagtaaaga

SEQ ID NO: 13724 - DNA, 632 bp, Arabidopsis thaliana
tgtttttgtaagaagggtgaaaccaaaatagagaaagtctatggagctagacttgaacaggtcatgctaatccaaaatagtacatgctcccaactttttggaactatttttgtgtggatgtaattatttcaggaaagtctctggtcgtaccgtattaactaagatctgaatctctaccttcgtacacactctctcactcacacttcaactaaagaaaacgtaccaatgaaatcgatgatgaggcggccgtttgagaaacggccggtcggatggtggaagaaggtttctccgtacggtagaaacgcgaccttagggagattggtaggatcggagagggcgagcaagtttccagtgtcggcaatagaatcgccgaaactaatgatcgatttgaaattatggcactgtggctccgagttcacagtagtgagacaaaaagtagatagaattagaaagaagctcaccagcttcatgaacagagtagccatgagtggtggcctagaggttagaaacttttcaaaatgactttttggaaagaccactattcgctcggagacaataaagtcaaaaaaaacaaagatcaattattagatgcaatagagactagacagggtatctttatgtggtttagggat

SEQ ID NO: 13725 - DNA, 942 bp, Arabidopsis thaliana
gaacgttatgtcgagtgattggactatgaattgacccgagaagagcgaaatcgcagggagaatgcagtagacgatgaggaatagcgatgtgaatggatacattccaacgttgaagtaagccactctctgcaaaaacttcatccttctggttgcaaaaattgcattgttccttgagaagaagatctcaacagatcctgttgcccatctcagaacctggtgaagtctatccgttagattgatcggagctgttccacggaaagcgtctctttttgtcacgcagtagattgatctccatcctctgttgtgcattcgatatcccgtgactacatcttcagtcactgatccatagatccatccaactcttttaccccattcagttttgtcctcatagaagcaagatatcacactgattgcttcagctacagtggctgcatcaagtggttcacgtgggacagcaagtgagccagctggtctactgttcttgcctttgccttgcaagtcttgtatgagtctcccttggtattcagcaactgggattgaagcaacgaaagagtttgagttaccaaatctctttgggagaagcagagattcaatatctccatcatcattctcttcttcgttgtattctccatttataggcaaagaaacttcatcgtctttcttcatcatggcttttggtctcctcagcgatatcttgacttttcttcttccaagccagccatgatgttcagttgctcttggcgggctaaatccataaagagctgttctacgaaagatgcagccagttcccacatacattggaccttgaagtccatccaaagctctcatactaacatcaaagaagacagtgttgtggtttgcataacgatcatttgggtcaataccttcaaacctctgagggaactgaacatagcagattctatcgccaccacgatcaagcat

SEQ ID NO: 13726 - DNA, 539 bp, Arabidopsis thaliana
gctttgagccaggaatctgaagcagattctccatgtgctccaacattgcctcagttgtaaacttgaaacaataatgaaaaaataagttttaatgatacaatctcatcagatgattaacaacagatggagaaacaatgaaactcactgtaaggacaggaccaatggttaagtcttccagtttgcgtctttccgctagttcttttaatttggaaacaagaggggtttttgaccagttctgctcagagagaaaatacattgaaaacaacaaagacagaagaaaatggaagtaaacaaaagattcaaaggtagtttcaccataacaattaggatcaaaccaacctcatgaacaaaaagcatagactgtgcagaacacttctgtccactgcacgcgtatgcatcttgatcacattgccatgcaacataatcaacctgacattagagaccgaaacaagggttacaatcacatttaaggagacttgtggaaatacaaatacggaagggtataataagaaacctcctgaacatctggtcctaagact

SEQ ID NO: 13727 - DNA, 662 bp, Arabidopsis thaliana columbia
ctgtgtgttgacaaatttgtttgtactattaggttaaaagcaaattcgtttcgagaaattaagcgacaagtgagtgaagcaatcagacctgtaattgctatctgacgaagcggaaagaggtctgaagacataactaggatcacagagtctcccgcgaatcagatttagggatttctccgccggagtctctttgcccatcggactggcgggaaaactgacaagccaagcgagccctctgtgtgaactgtgaagtgaacacccatcatcactactagtataaacttactctatgggccgtagtaatgggccttataaagcaataaaaggcccaataaagctcctttgctttctcctaataacgacgtcgtttacattgtgttagcaagtttgtgatggaagaaggtttaacggagaaaaaaaaaaggattgggttgttttggaaaatatcaaatgtgggcaacgaaactcgaccggaaccaatcgttccttctctgaagctctctttgcaattgaaaatcaacaacatacgatacgagagaggattcttcgagagatgagcagcacaagcactagttctgctcttatccaccatttccgcctcaccactcgcaacttgggttcgcctacaaagcagcgttgtccttacgctgtaactttctgca

SEQ ID NO: 13728 - DNA, 431 bp, Arabidopsis thaliana
atgtttaataaaatcttgaactcttgcgtcattgtatgtgcagcttgtggtaggaggcaaagatcataagcataccaagatcgtgatatgtctgatgaagtccatagagatcgattcccatttccatgttggaactgggaagctttgaagcagtccggctggaacctgaggatcaatgtttattcgttgacaggaatcacactgacttacccatttagctatcgatttcttcattcctggccaatgaatatagcggcgtaagtctttatacattttggtgctgctagggtgaatactcagtgtagacgagtgggccattcggaggatctgttgtcgtaagtttcctcgatcgggtaccataattctcccgttgagtagcaaggtaccatcattcgccatgtgataaccactagagttgggtccgtctagcg

SEQ ID NO: 13729 - DNA, 536 bp, Arabidopsis thaliana
ctctccacgcgcgcttttagtcgccctctctgaatacactacagtacaacgttgaaaagaattcaataaagaagatcaaaaagcaataaagttaatccttactttaattagaaacaattttctaatcataaacctttatcatatcgtcaaaacatatcatgaacgacttgtctctctctgttctctatatatatatgactcctcttcttcaaagttcagacacaaacataaactagcgtttaataaaaaacaagaaaaaatgaagttcggaaaagagttctcgtctcagatggtgccagagtggcaacaagcttacatggattacgattttctcaaaactcttctcaaagaaatcatcacattcaaacgaagaaccaacaatgcaccttctcatggtggtgccaagaccggcggaggattaaaccggaaattgactctataccgtgcgtttagcggtcttgtctcaacgccaaggcataaacgtagtaatagctctcatgatgttgaagaaggtgtacagttgacgggatcgatga

SEQ ID NO: 13730 - DNA, 889 bp, Arabidopsis thaliana
aacaaatctaatatacatgaatataaaataactcaagtggaaatgaaaataccaaccactaaattttttactttgaaatataaaaatcatttaccttcagtgagaatttttaaatccaaacgagtaaaataaactaaaaaaaaagttcaattggaagtatatggaatattcaaattcaaaaaatataaaaatggaattacagttcacttgttgttagtgagtatatttaaaactaacaaaatttaaaataccaatttatcttgtttcttgttcaagtctgatgaaaaatgaaacaactctaatccggttttggtacaatttgttatagtatgatttgattaagctaaatcatgtatcggtactatcaatttcgtatttggttggtgctaacaaatatgatcatagtacctagacataaatttggaccaaattcctgtctttttatgtccaaagtgggtgagttaggtgaagagtagatagatatgtattgattattgcttactggatttagctccggctggagtagaagcagagagagccgccgcagaagtagcaatatcggaagctaatcgagtcatctccaccgtccgttcctcccatctccatccatctgggttctcaactttaacacgaaacgcgatcaaagcgtccatctgtttattaagcatcgccgcttctttcaacacttcttcaactttctttctgtaaaacttatcaaccttattgaactcatcgtctagtcgccggaaaaacactagttcgtactctcctccttcttccgcggccatcagaaacgtcgtctcataaccatgactcgcggtcgtgttcacaagaatcggccccgacctcatcgatcccgtcaactgtacaccttcttcaacatcatgag

SEQ ID NO: 13731 - DNA, 1439 bp, Arabidopsis thaliana
ggacggacccaacgatagccagatatcacagggcagacgatggcaccctgctactcaatcggaagaattatggtaccggatcgaggaaatttacgacaagagatcctctgaatggcgcactcgtctacactgagttttcacccaggtagtaccaaaatgtataacgacgtatgccgatattatcattggccaagaatgaagaaatcggtagcccgatgggtaagtcaatgtgaatcctgtcagcaaataaagattgatccccaagtttcaatcgggttacttcagagcttacatgttccgacatggaagtgggaaacgatctctatggacttcatcaccggattacctacaaggaaggggcagaggaatgactcagtatgggttattgtagatcgtcaccaaactgacacattttataccagtaagaagcatcaaccaagctcccaatctcgtggaaaggtatataaaagaagtgatcaagctccacggtataccagccaatatcgtaatcgatcgagatccaaagttttcggctatcttttagcaagacctacagaaagccctagggacaaacgttcacatgagtacagcgtttcatcccgaaaccaacggacagacagagcggacgatccgaactatcgaagatctaatccgaatatgcgcctaagaatggggaaggagttgggaggaaaatctgccatttattaaattttcgtacaacaatagctaccattctagtattgatatgtcaccgttcgaggccatgtatggaaaaccgtgtagaactccattatgctggacgaaggtaggagaaagaaccaaattcgaccaatggatagtcgatgaggcagtagagaaaatccagttcatatgcgaaagcatgaagaaggcgcaagaccaacaaaaaaagtacgcagatcgaaagatacgagaagtggagttccaagaaggagatatgctctacctaaaggtcacaactcaagaggcaaaatatcgatttggaaagatagggaagcttgcggttcgttatattggcccttatcaaattgtgagtcgagttggagaggttgcttataagttggacatgatagaaatcatgcgacttcataaggtgtttcatgtgtctcaattaaagaagcatataccaaatcccaatgttgttatttcagaaccgatacccgaattgaagaccaacctcacttatccagaggggccactcgaaatcgaagaacgccgtattcaaaagttcaagcagcggttaattcctcaaattaaagtgttctagggaaagcaaaaccgacgggtaataacatgggaagatgaagaaaagttccaggtaaaatatcctcaattgttcgatactgaagaaggagacgacaatgaggccagcccatccaattcttagggaatttgggacaatgtagcaccccgcgcattga

SEQ ID NO: 13732 - DNA, 660 bp, Arabidopsis thaliana
tggctcctatacggattccaaaccacgaccctagtgtagtctttcgagatacataacagtaaaccgtcgcagtgatatacttcagatatatcgatctgatctgtaccgtttaggctaacaagtttagcttgacggtttatagacgggtcaaagccgttgtgaattccacggaggttgatgctcgttagataaaccttacaatgcaagaccatgacaaccttaaactcactttcccttgatgttgcttcctgagcaaggtgcttctttgtaaagctccgctttttggataatgttttccaatttttgcaggtaaatcgcgcttctctcaatgatttcaccggaaccctagagagtctctcctccaacaaatctcttggaagatcggacatcatcttcaaatctttcaaatttgaacaaggatcgatgtaacacaaattagttaggtttgaaacttcagtaaaaagctctcatgtttccccacaggaaccctaactcaagctgggccgaaacacaactctgccctctaaaaatttcccggaattattcatctttttgaactcttatttatatgactgtgatgtcgtttcatttatgggctttattattgggcttttagccgaactgtagttaaaaactttttagtgattgcgatttgtatat

SEQ ID NO: 13733 - DNA, 624 bp, Arabidopsis thaliana
ccgatcttattagttccgcctctagatgaagcctgccctttcccatctctgtccctgtcgcttctcttcccctttgtattacttgagagttgtgtcccaataccaacatcatcgagcagcaactctctcttcttgaccctattggaccatgctgtatcttctttccccgtcgtttgttctagtaaagcattttcagatggtagaacatcagaagatttggcatagttctccgagttctgcccaatgagtgccagcgaagagcttggctgtgagcccatgggcgctgtaagggaaagaaagagagatacaaattagtgaagaggatatggatttaaaagagcttccgtaattttatgtaggcaatagaacatacttgaagttgacgtattatactccttgtccatgagagtatcttcagctgttgccaaccccgcaatgaacatatccttaatttcaggctcactaaagcagcttttgcccgtcttttcgaattgatggcatcgttcaagcgtccttctaacaaaagccaatgcagcctgctttgaaatcttgttgttggaatctttccccagcgttgtgatgacgccgcttgcctgtaaagaaggaacaaagttattacaaata

SEQ ID NO: 13734 - DNA, 964 bp, Arabidopsis thaliana columbia
ccttaattaatcatatggattgattcgtacgttttttggatgtaaacaaaggagaggtcaatgtacatataattattggttgataaattatgaggatagtacgttaatgggattgacatttaatgatatctccaatttaacaccgatccatctttttcatcggagcttcatgtttgatgtttttttatttggccgtgtcgacaaatttgtaaaagacgtgtaaagctgaaattgagaagaaacaaaagtgaaattgtaaggaaacgtgatcgatggtgaccccatcaatattacgataaggtaacgcgctaaagcagccttagccgtttttattaaatattatccaaatataacttataaataatcccaccaattgtgtctcctaagcaacagaaaatggaaatgatactgatctcgtcatcgacactcaggttccatccattgaggacatcacaaagaatcgccaccggaaccaatagaagacgaaccaccaccgtgtgtgcagactactacagaggaggaagaacggtggacgagaacatggtggtccttaggaaacgaatccatgagatgaagatggttgaacgcaactttgaacctccttctcattggatgcaatgggagaaacgtttctactgcaactacgacgctactatatgtgatgcactcactcttctccaaacttttctcatgaactctcgtcccagcgtcgcgtttggaacgtgtcttcttctcctcgtcagcgttcccgtctcctccgccgtttttgcttttcgcatccttgatctagctctttggcttttggacgccgttcacgtagtatgatccgtaaatatctttgttattttatctagaaactatctttgttattttatgtcgaaattaaggtaatttccaaaactagaatggaattatttattacaacaaataccttgagaaattctataatgattttgtttaaaga

SEQ ID NO: 13735 - DNA, 1221 bp, Arabidopsis thaliana
catatcctgtctgttactcgaccacatcctacttctggcatcagcttgttgtggtcgagtgattttagtaattctgttattgtttctgttttctgcatgttcgcttaggactgttagaaaccccaaaactgttattgcttggcttgacttagtgacttctgatcacatctcatctgtttgcatcacacccatttggattgacaccctaagtactacaacgacatgatagtgctataggatttattgattaaaaacctattatcatcgcgtatgaactggattttctctaccgcctcatcaactatccattgatcgaatttggttctttctcctacttccgtccagcagagcggggttctacaaggtcttccacacatagcttcgaatggtgacataccaatacttgaatcgtagctgttgttttaagaacattcgatgaatggtagattctcctcccaacttcttccccattctaaggcacagattcgaatcaagtcttcaatggttcgaattgtccgctcggtttgtccgtcggtctcggggtgaaacgccgtactcatgtggacatccgttcctagggccttctggagatcttgccaaaaaattgccgaaaacttcggatctcgatctgacacgagattggctggtataccgtggagcttgatcacttctttttatacctctccgcgagatttggagcttgatcgatgctcctcactggtatcaaatgagtcagcttggttaatcgatcaacaataacccaaactaaatcgtttctctgccccttccttgtaggtaatccggtgatgaagtccatagagatcgattcccatttccacattggaactaataagctctaaagcactccagctggaacctgaggatcaatctttattcgctgacaagaatcacactgacttacccatttagctaccgatttcttcattcctggccaatgataatatctgcttatgtccttatacattttggtactgcctggatgaatacttagtgtagacgagtgcgccatacgaaggatctcttgtcgtaagtttcctcgatctggtaccgtaattcttccgttgaataacagagtaccatcgtccgccatgtgataaccgctagcattaggtccatctagcattttcaactctgtaactatctcttgtaacttatcatccttcttcttcacaaacaacacctaggctcctcatggtgatg

SEQ ID NO: 13736 - DNA, 767 bp, Arabidopsis thaliana
cactcttggaagtagaaccaacctcgatacaaagtttccctagagaaacaaaacaaggcataaaaaaacgttctttatgaacaaaatttcaaaaactcagaaaaagtaccagtcttgacaacaggacaactcttcttgcactcctggcgacatttcttaggcttgcaccggtcttcactcacgatagcaatccgcgtcaatcgatctgacatctctcttgagaatattacatacaagatacacaagtcaacaattaggctcacgaggtaatcaaaagagaagtctttaaaggatgttgggttttggcaaaatcatgaatggagattaaacctagtagacagacgcatataataacagagctaattgacaagtaaaacagctatacaattaagggtaccaacatgcaacaactcataaactagaatcgaacaatttcatccacaacatacgagtgtatcggaatcaacccatctcgaaagacgattaagaagagaaacaagagaggataagaagaagaaaaggatctcgtaccacactatatgggagctcggcgagggagatgcagagtatacgacggtgaaggtggggttttcgacagcgacggtggtggtgaatgttgaagtgatgatgaataggcaatggcactaagtatatgatgctgattattaggcctagattctaaaccttatagggattggtcttttatctatacaataaatacatatcaaattttgtggacccaaaacatgtgttaaaggaactttgga

SEQ ID NO: 13737 - DNA, 588 bp, Arabidopsis thaliana
agcattcttactttattgaaaaggaaatagaacaaagtttcacatgaagatacaaataaacataaggaacgaaaacagcaacgttttgatagagacattcaaagatcacacgtaaaaccaagtcaatcctctaacggtgtttgcgcttttcagaagccaataattttgacgagccactctggcttgtatgaagcaatgagatgtgctattgccaatccaaacaacaatccaggagcatatcctatagctactgctttccagttaatcacctctcctttttcttcgtcttcttgctttggttgtatcggtggcacactagagtcaaagcaagtttcgtggagaggaagaccacaaagccctgcattcccttcgaaagatgatttaatttgcccggtaatttgtgttccttgtggtatttcacctttgagtttgttatgagccacacttatgtacaccaaaaacgagaggccccaagtccattaggaatagcccagagagttggttcctgacatgtctagtgactcgagattcataagattggcgaaagacagaggaatatggcctgtgaatgcgttgttcgataagttg

SEQ ID NO: 13738 - DNA, 1115 bp, Arabidopsis thaliana
taagacctggcataaggcttacaaaaagaccaagaagaagaaggcccgagtagcttcttaagttttttttgtatcttcttcgatttgtatgagaatacttttcggatgtttgcgatacaacattaaactaaattttggggaaaagaaaagcttgtatttcagatgttatgattgtactggaaatttttcatcatcatcaggaagctttaagttcaacaatgttttctgatgagcattacgaaattaaatgcaccaattgaaattttatctaacatgcatgtagtatagaaggcggcttcagtgatgtctaagcaaaccgggaggaacggaaaaggactggtttcttcattagcgttgcaggccagctttgatgtaagctgcgtaaagatccctgcgtttcaaaacagtacattgctcattattaacaaaacaacgtgtaaataatttggtgtttgggataaaacaaacttacatggagtccttgatagcgtctatggcagcttgagcgggaaggaaagcttcaacgtcgactttcttgttctcgttcttcttgtctaaaaacattgtttgttaagtgaaaactgaaaacaaatcataagcgaaaacaaaattatacgttaaatgcaacatgtctctgtaggatacagtcctcaaagaagcgacggatttcagctagacggtgagggggaagctctttgatgtctctgtagtgacggaactcgggatcatcagcacatactgcaatgatcttgtcgtctttctcaccctgcaagtttcagaacaaggtgattcctggtttcttactaaggtaatacattacatagaggtagaattgggtttaagagtttttgttacctgatcaatcatgggcattagaccaatagcacgggcacggaggaatgatccggttagcacaggctcctgcacagtattttatctcaagtctgttattcactgcctgtttacacaagtttgtatgaacatgaaactaagatgaggcgagagaaacacctgcatcagtccaggacatcattggatcctgtctcacagatagtcgagggatgaaccgagttgtgggggaccaatggatgagtagagacgcgattacctagaga

SEQ ID NO: 13739 - DNA, 983 bp, Arabidopsis thaliana
gggtacgactaatacattggctgctactcgatcttaatcaaagcatctgtcgatatcgaaagcccaatcacggataaagcaacggaactgaaactggttagctacttgttggagaactcgacaactctgaagaagcttgttctacgtttgaatcagtcttgtagagataaatatgagccaggtctcttgaaacaagtcttacaatctccaaggtgctctagtttgtgtcaattagtcattctctgacagaacgttgttcatgcagtacacatagttgatcttgatttatgatacagcctgagtaatgaatgtctttctttttaagaatgctcaaactgaaacttacaaagtctaaacctcaacttaacttgagaagttatttgattgataaagaagtaactacaactagttgcagagagcttgatctgaggtcttggaatgtaatgagacacagaaaagaatcgagtatccgtcacttcattttctgctctgtaaagaggacatggcgattaactcgaggatcgtacttacggaactcgagcttctcaagaagtcccttggtactcttcctcttgacatagaagaatccagttccagctgctgaaactagacggatgaacatgaacgtcttcttcctcttgtctcccatttctttatcaagaatgacatcacattacattaccattcttttcattacagataactaaaatcctccgaactgatgaaacagaggtcacaaaacgtataaagtttccatttttttatagctataattcgaaaatgcacaaactttagaaatggatttgtttctaaatcatatgggacaatgacttttctttgaaatctatgaacctagagattcgaaaatcaagcggaaaacagatctaaaacctagaatccagcaaagaaatctcagttcgagaacaaactacaacaagacggacacgatacaagcaaagaaatgaagaattagcaagaaatga

SEQ ID NO: 13740 - DNA, 672 bp, Arabidopsis thaliana
ctatgtagatgctctaggcccattctagaagattttcagattaatttggtctccaagtaactaagtaaacctaatatattcccatcctcgttttgttcacaaccggcagtgagtaattataaaaacctctctcgcgaattgttgccgttgcttgctagctttcgccgtcgtctcttgagagtcttgcgaagatggttagatctcttgcactggatgctctccatttacatctcctgatttgattttgttataagggttttaatcacggtaacgagatgggaagtaagctaattagaagtgtggttgtgtcatttgatttgagtactgatgagatgcaaagttaattgttattatttgttgatatggaacaggttcttcaaaacgatatcgatctgcttaatcctccggctgagcttgagaagaggaagcataagctcaagcgtcttgttccatcaccaaattcctatttcatggtaataaaactttgaaacctttctccttatttagaatcctgtaaaaaccaaatctctctgtttagaaactgtaatacttcaagttttttaatcggattctaatttacttgtatgaagtttatctactctttctgtggactctgatttttgtttaattttactgtagcttgttaggtgctctgactgtatcaacatgtaa

SEQ ID NO: 13741 - DNA, 1059 bp, Arabidopsis thaliana
ggtttacctgaggggtggtcttggagttggtgccttccgtagatctatggaggaagcaagaggaacggaagccgtcctcctcatttctgcaagagcagtggtggtgttgctcgtcacattcttcagcaactccagaccatgaacattgttgacctcgacaccaaggggtaagtatattgtctctagtttagatttctcattggcctaaattaagttaatacactggtacaaagaaattgtaggaaaataaaaattgtataacacaagttagacacttggattcgattttcgcttaagaaatctgctgaaactgtaattgtgacctattaaaactcactagatgaagtgtgtataaatggttttagaatgtactactgcgtcatttactaatatacctatggaagcaattgttcatcttcgctagcttatgattacatgttctgatgtaaccagtggaaggaagatcacatcaagtggtcagagagatctcgaccaagtcgctggaaggatcgcagctgctgtctaaatcatagcgactgatggtcaactccaagtttaaggtttatgtttgagatttagtaatggaatgagttgcatttgatgaaaaccagtagtagaattccctctcatttttgttttgatgagttttcgtttacaaattgcctctctttttattctcagcgacttatggcttatatatttgatttcatctttgacctcctttcctttctatttcatgaaattagttatcaaaattttgataatggcttgtttaggtttttacatttaagctcctcgttcttcttcaaaatcaaagtgtagaaacagagattaccaataactaattgtgaacgtttcaaagtttttaaaatttcttgtaaacggaggtaaccattaaaaaacgaattacatttattattttgtaatattcaaaacaaaatcaaaatcttgagaatcgaaaccgttacgtatactacaatttatatgatcacattttaaatttcgaaaattgagggacatgtcaaattcaagaaaacatatactccactaatttagggg

SEQ ID NO: 13742 - DNA, 935 bp, Arabidopsis thaliana
ttctcttcttgttcttttgaattggattctggcgctggagactcaggtgtcttcgggctcgcttcatgtccaattaaaataagatagatcaatattgaaagtaaaataagacaggtgaatctctaaacccagatgctgaaaaggattgaaactatcagatgatcactctgcgaaaatgtgaatccttaaaaaagatgataactattcacactttcagataatttattcagaaaatatacctttgactggttttggaattgaaggttcttgtggaggtattttttcgaaaagtgcacttcgagaagcgatggctgaagacttgggagcgggacaaactttgaggagtcaggagtaacagatcttgggtagagtttcctaactactgggggaggagttgacaggtttcttgcattttggctctcaaatgttgctgcgagtgcattgaacgccggagatctgcccctcacgcgaaccctgtctggactaaatgacatgcttcttgaccgctgctgcgacttgtcaggaacgctggcacggccaccatatgaagctggagttcttcgttttggtttctaattaacaaatgcacaacaaaagagaacaattaacaaacaaattttaaaatgcacactctgaagaatcatcaatcaaaaggtaaaggaagaatagtccttacatctgccactggagttccaccatttttgacaattttaagttttctttggaatgagtttccatgcatctgtaaacaaaaaaaaaaagagtgtttaaccctttgttaggggttcctttcgtgcctatttctcagagaaaccgattgattttgttaggtacttacagcggattttgaggaatcccaagaagtgaagaaccgggtgaagaatgacggctcaccgccttccatgatcacataaataggggcttcaggggataac

SEQ ID NO: 13743 - DNA, 1093 bp, Arabidopsis thaliana
tgtcatatatttaagtttttttgttacaatgatagttttctcaggtggaagactaaccattgttggtcgggttgtcctgatcacctgcaggttgtggcacagtcacaggaggttctggaggaggagaagccaccgtaagattatcaaaagcgttagaatatgtatacaaatcccaccgcaaaaagcagcttggccgcataacaacacctcctcgcttctggctacagcacgactgatagtcaattgcgctttgtcgcagacagttttcacaatcaccggagaaagatccggcgtgcattgcatcaatgcatatatattcaggagaggtgtcaagactgctgaatcagctgagtaatggttatcacttgaagaaggtgtgctttttgctgtggaagctgcagaaatcatacgacccattaatccttcccatattttcgtaaactctgttagatttgagtctaggtctccagtgttggtgagccaatttcgcgggttcagatcagcagatcctgagaaagaagtgttggagtagcgcacatagcaaagcgttggctcacctggccatgaatacgcctctgtttggttaggacaattctttaaaaaaaattcagactctttcttgatacaatcagaacagtcttctgaagttgatcctgggatgcacatccctattgcgtagacacggttcggttgttgtcctatggaaccgttgtagtataagccgtcttggtccgtgacatttgaaggaagagaagagaggatgagacggcgatttacgtcgtaagtaccgttgggtctgaaagtccccttgtccgtcgtgcatgtttgtgctgaaactgaagcaacaccaaaacttatgaagaaaaaacagaggactgaaaacaaactcctctgcttcattgtttcttgaagattaaagcaaaagctagatctttgtgtttagtgtttgacgcatctgtacgtttcttaccagtttaaacaagcaaaatcgaagcttctctccaaaattttcaaatattgaattcgtcaaattgatgacagtggtcctgaaacctacaaatatggtcacgaaaacgagtgtcaaaagtcaaag

SEQ ID NO: 13744 - DNA, 834 bp, Arabidopsis thaliana
tcccgggagtgaaaggtttacctttggtggtgtcggagacagggtggccctctgccgggaatggaggcatgacgacaccggctcttcaatatacgtacattggtaactttgtgaagcatgttgcaagtggtaaaggaacgcctaagaggccaaatagtagaattgatgcgtatatatttgagacgtacaatgagaaccagaagccagttggaatctatcagcattttgggttatacgatccttactgagacgacgcccatgtacacgctcttctgatcctcgatgttgtgttcaagtggtcagtttttactgtttctcttaagaatctgtgttgtcaaaataatgctctagtattgtttgtttaggggttgaaagacccatttaataaaacttatggtttataatctaagtgggtttcgagttagccttattagaaatttcactttagtatttggaactactaaattgaaggaaaacacaattgaggatcaaaagagcgtttggtacccagctcctatgtttttttacgagtaaaaaactctttgcaggatttttactttttaattttgaaatcaaagacgtcacccaaagcacaaccataataggtttagtgaacactgaacagtaaatctctgtttccacaaattgtaaaatacagtaccaaaaaaagggcaaaaacttgaacaatctatagttatcatatgcggtggtaaccaaatgaacctgatgtcttcacgattagacacatgcttgctggaaccatttgttgatttagtgaccatatttctgaaactcccactcactgttatctgttgaaacaactcagcaatatta

SEQ ID NO: 13745 - DNA, 628 bp, Arabidopsis thaliana
ggtgattatattgtaggctgacccgtcccaggaagctgttcctaggatgtcgggggttgatttggagctttctcgtcaccgcatatcggttttattgtcaacccgcactgcatatgagctgctcccagaatcgggcaaggtttggtttctttttctttttgcttgatcattgataatttctgtcttcatgtcctatagattatcagttaagaataacctttggcttcttactcggaaattgtctaaggtgattggaaattttacaggttattgcattggatgttaatttgccagtgaagcaagcattccatatactctatgagcaggtttactttatttgccaattacccttgtgtcagcttctgttcttgttaggatgttcatctctctgtctctcaccgtcatataaacattctaatattgttgcatccagacccggaaagggaaggaagtgaaacttaagtgaacaacattcgtctaattatacttcgagattgtttggctttctggtttttgctaattccagatgctttcagggaatccctttggctcctctttgggactttggaaaaggccaatttgttggagttcttggtccactagacttcattctaatactgagagaggt

SEQ ID NO: 13746 - DNA, 680 bp, Arabidopsis thaliana
atcatcagacaaatctctgctgggaaatttgaagttaatgtcactaagtagaaccatcctttctctgatagcaaaagatcaaccacaggcaagattttatcgatgactgtccggccattttcccctcctgcccaagcagaggcaataccttccattccaacttcatattcaggtgttggcacataaggcggattcaccacaatcacgtcgactgagccagcaagtctcttctctagaccagtagctaaatctgcgcagataacatcagcattaactccatgtgcttctagagtttcttttgtcactcttgtagctatcgggttagtgtcaatggcgagataatgaacaccaggaacttcgttttgaagaagaagtataagtgaagttatgacatatccgcatccgcatccaatctccatacaaatcttagggttgtgctctataaggttggtgcgatcagcgagtaatgcatcaactagcgcaaatgaatcatcacatggttcatagacctcacgatgcgagcttacaagacggatagcagcaattcttggtggcatcttgtaaatgacttgactactaaacaaacaaacaaaaaccacaccattacaagttagaaggttttaactttgagaaggtgtattccatatttcaaatataaacaagcttgcagtctaaagttc

SEQ ID NO: 13747 - DNA, 598 bp, Arabidopsis thaliana
cctatttttacatatgctccgagaataattccttaatcctataaatctgtcctaataagagtattctaagccgtcgtaatctaatcatattcctccggtggtagtggcggcactgttcacaacccaagagagatcaaaactcgccggagccgagttcccggaaaagctatctccggctgcgaattcctctaacccatcgaagaaatcatcgctaaccaccgtatccgacaaagataacagatcttcttctccgtcaagatctcccaccgctagatgatcctcaacaggcaaaacaaattcgtcggctgaagtcaccggagacgatgaataagtagcaatagtggtcgtcggagatttactcgtctgttgatcggatggtttctgacgtgtgcttccggcgagagaattacggtgtgtcggagctggatgattatgctccgccgtgtaagtgacgataaacatcttcgggtcggatctatttcgctccacttgtttacgggctaaacaacgttttgatgtactcatctgtagtatctctgtttcatgaaaatgagaattattagaacctttccaaaaatgtacgcagataataatttac

SEQ ID NO: 13748 - DNA, 509 bp, Arabidopsis thaliana
tgtgctctaaagctacacggagctgggaaattatttggcggggaatggctgaagagagctcgttgaggaggccgtggtcgatctggcctgtctttgtacttgtggggatcttgttaataacaacgtaggttgacgggaccatgtatgcgggcaaattgtcgcggatgaatttgtcgagcttctttaaagctaaggctaggttgacggagatggcggcactaatgaccggcgaattctgcgaggtagacgcactgggggttatgacatgctgctttgaaaggaggttgacgctggcttcctcggaaggctgctctacaagaacaacaagctcaggttcctcagatggtgcctgggatacggcagcagcggcgagaatcgtcggcgggagatgtttcttgagatgggcctcaagatccgcgatatcaactgcgtgtccctgaacccctacaacattctctttccgaccaacaaagatcagactgccatcctctcttaattgcaccatgtcg

SEQ ID NO: 13749 - DNA, 1205 bp, Arabidopsis thaliana
agaatatccctgatctcattaacaaaaggctatcgtggacctcaatgtttggaatgaagtggtatctttacaaaataaccaagatatccaaattaaaacagaatgtgggcaaaaacaaggagaaatctctacatagattgcacgcgttaaagagatgcttcatggagttcacctttccagcaagcggacttggttggataatgtataacaaaaaaactcgtgagattgtcagaggaagatctactgcgagcgccatgaagacgtctgctgaagctgaagcagaggcacttaggatggccttaacacaaaatcacaagacttggatatcaaggagttagtgatattgttgtgatatatattcacagtatgccacttatatgagggacatcaaaaacatggttgagggagatcatacctacacggctacacctttgtgcacatcccaagaaaagctcatgtactagctaaatctgctagactaatataactcagtacgtagcactgcatttaacattacaactctttctctgatgtaaacttagaatgcatggtacatgtcacttcttcccgtcatacattttggtattatttatcgcaccaattcaaagatcatgctctaaaactttttctggttcctctcctcgaaattctcttagaggatcattgcaaggagtataaaactgagccatgcagattctgagtctcatgatgtctgcgttgtatctggtgataagacgcaatcatcagaagcattcaaataagttgaaagtagatacttaattattagcgtaatgtgaatgagagccaaaactggtaccttaacccattgctttactatcggtgtagggtctggcaactttttgatgaggtcttcagcttcaggccaattttctagaataaacacatgcaacttctcggtttctcgtgcaccatgttgatggagattatctagataaaatgcagatttgctacatgcttcactcacaaaatcaataattgcttctttgggaagacaatcctcagataggtcagacttatttacatatatctgacagaggagtctaacacaagtccacactgttctaatacatagcttgaacaccatggaagcctgcaatgcaaagtacacaccatcatcaatgtggcggcaaaatcttctagagataatatgcagggaaggattatgcgaggcatacagaattata

SEQ ID NO: 13750 - DNA, 1473 bp, Arabidopsis thaliana columbia
ggtaaggtttaagatatgtgaaaattgagactattttcaccctgtgttctaagttgtgaaaaagctaaattgttaatgctgttttctcccaacttcgtttgcaataataatgtaataaatgtgcctcaggatttttgttttgaatatggtagataaagaggatcctggcaaaggcgtcattgttcagatgtcaactggaaataggaaccaaaattgctcgctttcagtttctgttatttgccagaaaactaaagttgatgtaaggatttgtatatcagacatcctacttaagcgtatgaattgaagttgattttaggagtttttaagacgtaaaacctcgttcaccattttcttttctcagggaccactcactttggcgaaatctggtacctgtcagtatgtgagtgttcagtaactcatctatttgctcttttcctgtagctttcaaattaccaagtgtgattgtttcttttgtgaattttatgggttttaagtttgaaaactgagtttttatttgcatctcaatatcttgattcttaagaagtatggactctgggtagttatggtcttgtttcactgacaggctactcagctgcgacatcctgccggttgtgcagcagctatatccggccatagtagtggatggggctggtttagtaccttactaatcatgtgagcaaaccaatctttttaatgtgaggcctattggaatatgtttagatatcgtgggaatcaaaaatgaaatgttcttatctttctcagtatcttgtgcctgtttggagcttatctggtgggtggtgcagtatatcggtatttctcccttggaattcgtggcatagatgtatgtttcactaccttcctttatatatgcaagtttttctcatgtactgattctatcacaattgaaatgtaaacaccctgttttataggtaatcccgaatatggattactgggccactgtacctcacagtatacaggtattgttctgtgtttctatattctcttctggtagattggtgtctaagaattaaatttaatgagcttacgtttcctcttcatcttgcagagctgttttggctcactattttcaagattcggggggtctattcgtggtcagcaaacctcatattctcaggtcaacttctgagcagtctcagcatcttctctgatccatggtctggagacacatccccaaactttccttgactggttcaaccaattgcaaacgccgctagattgttataccctgagtactcttttggccattatatgactgcaagttataaggtgcctctccttttcagcttgttatgtcatggatccctgtagaaacaaaagaatcttgttcattggatagaaacaatgtcaagccattgcaatctgcagcctttcccatttcgtgtgtttgctctttggagattgtttcagtttcttgatgctgattttgagtaatggtaccgatgtgttgatgtt

SEQ ID NO: 13751 - DNA, 565 bp, Arabidopsis thaliana
ttgatcaagttccacatatcgcctttctcggaaatattgttcataacctcgagcacccgttgtttcttgagatcttcccaataacttcttggccgcgagatatcactaatccaatcataatacataatctctctattgcaatcttcattttcttcattttctgtttcattttcatcccaagcatttagaaatattggtgattcaagaattagaaacaatgtttccgctgcttgttgcttctcggcttttgatgtttcttcatcgttttgtgaagatttttcctctttaccactctctctaaatacttgtcttgcagtttcttcatccttttctctatccaaacaaaccactgatgtcacttcttgagggttgcttctatattcctcaatctccatggatttaccttcttctttctttcgcctttcttcgtttctcccttcagtcttcacatcaatgactcttcttgcatcttttccctcgtctttagctttcccatagttcttctcctattagctctctccttagaatccaaagatacacttctctacaaactcgatgagacttg

SEQ ID NO: 13752 - DNA, 845 bp, Arabidopsis thaliana
tctccgaccagcgaagatttcatcgtcgccgataactgttgtatcacttccgaccaccaactctactgctcctcatgatcgcacttctagttcacgtgtggaagtcgatgatatctccaacactaatgttggccaaattcaactaggcccaacattgacactaaattcggcccaaacccagcaacaccactcaactcatcttcccaatgctcaacatcgtgcaccaactacctcgttgttgtcgccttccattccacggactcgacgaatgcaacggctccttcctcaacgccgccactgggaccccaagcttggatcttcacccctcttcaccacgatcgtcaaactctcaggtatcaaactctatcccttcttcatccttttgtttctccgagcccactgctcattctcaaaatgggtcacaaacctcgacccaatcaccatcgtctccaattgagcccactgctccacgttaatatgagttgaatcctacaacttagcctcagccacaacaaacccaaccaccacaccaagccttgtacaataaacgacagaaccaaataatccagccaccagaaaatacccacaaaatgagaaccagggccaaaaacaatatcaccaaacccatatagaaactcagtcttcttatcactgcaaatcaaaaatgacctaccgaacctactacgatcaaacaagcgttgaaagataaagattggagtcgggcatgttcgatagaatttgatgtacttatgggtaaccacacgtgggatctcgtacctcctgccgcaacacaaaatatagttggctgcaaatggttattcacaaccaaatacttttctaatggg

SEQ ID NO: 13753 - DNA, 574 bp, Arabidopsis thaliana columbia
tcatcaatagtaggagaggatgcagcactcgatccatggtggatttcttggagccacaaagttcgagctttcccgtataccgagcaaccaattccgcttcttcctcagcgtctctgtgtcctgaaaccctaaaccccaaaagtactcctgccaataaaatctagattaggctatcagagacgatctttgttgacagtttagatgcaaatagaccaaatggtgtatttactgcgtctttattgcataagaaagcctctaaagtcgctgttgaatcctccagtgtcaacaaaacttggtggtgacggcgattctcatctgaacagaaatcctctacttgccaaggatatgcagctacaacccgaacaatacatctgtacttgcatgtaacctgtaataacaacgtaggcgatcacataaaagtattcttaatcttttcagggaatacagcaaatagattcatgaatggtaccttggggaatgttatgatgtccatcagtgtaacaaatggggcacaattgtcatctgtctctgcaagacaccaagaatgttaaggaagtctgtctaaagattgaca

SEQ ID NO: 13754 - DNA, 1207 bp, Arabidopsis thaliana
cattcattggccggttagttagtgtaccgttgagtgaagccatagattctcgtaaccggtaagcttctcgtaagtatccggtgaagttgatctagatgatacgtggacttctttcgcgacctgcgctatatctctgcatatatcaactccactcgcagagcttccgatcactatcaccacctacaaattacacaacaaaaaggaaacgatccaagagttaaaagtgaagagaaacgtggatatatatgagatcacgtacaagattcactctagtgatgggattcttctgcaagtacctgatctttgaattggtcaggaacacggtaattgtggctgtgaatctgcttgcctggccatgaatctatgcctgaaaaaaaaaaaaatattattcccaaatgaaaacctaaatattgatattgtttgacgaataatccatccctcaagaaaactctgtttttaattgaattcttactattttaaactaattttctttatgtgaaatttttttaaacctatcatattacgacaaaattctttttaattgaacatataaaatacacaaactcaagacacaagtaaggttttgcttattaccagtgataagagcatgacgaggctcggtatagtgtccgttacaaaccacaacggcgtcgtatatctcgtcgacaacaccatcggagcttctcggattcaaccctccacttccctctctcctccccctctgccgccacctcgtccgccttaacaacctccgtctcgaacctaaccatttcctcgatatcgaattctttagcaaagtctcgcaggtaagcaagaacctcagtatgagccggatgtcttctcggatcccttgacccgtcgtgtggtcgggtcgcaaaagggaagtcggtgaagcccatgcattctcgagggatgttggtacgtagggatctgtagaggcttgagtggacgacgggtcgggtcgggtcgaggctaagcgggtctggttcgacttgagaggtgtaagcccacacgcctccgatttgctcccgcgctctaagacgactactgagtggccttcacgacgtagctcacgagcagctacgagtccagcggctccggctccgattactgccacgtggcgagaggtggttggatcaggatgactcgttgccatgttaggttatagtgaagttttgtgatctaatgaagaaagatgaagagattg

SEQ ID NO: 13755 - DNA, 421 bp, Arabidopsis thaliana
gtgatgtgggaactcgtaaagccgagcctcgtgagccagaaaacaccacggaagatcgtgataaaacggcgccctcctctctgcatcggctacaaggcttccagtcaaatgtagtgtagtaatataaaggatgttgatggcttccgtgctcaattgtatccaaaattgcagcgcatcgtacatctatagtaacataagggcctgattcgtatctgaaaccagtgaaatgttgtttacaaagaccacacgaagcgttacgtttgttgcaagaatctgtgaatagtatgaatgacgtgttgttgcacacgtggcgtttcttccgtggatgatttgcacatttttcgtggagtatagaactacattggttgcaactgtagaacggttctgacaagatctggaacacacacgctttcacaactat

SEQ ID NO: 13756 - DNA, 716 bp, Arabidopsis thaliana
agaaaaatcaatcaatctcagtatagtgttattatacctctagtgctcttctttcaactgcagcctctaagcattgaatcactcgttgcctctctgcttccgaacttatcggtgatccatccttatgccggatatagaattcctgaacagtttaaccaaacaaaggaaagattctattagctcaaaatcacaaaaaaacatcaattcatcaaacgaatttacaagatcatttcaagaaacataccaagtgagcttggtcttcagctgtgttgatagtagcatgaaacacagcatattccatatcggttaacgtacaaaccacatcgaatagaagcttggtccggtcccgacaatgaacattaacgacagagtaacccctctcagcccaattctgaaccgtcacaaccaccattggagatctctcatgtttcttagatctcctctcgtagtctctatcttcaaacataagctgatgaagtctacgttcgatatgcatcatcgaatccacagtaacacaagtctttgcagcagagttaacatcgttatcgccattcaaaacgttctttaaccgtccttcgatctttgatatccggtgagaatcgagaatcggagctcctgagatacaatctttgagatagatcacagaagcaactctaccgttatgtgtccatagcttagcgtcaaccacatcacagttgagatcagagagaaccgca

SEQ ID NO: 13757 - DNA, 662 bp, Arabidopsis thaliana columbia
aaaagtttgaataaatacaaatatggtataagaggcttatgtgcctatgtggtgtgagaatccgattaaagatgtgaaacaaacaaaaaattaacatgtaattctctgccttaatcatcaataacagtaatggtttttacttttttttttttattacaattaatgtttgaataatccggttgaatgatatcgttaatccgcttacattaatttccgatgattgttgttacaaagaaataaatagaaactggaagcatcatcataaaaataaacaataaatagtggaccgaccccatgaaaaaataatgaggacagaaataaaaggaaaccaagtctgaaacacaatgattgattaatcacttataaggcctaaactcacttttcctagttttgcccttcttttagctcatcaacagagagagagatagatccatggagggtcttcaaagatcaacaatctctttccgccgtcagggatcttccggtatagtgtttgacgatcgtctcatcgccgaactcaacaaatcgggaaacaacgagcagaaagacgaaagtcaacgcgacgaacaacctaagcctatgtctggaagctctgaacaggtcaaaccaatcgatgagaaagacaagcttagaccgattaaaacaggtggaggagcccagga

SEQ ID NO: 13758 - DNA, 981 bp, Arabidopsis thaliana
gtgatgacttgcaactataaaaacgctgagtctctcgagaaagagtttggaatcttgtctgaattcaagggttgttcgagaattgtccagtgctatgaaaacagagttatagagaatctggacgttgagggtaacaaagagtatatgatgctaatggagtacgcagctggaggaagcttgaggactttcatgaaacgttccgaagacaagaaattgcctgatcctttgataagagagtttactcgaatgatcctcgaaggcttagccacaattcacggacagggctatgtccactgcgatctcaaacccgataacatcctcgttttcccaagatgtgtctacaagaagagagcatggagatcgtcttacgaattgaagatttctgattttggattgtcgaaaagagatggagacagtaagtggtggcatcctcatcgtccgtttgtgggaactgcgatctacatgtcgccgggatcggtttctcacggcgagacagggagaggacttgatttatggtcattaggatgtgtggtgttggagatgtacactggaaagaaaccatggtggcataataactatgacttgaaggatctcacgaactggtacgcgccaatgattccgagtgatcttccttgcgatgcaaaacactttattatggcttgctttgcgttaaatacaaacgagagaagagacgcattgacattgttggagcatagcttcttgcgtggggtggttaataagatcacaaagcctcatgtgaagaatgagaatccgaaagaaattgcactggcattggggagagttgtgaggagaccatcaaaagttcttacgtccattttcaaaagagccggagagttgatgaagatcatcaagaagcagccaagagcaccgagatccaatttgcttcctgttcacatttgtcacttagcacaaccatctcaaaagatttgttttttcatttattgttctctttgtgttgtg

SEQ ID NO: 13759 - DNA, 1335 bp, Arabidopsis thaliana
tcatcaaccgcaatatagagagacatgcctcatgatcagtggatgaatcatggtcataaagctgtagaaaggcgacttgcggctcttgcaagagtaacttgttcagtatcttaccttagatgactgtacagctggatgttgaagtacccctaagtatatattggcctccattcagtttgaactccatctttaggtgagtaaagtcccacagaataggatatagtgtagccagccattgtacgcctagaacaatatcccaatgttcaagcggtaaagtactcacttcagtggtaaaactataaccatgcatcctccatgtgaaatccctgcatctataaagtgtcactattttgtcaccaagtgcttcatttactctcataggcttgatcctttataacttgcattttatttccttggctaccttgatatcaataaagttgtgtgtgttgcgtcggtctacaaaaatttggagcttatgcttctcatactgccccaacagacgcatacaattgaatgtggtggatcaattcaatgcgtttactaaatttgttggctgctcctcattgggatctacaacaacattctcttcctcttctactgcaaccaccccttgttcttctaaatcatcctcttcatattccatcacaaagatttgagattttctatgctttaagtgatggcctggaatatatggctcatcacataacatacatagaccttcggttctccgttcttgcatctcatcataactgaactttatggagggtttagtggtattgtttggtttgtatggtggtgttgtaaggttttcagtgaatcttgatgttggaagtagggctgtggtgtttgagagtttatagtagggttggttattgggttttgagtagggactgaaggtggttcgttgaggtttagtaggtgtttgaaggatagccgactcatggagcttggctatagctgcctctgccactataacaattttgaactgtcgggcttgtagggctaggtgtgggttaaggttgttaaggaagatgctgagagcgtgcgacattggtagcgaccaccttgttctggcgcattcaaatttttcccaaaatatttcaacagaatttcctccctgcttcacatttaccaaatcagccaaagaatgatctacaagctctgcgaatctagatgatagatctatcacatattctgatcaagatgggaacatatcaaaccgatcacgtatgtagttatgatgccactccaatgcttttgaactgctcacatcggtaaagccatccacgaaacctgttaccatcaaatgaggggaaccctacctttgaaagtctg

SEQ ID NO: 13760 - DNA, 802 bp, Arabidopsis thaliana
aacggctcataacacttcatgagctcttctaattcatagttagtatgccaccatggcttctttctagtgtacatctccaacaccacacatcccaacgaccataaatcaagtcctttccctatctccccgtgagagatcgactcaggcgacatatagatcggtgttcccacatatggtttgcgaggttgccaccactgagtgtctccatctcttttcgacatcccgaaatcagaaatcttcaattcgtaggatctgatccacgcgccgttcttgtagacagaactagggaaaacaaggatgttttcgggtttgagatcgcagtgaacatagccgtgtctgtgaatcgtggctaaaccctcgagaagcatacgagtaaactctctgatcatcgaatcagacaattttctgtctttgaatcggtcatgaaatcgctcaagcttcctccaaatgcgtactccatggcaatcttgtattctacgtaacccttgtcgttaaatatctcttttactccattcccgtagcattggacgattctcgaacaacccttgaattgagagaggatctgaaactctttgtagagagacttagcattttcgtcgctagatgttttcacggcggcgtattgagtctcgccgtcgcgttgtcttttgtacttgaagagactcaccgaaccaaacgaacgttcccccggatacctttcgaactccaaatctaacgccaccattgcaaatagaacaacgattgaattcttctgatagatttggcacaagctttaagcaaacctaattaagtgaaagtggaa

SEQ ID NO: 13761 - DNA, 1133 bp, Arabidopsis thaliana
aaaatgattatgagttatcatgagtctttcttatatatgagtctttcttataatccgaaaaaaaaggaaaatctttttatctatttcgatgtaaataaattaaaaacagaaaataaaaaaggaaattatgaatgaagtcggttagttctcggcttatatatttgtttgagactttattcccaagctattacaaattctcagatatttcagtcaattagggttttgttgccaaaagctatcaaaagaatcaatcgttctatttgcaatggtggcgttggatttggagttcgaaaggtatttgggaaaggttcgtttggatcggtgagacttttcagttacaaaagacgatgcgacggtgagactctctacgccactgtgaaaacctctgatgatgctaagtctctctacgaagagtttcagatcctgtctaaattcaagggctgtccgagaatcgtccaatgctacggtaacggagtaaaacagagatttaacgacaagggttacgtagagtacatgattcctatggagtatgcaaccggaggaagcttgaacaatttcatggaccgattcaacgacagaaaattgcctgatccgatgatcagaaagtttactcgtatgcttctcgagggtttggccacaattcacagatacggctatgttcactacgatatcaaacccgagaacatacttgttttccctggttctgtctacaaggagggcgcgtggagatattcttacaaattgaagatttctgatttcgggttgtcgaaaagagatggagacactaagtggtggcatcctcttaaatcgtatgcgggaacacggatctatatgtcgccggagtctatctctcacggggagatagggaaaggacttgacttatggtcgttgggatgtgttgtgttggagatgtacactgggaagagaccatggtggcatactaactatgaactagaagatctcatgaagtgttacgagccattgtttccgcctaatcttccttgcgatgcaaaactctttctcatgacctgctttgcgcctgaaccagatgagaggaaagacgcgttgacattgttgagacaaagcttctttcgtcgagatgtcaataagttgacaaagcttctgaaggttga

SEQ ID NO: 13762 - DNA, 621 bp, Arabidopsis thaliana
cacaatcatccaccgagactgcacaggtaacgacgacaacgagagcgacgacggaggagtcaaggcggagaaaccaaaggttcgagattgttggagcattgatgggtttgttcggccagagaatctgagtcatggaatgactgatgatgagttgttctggagagcttcgatggttccggtgaaggaagagtatccgtacgatagggttccgaaagtggcgtttatgtttctgacgagagggcctttacctatgcttccgctttgggagaagttttttaaaggcaatgaaaagtacttgtccgtttatgttcatacgcctcctggatacgacatgaatgtctctcgtgattctcccttttacgaccgccagatccccagccaggtacgttttgatgcaggacagtgaactttttgtgtcttgcttgtgtgcttcagtggatcagaacaaaacaaatacttagtttcaccagtgacttaatcttgtatacaagaacagagtaatagataagtagataagaaatatagtcattctggatcatggagatctagttctctagaggagacacatgtagatctaatcggcatgatggaatcaagtacactggcgcgtgactatttgag

SEQ ID NO: 13763 - DNA, 464 bp, Arabidopsis thaliana columbia
taccatatgtcaaggaggatgcagagtatgactcaaccactgaagatgaggacttctatgttcctctcttcaaccttttttctgactaagctctgtaagagtcaacctcagtgacttaaaacaagctcactttggaggaagttacatgtttatccatgtatataactttctattttccttgttatttttgatgttttgtttaagtgtttcaggtttatttcattgaccatgaggaagtcaacggtcgagtaaactcaaaccaagtcaaaagatgatctccaccgttgatcgagtaaaatgaggaggagtgttctgagccgcgcgattgaatgaccaaatgagagaaatcatccccaccagtttgatcgagtgacttcttgaggcttattctagtcggtttgatcgagcgttttaaagagtgaaacattccccaccatctaatcgagtatacgcacttcatggga

SEQ ID NO: 13764 - DNA, 1718 bp, Arabidopsis thaliana
cttgttcagatacattcaaaccaactatcatcagagtcactgatataccaaaaactattacggaatactactaattaatcaatatcagtataatcatcaggtctcgagggctctcgcagagctcatcaacttcaaattaacccatactcctaatttccgaaagcatctgtctaagtttcttcagttgcagggtgaaatcattccgattatcaatcttctaaagctttgtcaacttattgacatctcaacgaaagaagctttgtctcaacaatgtcaacgcgtctttcctctcatctggttcaggcgcaaagcaggtcatgagaaagagttttgcatcacaaggaagattaggcggaaacaatggctcgtaacacttcatgagatcttctagttcatagttagtatgccaccatggtctcttcccagtgtacatctccaacacaacacatcccaacgaccataagtcaagtcctttccctatctccccgtgagagatagactccggcgacatatagatcggtgttcccgcatacgatttaagaggatgccaccacgtagtgtctccatctcttttcgacaacccaaaatcagaaatcttcaatttgagatcgcagacagaaccagggaaaacaaggatgttctcgggtttgagatcgcagtgaacatagccgtgtctgtgaattgtggctaaaccctcgagaagcatacgagtaaactttctgatcatcggatcaggcaattttttgtcgttgaatcggtccatgaaatcgctcaagcttcctccggctgcgtactccataggaatcgtgtactctacgtaacccttgtcgttaagtctctgttctactccgctaccgtagcattggacgattctcgagcaacccttgaatttagacagaatctgaaactcttcgtagagagacttagcatcgtcagaggttttcacggcggcgtagagagtctcaacgtcgcatcgtcttttataactgaaaaggctcaccgatccaaacgaaccttcccccagatacctttcgaactccattgcaaatagaacgattgattcttttgatagcttttggcaacaaaaccctaattgactgaaatatctgagaatttgtaatagcttggaaaccaaatctcaagttgtttctgaataaatataacatcagataattacgagaatttatatttatcccaacattttaaattggtttaaggtctatcatttatcccaactattttaaattggtttaaggtctagcatttatcctagtttcagacgaaagtgactttataactttatttgctttcataagaacaaaacaaaactcatcttgtatacattttgagagctaacggtatgattccagaatttatgtatacaacttttctcaaagccaaaagatacaaatactactaagaaacaaggtcaaatgaatttgataagcaagccttaaaggcgtgaaagaaccaacttttttactgaactatattcaagtgatgcttctcttttcttttctgacttgtttaggcgattgccgatttgattgtctcagtttcttcaggacgccaccatgacttttcaattgaaagcaagccttcattgtctttggactgcgtcattttaaccttccatttcatagatttcaccattttctcaacttctcctaatgtttccatgtcatcccttatgatgaaagttccttgtggcctaagaa

SEQ ID NO: 13765 - DNA, 704 bp, Arabidopsis thaliana
gaaagatccctttttttaccttatttttgtttatgtttctatcttgttcaataaatcttctaacattatgattcacatttgacattccttaacaaaaaatccactatgaccatctaaagaggatttgattttgcctcttttttgtttctgtctcagtctctatcttagataaagattcagtctttgcactcaagaatggcgaaagagaacagtggtcatcatcaccaaacagaagcaagaagaaagaaactaactttgattcttggtgtaagtggactctgcattttgttctatgttttaggtgcatggcaagccaataccgtcccatcttctatctcgaagctcggatgcgagacgcaatcaaacccttcttcgtcctcttcctcttcctcatcttcagagtcagctgaactagatttcaaaagccataatcagattgagttaaaggaaacaaaccaaaccattaagtactttgaaccatgtgaattatctctcagtgagtacactccttgtgaagaccgacaaagaggaagaagattcgataggaacatgatgaaatatagagaaagacattgtcctgtaaaagatgagcttctttattgtttgattcctcctcaccaaactacaagattccatttaaatggccacaaagtagagactatgcttggtatgacaatatcctcacaaggaacttagtgttgaga

SEQ ID NO: 13766 - DNA, 975 bp, Arabidopsis thaliana
atacataaacaattttaatgagtagttgacagattttgtgtaaaataaatgcagctaaaatcgattaagttcaacatttcgaacaatgaacaattgcatttttttatataaagttagctgaaagcattttgagctaagaatgtaagtctatccaccactaatacacctaagttgcgaaacctgatgttcaatattctccaactctagtgctatatcattagaattcttactcttcacgagaggctctatgatcttattaacatccccacgcaagaagcaatgcctcaacaatgtgaaagcgttttttctcttgttagtctccgacgcgaacgaagtcatcacaaagagttttgcatcacaaggaatatctttcgaaatcaatggcatggaacctttcttaagatctcccaagtcatagttcttatcccaccatggtctctttccagtgtacatctccaacaccacacatcctaatgaccataaatccaaacctctccttgtttcgccgttagaaatcgattcaggcgacatatataccggtgttcccgcaaacggatgactaggaagccaccatttactatctccttctcttttagacaacccgaaatcagaaatctttaactcgaaactcgggaaaacaaggatgttttcgggttttagatcgcagtgaacataaccgtgtccatgaataactgctaaaccctcgaggatcatacgcgtaaaccttctgatcaaagcatcaggcaatttcatgtccttgaatctactcataaaatgtctcaagcttcctccagatgcatattccatgggaatcgtgaactctacgtcaccttcttcgttgattgtctcttgtacttttgcccatagcattggacgattctcgaacagcctttgaattcggacaagatctgaaactctttgaggagagagtcggcgtgaattatgttggaggtttcacagcggcgtaaagtgttt

SEQ ID NO: 13767 - DNA, 561 bp, Arabidopsis thaliana
cacattctcttcagcctacaccacttgaggacctatgtgataagttttcttctctctcttctcccgctttacctttgattaattctttagattattcgaagactgcttcaaaagataacaagcctagagttcctttagctgctccaaccagatttgtttacacaccgccttggaaggcgaggaggcagcagcaatcctccaccactccacccacatcctgaactccgccaagtcaagctattgactcaaaacaagcacttagtgggaggcaacctactggtttgatttttcttttccctttcttttattttcttttatttttgatttatttttcccgatttttctagatttgaatgccattggggacaatgtcgtttaagtctgggggaggttcatactaatattgcttttatttttgtttttttattattttgttttacagttcatatggttatttcttttattcccttcttataaaaattttatttaaaaaaaagttttttttttgtttaataaggaatcatgatctatatttctcttgtttactgcctgattgatgag

SEQ ID NO: 13768 - DNA, 575 bp, Arabidopsis thaliana columbia
  unsure (1)..(575): unsure at all n locations
gatggtttaattaaatgttattacagttatttatataaatttagaatatttaagccaattttgaattcaaacatattaattcgatatttataattatatatatatatatatatataaataaatcatatttgctaaattacattagaaaataatattttccgccaaaaaaacgtaaacccgtgattttcccgccaaaaacgtaaacctgtaatttttccgccaaaaacataaacccgtaattttcccgaaaaacatctcaacccatgctccctcgacnacaaaagtaaacccgtaatttttccgccgaaaacgtaaacccgtaaaagtagaatccgtaatgaaataataattattaataacgataattatttatttttgttttacaataataattaattaaattcttatttaaatgggttacccatttaacaactcaacccatcacatattctcagtggggatcaaaacttcctaatggactcttcgccagcgatcaatattcgaagggaaggctgaatgtatactctagactagatattctatcctttgtccggaaggtttttgatgagacagag

SEQ ID NO: 13769 - DNA, 571 bp, Arabidopsis thaliana
gagtaggaggtcgagtgaatagctggagtcttcttttcttccttgtactcgagtgtctggttgagtgcggaatgaaaaagactctgaagctcttaatcgagtatgtagtcgagtggtggtgatggtgatactcgatttcaaggtagagtggtgagatcgagtggttgtctggtaatggtggtgaagacactcgacctcggggtcgagtgaggtgatcgagtgatggtcaggtgatggagatgaagacattctacctcgtggtcgagtggtgaggtgaagtggtgatgtcctctactcgaccagggggtcgagtggtctgctgaggttgtgaagcgtctactcgacctgggggtcgagtggttttgcatgatcaggtccgcttcttccaattagctcgtcaatagcttcgaatcaccttaaaacaacacaaatatgcaacatgcatgcaaaactatcctaaacatgtaaagtgatgacaaatgatgagaaattgtataaaacagtgatgatatgatgctaaagtgatgacaaatggatgctcaaaacatgcaaaatacacactattcagtag

SEQ ID NO: 13770 - DNA, 623 bp, Arabidopsis thaliana
acgtgacagaccaactcgggaataagctcaccgaccgaagccttattctctacattcaacaggtgtgagattaaaatcattagtacaataatcacctaatcatttttaaggaaaatagtataaaattaccaagtaaccgaaaaaatcattaactaagatgaccaactcttataatgtgacagcttcgtttatttatgtttctttttgggtacttttggacgtatctaattagcttcttgagtttacttgtgaaattaatacatttcatttttaatgatttttggtttttacaaattcaggcaatatgttctagtagaacgggaggtataacaaaggagatgcagagtaatctaaaacgggaggtgcaacagcgccacgtgtcaacagaacacacggcctttgagataaccggaatcaatagaccgggtctactatccgaaatatctgccgtactttccgacattggatgtcacgtgacggctgctgttgcatggacccaccacgagcgagcggctatggtgatttatctagaagacgggtttaacggtgggcccattatcgacccaataagaaaggcccaagtaaaggatcatctggatacagtcatggaggcccatcacata

SEQ ID NO: 13771 - DNA, 548 bp, Arabidopsis thaliana columbia
tcgcctctcaaggtttcagcagcagcagcagcaacaacattgccaaggacgaaacgactgagaaaaaaggagacatcgacactctagttagagctatagctggagtctcagtcactgctcagcaagagcactcaaagcctagcaagagcgtgaagaggcgcgagaaacgggctaaggaagaagcagacagagagcagagaattaaagaggagcaaagccacgtgaaaagtgatcgtatggttgagaacgccaagcttgagaagaagcttaaaccattgggattaacagtcagtgagattaaaccagacggacattgcctttaccgtgctgttgagaatcagcttgccaaccgctcgggcggtgcatctccttacacataccagaatctaagagaaatggctgcttcgtacatgagagagcacaaaaccgactttctcccgtttttcttgtcagagactgagggtgactccaacagtggatctgcagaagagcggtttgagaaatactgcagagaagtcgagtcaaccgctgcttggggcagtcaattg

SEQ ID NO: 13772 - DNA, 561 bp, Arabidopsis thaliana
gtaagcctgttcagcagtacactcagcttgagaagtagggtttgagagagcaagaatcaacggtttctataagccaacaccaagaccagcattagaaaaatagcataaataccttgttttctgaaaaagcagagagtaagaacaagaagaaacctcgttgttggtagccatggcctcgacaacttcttttgtgaaagtctgacccacaccggatgttccaatgagaacggttggcttgattgcctgtttgaaaaagtttcaacaaacagtgaacaaaaagattctctattcactatcaagcaatttaaagatcagttcatcacgtacattaacagcaccaatgaggtccttcacaggtttgtgctcatgtgcccatggctgcttgaagtgctgaagagattctttgcgtgactaacaatcagtccctgcaaaataatgttcaaaagagaaacatatatgaacaagaacggtatagctaaaaaagatgagactgatcttggtggttggcgctaacaataccttggagtcacaagccaaatcttcttccgggtctcagtgatg

SEQ ID NO: 13773 - DNA, 827 bp, Arabidopsis thaliana
tgtattattccctctgcttttttacaaagagcttatgaccaggtttcactttcctctagcacaaaataaaattgttctaaaaggtttttattacaagcaaatggccttagtgtctttgatggtttctttaggtggtccatgatgtagatcggcagagaaaggcggtgcgatttgttattacaagcgcagggcttgttggatccgatggtccagtgcagtgtggagcttttgacatagctttcatgtcatccttaccaaacatgatagccatggctccagccgatgaggatgagcttgtaaatatggttgcaactgctgcttatgtcactgaccgcccagtatgtttccggttccctagaggctccatcgtcaacatgaattatcttgtccccactggattaccaattgaagtaagttccaatctaatcttcaaatcttttggttgcaaaaacagaccgtggtgacacaagaactgctttatcatattagagtagatcggaagaggaagagttctcgtagaaggtcaagatgtggctttacttggttatggagcgatggttcagaattgtcttcatgctcactcgcttctctcgaaactcggtttgaacgtgactgtagctgatgcaagattttgcaaacccctagacatcaagcttgtgcgtgatctttgtcagaaccacaaattccttatcactgtcgaagaaggctgtgttggagggtttggttctcatgtggcgcagttcatagccctcgatggccagctcgatgggaatatcaaggtagagagacaaatcaaaacctcatgttctcacctgtttttggtttta

SEQ ID NO: 13774 - DNA, 883 bp, Arabidopsis thaliana
tcgccgtttctcgtctccggtcagttatcgctactctaagcagagcacgacccggtaaccaaaactccgggctcgggtcacgggtcgtgggtacacttttcgggtctcgtcgtggtcacgtgcatttctctatccagaaagatcctaattctccaccggcgtttttaatcgaactcgctactccgattagtgggttagtcaaagaaatggcttcaggactcgttagaatcgctttggagtgtgataaggggaaagaggaagaagaaggagaagaaaaaaacggaactttacgtcacggcggaggagacaagacgaagacgacgacgacggcggcggtttcacggcggttggtggaggagccgatgtggagaacttattgtaacgggaaaaagtgtggatttgctacgaggagagagtgtggtgagaaggagaaaaaggttttgaaagctcttgagatggtttcaatgggcgccggagtcttaccagagacggaggagataggcggtggtggcggcggcggaggagatataatgtatatgagggcgaaattcgagagaattgttgggtcgcgtgattcagaagccttctacatgatgaatcctgatagtaatggagctcctgagcttagtatctatctactcagaatctgatgaacaagacgatgatcgatgaagaagaagatgactcaacaaaagcctcttcgtcaaaaaaggaaggttcatggtttagtaagattttccggtttaattacttaattagtcggttaagtggttaagtaagtcgatgtctaatacttaaaatcgaaaacgacgtatctattattgcaaattcggattagatgtgaatgtgatcgattaaatcgatttcgtgttagatcagtttt

SEQ ID NO: 13775 - DNA, 481 bp, Arabidopsis thaliana
gcagaatctcgctacccgcaaatggagaagctcgccttagcagtcgtaatgtcacctcggaaactgcagccctatttctaatcccactccatcgtggtaatgggatccatgccgctccggctatcctgcatagtccaagccaatcaggtcgtctggctaagtgggtaatcgtatgatatcgaatatcgaaacaagatgtgcgcgaagtcccaagtcctagccgactttatcgtcgaactacctacaaaagaaactcgagagaatccgctcgatacaacttggctcctgcacgtggacggatcgtcatcgaaacaaggttcgggcgtaggtatccgtctaacttcacctacatgcaaggttctcgagcaatctttcagactaaattttgaggcgaccaacaacgcggccgaatacgaagcgcccgtggatgggcttaatctagctcgggggctgaagatcgtgaaaatcagcctttttgcga

SEQ ID NO: 13776 - DNA, 521 bp, Arabidopsis thaliana columbia
tactaggctcatctaagatagttccagtaatagatacctatggtgggcataccgaataacctaaaatcaagttctagttagttactctaaaactagcattaagaacaatctaagatgaagaattctaattataatatcctaatatggttttcgatctactaatttatccaaatccctaatgagaattcctaaacctaacaagagaactactcaagcatgatcatagaagaacaaaacatgattgaataagaaatcaatgatgaaattaagaagagaaaagagtttagaagaatcttctctaaacggagtctccacatggttttgctcccaagaataaaagagataagaagagtttggtctaaacaatgaccataaaaatcaatatataagtcctaaaaatgtttgagccttctttgaaaataagggaaagttctgggccatatttggaaattttcaaaacatcaataagttgcgcaattgaattgtcgttaggtattggtgtttctcgcaccagggattgt

SEQ ID NO: 13777 - DNA, 910 bp, Arabidopsis thaliana
aacctaattatggtaaaattttaaaattaacacatctatggcccctctccataattatctcttctccattggttttccattggttaaatcttctttacgtagatatataaattgagaaacaatgttaaaggtattttctcaaactcatcaataacatcttacaaacaacaacaatcaacaatggcaacttccatgatccctatattcgtcaccttcatgctcgtggccgcccacatggccctcgccgatacaaatatgcttcaagacttttgtgttgctgatctctccaacggtatcacatctctctctataccatttatgttctgcttgcatttacatttaccagatatagttaactgcaaacgcagctttggtgttttgaaacaaccaagaccaattccaatattttgttgttgactttttatcatgttctgattaggtttgaaagtcaacggatacccttgcaaagacccagcaaaagtaacaccagaagacttctacttcataggcttagccactgctgcagccacagccaactcttcaatgggctcagctgttacaggagccaacgttgagaaagtgcctggcctcaacactctgggagtctccatctctcggatcgactacgcacctggcggacttaacccaccacatcttcacccaagagcctctgaagccatcttcgtccttgaaggccgtctcttcgtcggtttcttaaccactaccgggaaactcatctccaaacacgtcaacaaaggagacgttttcgtttccccaaagctctcctccatttccagcagaaccctaacaaagctcctgcttccgtcctcgctgctttcgatagccagcttcccgggactcaagttgttggacatctctgtttggttctaaccaccgattcctgatgact

SEQ ID NO: 13778 - DNA, 521 bp, Arabidopsis thaliana
gttgaagcattcagaaaacttagaaatcatcacatcaatcattggtaacaagtgatacttcctcgcttttctaaacacaccattaatggactccgcataattactagtgtcaatgttatacttgtctcttttaaaatggcacctcgaccatttctcaaaccctactttctcaagaaagtcagcatctttaggccatatacttgtaaaatgaccaaactctttgttgaactcactctcagtatatgcatgagcacaatccctgaacttgtcagcagctccatccttgttaattttcaaaggaagtctcatgttttgagacaaatgccatatacaactagcatgaagcgcattcaggtacaccatcttgacagctttctttatgttttgatgcctatcactaataaacaccaatccgggaacattcggatatacagttttcagcttttctaagaaccaaatccaacttacatccttctcgctatcaatgattccaaacgcaagtggataatggtgatgattag

SEQ ID NO: 13779 - DNA, 649 bp, Arabidopsis thaliana
atcaaacctcaatttcactgaacaaacaagagaaaaaaaaagattaaaaacatgtgtgcctaatttaattggctgacctgttccagtttctcccgagcatcgtgaagctctttgtcgtaaatggtgtattccagtgattttctctgtttgtcaagttgttgatattttctgagttcttctttctcttcgtccaattctcttagtctttcatccaagtagtggacaacttcgatgatctgcttccgtttatttcctgaaaggcaagtcatttggccgtattagatttttaaggtagccatgcatgcatctgaaaattaaagaggttttactatcactgcacactgataacttgcctgtttcctgcataattcttaaactctcacgacgcctctcctcataaacacgagtaccacctatctcttttagcagatccaaccgttctatgtctttcattagtgttaacgaggctatctacaaacaaaccacacataaaagggatttaaaatgtagaattccgttatatagaaatctgttagcccatagtagcttttttctgtgcttggaaatacaggattaatccaactatattttctctagcaggagcttacctttccttgttgaacaacatagtaaggattagcacgagaaa

SEQ ID NO: 13780 - DNA, 1275 bp, Arabidopsis thaliana
gaatgtgaataaagatagaagatacctcgttggaggatgtaaccagtagctgcagtgccaaagacaccagctaggactcctgctgtgtttgatagtcctaagagtacaccctgcgagccaagccatagttaatgaagtggaacaagtttggtgacaaagtaataaaagagaaagaattgatgtttatctcacagcgtatcgtgggccaatgtcttgatgattagagtagagacccgactgagagaatgcatcagagccctgttggggacaacatgagtctttatgtcagagctgtacacaactcatgaatttttctaagggtgacaactgtttctttttgtagccgacattgcatttaagttggggttcaattatagctgtactctcacaagaataatcttgtgtcggcaggtgtgaaataaaaaacggcaaacatgtttttaacagttccaaacttatccataattctatggctctttcaatcatatgatctattgacaccaatacctgactgcatgccatgcagagaactgccattgctggagttttgacatggctcagctgactcaggaagaaggcagggcctagaaaaccaattgattgcataatctgcaataatcaagagtttattagtcgtgagtatcctttggagtagccataatagattcatgagagtagtttattggtataaagggtttgttgtcactcctttaactgaaagcagcataacaagtttggccttttgaggtagtagagacatgtaaatgatcagaaagtgaaagagtgtatttcttgcctttcgaacgtttgtaattgaaagacctctgctcacaagagtatcagcaatccaacctccaatattagcaaaaacagccatggttagccatggcaaaacgcatagtagcccggattcagtgaggttgaacttcaagacctgcagcgtgatcaaagaccaacaatagagaggagtctctttacttgttcacaaaaaatattaaacagtaaggatataactgaagctgaactccgtgcctgattgtaatatgtgggcatccatgtcaatagtatgaaagttcccaattatggcagaagtgggaaattatgagagcccagactgggggtttagacagtattagcttccatggaatcactgtaacaggttcccttggtttgctactcccagtataccttttttcttctcacttaggtcgggtcatcttgggagactatatgctgagaagaataaaaggtgttaaatataatctctggaggttt

SEQ ID NO: 13781 - DNA, 988 bp, Arabidopsis thaliana
tctcgtcgtctagggtcagcttctttggcttggagctccttctctttctttttcaaatcctgtattcccaacaatgtaacattcaaacaagaattattctaactaattcatataaccccctaatcacaaaatgtataatgtttactccattgtcaatcaaacctgtgcaccagaccctggtctgtcaagaggaatgtcaacagtacgaccataaccaaaaccagcaggttcgggaggcaaaggcgatagtctggaattcgaagcagcaggaacactcccaggattctaagaatgtagacaaaaattaacagtcattaggcatcaaatggtcttcagaataaaaaaaaagagcacatagcaagaaatcattgaatagagataccaatagaaaacatcaaagagccaaaataaagaactcgagcacatctctaaagcgatctactcgtgctcaattacgttaatccttagtaacagcagtaaagtaacaaacttttaacgaatttggattatattctcgtcaactatcaacattatcctcaacagacatagcgaaagagagaggcaggtaaagcaaacacagaaccaggaacaacccccaaaataaaccctaagtaagaatgataagatacaaatagaccaatttgaggaaacccagtacgaagaagctagctttaagggagataacacgccggagtttcttctttcactttcagtggtgaaatcagagagtaaaagcttacagcaaaaggattgacttcgtcttgttcgtcgaatgtgttccgatcgtaacgaccacccatggtttaccaaagcttatctctcgatttcacaacaaagatcaaaccttcaattctgaccttcggaagggggaaaactgaaaagacaacaatttgtatttatccatttaaattcatattttaacgtttggaatttttttattaggatttctgattttttttccgcttgtatttttgtcgtcaaacagatt

SEQ ID NO: 13782 - DNA, 584 bp, Arabidopsis thaliana
gcactgcattcaagacttagcaccaccattccttggacttctttgatcctctctataatcgtttctttcacatatttgttagagtctggtataagtgcaagtcagtcgacaagaggcattgtgacttcaagatttttcaattgcttttcaaagagagctttgtagttctgtatcatgaccttcttaaatcgaccaggaaataggagtgggggcttgtaaggtgggggaacgaagactttgtctttggttttggctgcagctgggttttcaacaagaggtgatactgcaggagctagtggtcgagtaggttggtcgagtataggcacttctattgctttttttaactgaatcttcattctgacagaaatcctccccatctcgctccaaactgtcctcagtgttttggtttggactttctcttgtgggcaattctttaacccttctgagcgtgatagcatgatcatattcctttgaattttgcattgatttgcctgaaggtcctgtaattttgggtgtagaggtcgacaagtttgaccttctatgaatcggatcttagatgtcagtgcttcaaccttggtattgat

SEQ ID NO: 13783 - DNA, 892 bp, Arabidopsis thaliana
ggtgtagcgtctacagtccttgatctttcttactttgtctcaaggaccaagatcgagaataaagaaaatgatgaggtgattgagtcagacctccacagaatcaccaagtatgaggaaaaaacattggaggctcaaactgaaagctaacatcgagaagggcattgcttttgctgcaaaggactaacaaccatgccaaatgattcgacctccacataatctcttttgactcaaaatcttttaacacttgatattaaaggatattatttggacatatctcttcaggtttagaaaaactgagtcgtagccttccaaataaacctcagtgcaagtgttttttttttttggcagttttggaatttcattgtagcatcttcaacctgcaaaataaaacaataacactttataaatcaaatttctgataatttgggttgttaccaatttttagtgagcaaaagaagtatattttttttttttccctaatgtaacacatgagaaatatctttagtgattgtgattaaaatatatatatgtttgaaagaaaaaaaaacacttaaaagtgtagtagctcgagaaatttctctatttttaatctaattaaataatgagtgaatcttgtgagtgtacaaataatatacttctaagtgtggttcacgttatgtacaaagaaaatttatgatatgtataaagaaaaactgtttacaaaaaatcgtgtcatgtataagatttgtttttttaaaaagtgaatttttttagagcctagaatcttagaaccattgcaaattagcaatgttccattattttaaggatctttagaaccattgcattattccattattttaagggaatatatatgtcaagaggatttattaaactcaaatattagagagtgttg

SEQ ID NO: 13784 - DNA, 516 bp, Arabidopsis thaliana
tgtttggtggtttttttaagcgcatttcttccagtaccgttttcagtatacctgtgagaaccttgtttgttccccttctcaacctttttgttcaccatctcaaccttctcagatggtgaatcagatttctgggatgctcgtgttccttcttcgttttggtcctgggaatgtagagcatcacgtatctctacacatacaaattcttataaatcttcaaatttattatctaaaagttctttttgcctcttgaagaaacgccggaatttgaccgcatacttatcaaactcttcgtctctagaaccatcaccaccactgtgtccaccttctccatcatcagagttggtaattttcctttttttatcaataggatctggcacccgtcttttcctcttcaaaataactatataaaatggtttaatcatgcattactactcttggaggaacctaattctgatataagttatacgataaagagaaatgattatctctctctcctgttattgagggccggacttg

SEQ ID NO: 13785 - DNA, 949 bp, Arabidopsis thaliana
cgaccgtgaaggcgtacgtctcagtcgggtcgggtggagaatccggaaccgggatccatttaaacgaatggatcatccttgcaagcatcaagttgatgtgcagaatccctaaagaccaagccgggcagatcctacgacccgcaccaaaaggcaacattgtaacaccacgtgtccccgtccagtcagcatcaaccccgtccccaccggttaaaaacctctcgggtcgaaacttaccaggatccgaccaaatatccgggttctcagtaacccaagcagtgtaaatttccacatacgcccctgccggaatatcataccctcctagctccgtgtctttcacggcggcgtgagagagaagaaaatgtcccggaggatgtcgtcggagagtctctttcacgatggcttctaaataaggcattttcgccacgtcatcctcttcaacgacgccgtttttgccaacaactccaacaacttcctcatataacttctcttgaatgttttggtcagtcactagatgaaataacgcccattcaagcgtcgttgcactcgtgtccgtaccggcagagacaatctccgagcacaaagtcacaatctcttcatctccaagctcaccacctctctcgatcaagttcaaacgaaacaaagaatccacataagctgcaccaatcggactaaccatctcttcgttaggattctcctttgcatcaacgaacttacgacggtttcttatcaacggcacgagacactcgagctgcgtcttcctcagctctctagcttctctaacttgacgccgaaacaacggagtgaaaaccggcaaaaagtcaggtaacgtcggagaagttataagcataacgtccttaagaacattctcaatgtgcttaatcttttcctcgctgatcttggcaccgaaacaaagacagatcaagatactacaaatcgttagcctacattg

SEQ ID NO: 13786 - DNA, 617 bp, Arabidopsis thaliana
tagatctgaggagatacagaattcaataaccaagacttcaccatgcttttgcatctagaccaaagacgaaaattcttatccgattccaacggacgagggagagttccatcaataaatccagatttattcttagcatctaaggagataagcatagcaacattccaatcaccatagtttgtttcatcaagacgatgagatatgatattcaaacctggatgatctgcactatgcaagaagaagggagactgagtcggatcaacggattccggtggtgcgatgactcgcgaagtccagaaacgttggatttgtgaactggaggagagatcggaggagattcatcaacaccggtggatcgcgatgattttcgagctgcagaacttgtaccggacttcgatcgagtggatttccgagtaactctagctgtcaccattgtatctggagcgagaacaacgaagaagacgaacttgagctgagaatgaagaaatcagatcgaaaacaatggagttttgagcttggaaggctttgataccatattagcggaatagagatgagagaaaagtttgttgaagatattatgaaggcttttctcattaattgtaaaatgattctgtacaaat

SEQ ID NO: 13787 - DNA, 1177 bp, Arabidopsis thaliana
ccggacgttcagctggagatcttctttcgtaatctggaacaaatcaccacaaggacaaggatacgtgtacgcttgaatctcttcgttccactccatatcctctatctcaacatcgtcgtacgacatcgcttacgcttccgattgagaagcgttgtatgtatagattggaagcgtttccagcgttactagtgttcgggaaaaaaaaacaggaggaaacggcgattaggtttttttagggggaagaagaagatgactcctcgatgaaaattacaaatttacccctattcgttttaagtaaataaaaaactaattcgtgcggagttattcgaactggccacctgtgaagtctttaaaatcctctagtaccactacacaacaaataaaatttgtattaatttcgattaattacattatataaccctaacgtttagattttgaaattagttttcaactaatttatgattttatttttgatatgtatatataattacgattcaaacacgtacccgcttcctaaattttttcaaaaactcgcttttacgcttccaaacgcttccgcttctatcagagagtgttggtttatttatgtggtttagttgattatgtatttcggttatgttaacaggttgtatagtcatagtatatatacttgtacaaatacattttacagagttaatgagaaaatattttcatcaatctctaacaaactctctcatctctctcaatcgtaatatggtatcagagccatcaacgctcaaactccattgtttctcgatctgatttcttcattttcaagctcacgatcgtcttctccattgctcaagctcaagatccaatggtgacagtagctcgagtgacgtgaaaatcaactcgatcgaagtcaggaacaagttcagctcgcaaacagtcgcgatccaccggcattgatgattctcctctgaattctcctcaagttgctagatccaagacttctagagcttcgcgagtcatcgtttcaccgaaatcaagtgatccaactcaatcaccgttcttcttgcacagtgccgatcatccaggtttgaatatcatctctcatcgtcttgatgaaacgaactatggagattggaatgttgcaatgctcatttcgttagatgttaagaacaaatctggatttatagatggaactctgcctcgtcct

SEQ ID NO: 13788 - DNA, 643 bp, Arabidopsis thaliana
tgttaatgttacaaacctacgcggtcttatgcaagtgttgcgaatccagggattggtttaactaggatgggaaaccctactaagcatgtctcatggaatcacctttattctaatacatgatgagaatgttgcaacagtgaaggaagagttcaaagattatattttcgcgcagtttcacggtcctcctccagatatggggcggatcattggtgttgtaaacgccctttgggtccgctcgggtcctagaatctttgttcatcggattggacctggcactttccttctgcgagtcacaaatcctagaactcggtccatactcttgagcagaaatctttgcaatattgcgggtcacccgatgtttgtagcaccgtggtcacctgatttcactcctgaaaaacctcccctcaccaaggctcaagtcactgtggagttcagaggcattccttaccttctctttaatgatgaaagccttgctcgtattgtgtctggtgtcggtgagccaaagggcattcatccagaaactgcgaggagagaaacttttgaagttgctaagatcttgattgaagtgaaccttctcgaagagttgccctccaaactcatctctgggtttagtgatgggagagaatttcagattgatgtgaag

SEQ ID NO: 13789 - DNA, 803 bp, Arabidopsis thaliana
caactgctatttacatcgccacaaatcctgtgttccatgaaagaacgaagcatatagagctagattgtcacacggttagggagaaactagacaatggcgagctgaagttgcttcatgtgcgaactgaagaccaagtagcggacattcttactaatccgttatttccccatcaattcgaacaccttaaatccaagatgagcattcttaatatcttttcatgcacatcttgagggggcatatcagatatgtatattggtttagttggtattagttggtttagtagaaccattgtatagtgtaaagtatataagacatttgtacagaatcattttacaattaatgagaaaaggcttcataatatcttcaacaaacttttctctcatctctattccgctaataattcattttaacgaagtaaatactatttttaaatccactctcatattttaaccattttttagttaaatttaatatagaagaaattatttttaaaaaaaactaaatatgaattaaattatttttagaaggggaaaataaattaaattcatatgtatcaattaataaataaaaggcaactgaaaaaaacgtctaaaagcctctatataaaaaccacatcaccactctcacaacatccccttctctttcgctttctctcttctctcttctctccattaacttctctctcgatttcgcatactctcaacttaatatgccgtcggaaccaaaccaaacccgacccaccagagttcagccctcaacggcggcttacccaccgccaaatctggctgagccgcttccttgtc

SEQ ID NO: 13790 - DNA, 676 bp, Arabidopsis thaliana
ccgaacctcttacactcaaatattagagagtgttggtttatttatgtggtttagttcattatgtatctcgcttctgttaaccggttgtataatcatagtatatatacttgtacatatacattttacagagttaatgagaaaatatcttcttctatgtctaacaaattttctcttctctctcaatcgtaatatggtatcagagccatccaagctcaaatttcattggttactcgatctgatttctccgttttcaagctcagaatcgtcttctccattgctcaagctcaagatccaatggtgacagtagctcgagtgacgcggaaatcaactcgatcgaagtcaggaacaagttcagctcgcaaacagtcgcgatccaccggcattgatgattctcctccgaattctcctccagttgctcgatctaagactactggacttcgcgagtcatcgtttcaccggaatcaacggatccgactcaatcaccgttcttcttgcacagcgccgatcatccatgtttgaatatcatctctcatcgtcttgatgaaacgaactatggagattggaatgttgcaatgctcatttcgttagatgctaagaacaaatctggattcatagattgaactctgcctcgtcctttagaaacggataagaactttcgtctatggtctagatgcaa

SEQ ID NO: 13791 - DNA, 1242 bp, Arabidopsis thaliana
tgcagataatcctttattttctaagaccatgttctgatgaagattttggatggatcatcctttgtttcagcgtattatgttgttatacaaatacataactactactttatccaacgaagagatggtgctgataaacttgagttacaaaaaataacgattgtattttaaatgttggcatacaataaatttccagaacatttttcgagattggctacaacacaaatctttctagatagaaaagtcataaatgtgaaatacttttaggttttatgtcgtggaacaggtcttagatcaaaattctttattttatacatcttgttctttaccaacagctttatacagatcttcaactacactgctaacaaatctgtcatcttccacagagcttcttatcattttctcatagaacaagattcctttctctgcgtcaccacaagtcatatatccctttaggatcgtccgcttgcaagcactgtctggacttataccggcttcagacatcttgcagtatgtcctttcagcctcctccatcatcccagctttgacaagagcagagagcaatgaactgaaatggctgtgagatagcgggatgcctttctctttaacaagagttatcgttttctctgcttctgcaaactgtgaactctcagcatagacttgaatcagggtgaggtatgtggataagtcagtacagcgaccatttctctccattgcttgcaaaagttcatcaacctcgtgatggagtctactggttgcacatattttgaccatcatgttgtaactaggctgcaatattttcccagtattatagatttgttttcacccatagttagattttaagaaatatctcataatgttaagccactaaatagatgttacgaagaatttggctaagacctaccgttccaggtttaatccctttcttctgcatttcactaaacaaagacaatgcttcactcatctttcctgtaacagccagagaaagtttcatttgttaatgtaaccagaatcaagacaggtcaatgttacagaacattccatgtctgcgagaaactgtgattgataacatacacgtaacatatttataaatttcttgattagatacataccccccttgccataatgcataatcatgtttgtgtaaattttctcgtccagatacaaccctgatctgcgagcgttactaaaaatctcaattgctttgtccagctgcagacctcgcccatatacactgcatcggga

SEQ ID NO: 13792 - DNA, 795 bp, Arabidopsis thaliana
cccccatattcaatgtttttacttgataagaaaaagaaagaaaaaaacttcttctacttcgccttggaagcacaacaatggcgtctcttttcgcaatcggtttctccaaatttcctccacaacccacttccgattatcccacatcactaacagtgtttcatccaaaaccctattccttgacatttctatttctcaaaaccctaaatcctactaggtttttcaaagtcagagccaatgatggaaccgaaccatctgataaacttcaacagtatttccagaatcaagattacgataagaaatacggattccttgaaaacatcgattccttcacaatccctaaaggtttatctgaagaaacgattcgcttgatatcgaagttgaaaaaggaaccagcttggattcttgagtataggctcaaagcttatgctaagtttctaaaattagaagaacctaaatggtcagataataggtaccctttgcttgatctccaagatatgtgtttttactctgctcctaaaaagaaaccaactttgaatagttcagatatagctgatgaagctgatgatcctaagcttcttgaggaatttgatagattagatgttcctttaacaaagaagaagacatgttcacctaaagttgcggttgatgcggtttataatagtgaatcgatagctattactaataaggagcctctagagaagtcaggtgtgatcttctgttcgatatccgaagctataaggaagtatccggatttgatcaagaagtatttaggaagagttgtgcctagtgatgata

SEQ ID NO: 13793 - DNA, 446 bp, Arabidopsis thaliana
ttgccttcatatccaatttttgccaaattctctatgagaactgcccaagcaaagtagcatggtgcgaaatagtctgcagccactagtcctgggactgctcggacacggattcccgatggatcgagaccggtctcactgtctagagataagtgctccaaccagcacaatggcctataaatcaaattacaacaattaaacgaccaagtatacacttcaaactaattcagaattgagaaaatcgaaatgctaaccagaaaatcatgtaaatcaaaaaccgtaacaatcaatatatatatatatatatatatatatatattttccagaatccatgtttaaaccataaccacaaatatatgaaaatttagaaatactagaataatatgttaaaactgatattctaaatttagtaagttttagaatgcgatgacatcgtcattcatgttttg

SEQ ID NO: 13794 - DNA, 625 bp, Arabidopsis thaliana
taaaaccacaagaaagaggaagactgcagcagaaagagcactagcttcagctctgccaagaggtgcgcgcagcctctaaagggagcaagcctaaagaaacaaggaatcatcagaacaagaggtaagcaatcacctaagaaaagactgagaacagacaacttacctgagattcaggatagctctcctcccccccccccccggttatgattcctgctatcacaaagaatggagtggattttcaaagcaatccacatcctcttccttagcgataacatcctggaactgtcaaggattggggagctccatgacagttcatagactccgcgaaatgcgccggagtttcttcccggaggtgttattccttatggagactaagaaccaagatgagtatgtaggtcgggtgttccaatggctgggatatgcgcatagtttcacagtccctccgtcaggacttagcgggggattggcgcttttttggaaacacgaaaccgaccttgagattttgtcattctccccaaatttcattgatgttaaaattcaggtaaaggcaaagtccttctttcttactctggtttatggagatcctgtccaacaaaatagaagaactgtcactggcgaacgttac

SEQ ID NO: 13795 - DNA, 345 bp, Arabidopsis thaliana
gaatagctggagtcttcttttcttccttgtgctcgagtatctggttgagtgttgagtgcagaatgaagaagactctgatgcttgcgatcgagtatgtagtcgagaggtggcaataaacgatattcccttcaaagttgcagtggtgtggtccagaagtggtctggtaatggatgtggtcacactcgacctcatggtcgagtcgtgtgatcgagtgatggtcagatgatgaagatgaagtcagtcgacctcgaggtcagtgatgtagatcgagtggtgggcagaaggtgaagatgaagtcagctggcatgcgggacaagtgatgtgatcgagtggtcgtacttctac

SEQ ID NO: 13796 - DNA, 335 bp, Arabidopsis thaliana columbia
atcatttagctatgcatttgctcattgtatcacatcattttacaccattttagattatcttgcatacttaggcatggaggatcatggtgcatacgcattgcatgtctggtgtgtcgtctagtgcagattgagctaaaaaggactctactcgatccattcactcgatccaggcagctaccgaggaggctgcagtttactcgaccctcttactcgatcaaggcagcctcagatgaagcagtagattgatctactcgcccctcctactcgatcctctactcgacccatttactcgaccaagggtgaccaactctacaagacttgttgagctatcaaag

SEQ ID NO: 13797 - DNA, 571 bp, Arabidopsis thaliana
  unsure (1)..(571): unsure at all n locations
tagtaacgtccgccagtgtgctttaaagcttggggatattgtgcctgaatttttttgcgcagacgtcccatcagtacatcaatggtatggctttcccgcagctccgcatccggatagagttggagcattaacgaatctttgctgaccactttgccattattgcgtatcaacgtttccataatggtgtattcgaacgcggtcagtttgatcacttcgtcattaatagataattcacggcgagagagatcaacctgaaacggggggagcgaaatgacctgtgaagccagaccgctattacgccgcattaatgcctgcattcgcgccatcacctcttcaatatgaaacggtttagtcacataatcatcagcaccggcacttaatacttcgactttgtcctgccagctttcacgggcggttaataccagaatcggcagtgaaacatcgttgctacgccagcgcgaantcagtgacagaccgtcctcgtctggcaatccgagatcgacaatcgcaatatccggtatatgttcattgagataataatcggcttctttgctttagagnnnnnnnnnnn

SEQ ID NO: 13798 - DNA, 565 bp, Arabidopsis thaliana
agagcaaagcccgcctgcatatgatacaactttaatcgtaacagcaatgaagagacaaaacagcgactaggggaccctgtatatgaatatgaaaacacttcaccttctttcggatattagggtcacgaaactggactaatctttctacttctggcgcaagatcaggggccatttccgctgaacaaatattccctaaagcaaagagagcgagtcctacaacatactggttcgagtgattaagatctctgcacgtggcttaaggttaaacaggaataaatctagtacgatatggttcattaattcctagtacagcaatgcaaccaaaaatcaagtattctttagtatattagtattgttttgacatagaagaagaatccatgcaaaagccaaggtattaagaatttataaggatactgttttaacgactttgtgacaagcatcaacattaacccaagatatccaatcctcttctctggaaatccaggagatgcaattagcttcaaacactccatctgcacaaagtgtgtcgggtaaccagcatgtgtatgagcatgagttttgcaag

SEQ ID NO: 13799 - DNA, 550 bp, Arabidopsis thaliana
catataaaacatcagtcaatgcaagagagcgagagggtgttgaaattaaagccgaaccggtgtgggaaatggataaaccagacccgtcagcaatagtaacatcttcaccgccagtgtatggttgatgaagggagagattgttcaggtcagaagtgatgtgatgagtcgcaccactatcgagtaaccaattgttggcgttgtatggtgaggctatagctgcatttgctcgtggctgccacggtgtgaatggtgaggctgggattgactgttgcgagttgtagctgctaccttggagctgaggacaccgacgtgcgctgtgtccatgaatgctgcagatttggcagcgtccttgatagggttttggtgtgtactggttctgtcgctattgaggttgattttgctgccagttgttgttgttgcgaccatgagatttgttgttgcgattgttgttgttgtattgattgttgttcgagtccctttgtagtttgcagcatgacagtgcaggaacgatgcgttgttgcacacacacatgagtttgctcacggttgag

SEQ ID NO: 13800 - DNA, 729 bp, Arabidopsis thaliana
tatcagtccctctgtgcatttctgcagagacaaaacaaagacaagggtttgtcaaaactgacggtctgataaaacaatataacaacctgattgtctgcctcatttcagcagagtaatctatttataagtgaataccacagatatcaaactttattgcaagagaaaaatagtacacaaaagcatcatacaggtaatatagtatcatatgtacgcatattcaattaaattacgtcgatgctcctgtatgcataagtagagtgttctgtataatatttatagacttaccgttctgaagtactctagggcttcatcattaatcgtgcataattcataacaaagttgaactcctgttataagaaccccatgatgcttttctttaagcaaggaagcagcagcatttacgaagttttctgctagatctggaactttccttattattctagtagagcaaagcgccgcctgcatataatacaacataaatggtaaaggcaatgaaggaaaaaaaaaaagcgactaaactccaggagaccctgtatatgaattagaaaacacttcaccttctttcggatattagggtcacgaaactggattaatctttctacttctggcgcaagatcacgggccatttctgctgaacaaatattccctaaagcacagagagcaagtcctacaacatactggttcgagtgattaagatctctgcacgtgacttaaggttaaacaggaaca

SEQ ID NO: 13801 - DNA, 583 bp, Arabidopsis thaliana
ggatctgaaaatgcaccacgttatctttgctagagagaatcaatttcaataaataattaggtaactcacttggtgaagcctaaaaagaacataaaagtcgtcattcccatagaaaacttggagatcttttgttctctcatcgcataaaactgctgcgacatgctttgaaaggggtctgacggataagagaacacgttctgactgtggaagcagctcactttctccttctaagagatgtggatccattccctccgcttctccttcactctcagctttaccatcgatctcatcatgctcaccattctcctcctctctatcttcgtcctgagaacatacgtcgccaccagattcagttccagatgcctcggaagcattttcactatcaacatcgtcagcatcgtcctcattctctacttcagcatctgcctctacttcagcctctgctgaattctctggtttggatgtggacttcacccatgatctttgtaacaccaaagttgtctcaaaatcccattaggtgcagttcccttcccttctcattctggagggacttcgggatcacagaattctagtactttagaag

SEQ ID NO: 13802 - DNA, 380 bp, Arabidopsis thaliana columbia
gactttggtggagtttgaggatcatgtgaatcagatggaggaagtaaatacttcctcgtagaacctcgcatcatccaaggtggcgtataagcagccagtgtgtgcggtctaccaaggaagtgaggaatgttagcaggacaggacagaggtatgggtggtctactccggtttcctgaacaatcatcaaaagaaagaacaagcgctcgacaagaaactcatggcttgcttaaccgtaaaacagtttttagaaattttaaactcttattgatgaaatcaggaggtttaggaggaggagatgagtaccttagccgtttaggaggtggatcaatgagtagaggtgcagtgggtgacgtgaccgtagtgactggcgtatcagtagt

SEQ ID NO: 13803 - DNA, 455 bp, Arabidopsis thaliana
cccaccacccatagaatcaagacctcctcctgaggtctctggcccctcaaaggcggcctaatgacaccgaacggtccttggactcggacaatgtttccacggttgtcatcttggttctgaagttgctgtgctgtctgaagatcgatcttcaaagcttgagcattaactccgggtccaaatcaattgaaatgttcttctgtggctgttgctctcgtccttgtagccatacttgaccttgtgggttgtttccggctaagtaaaatggcttcattcataaaataccaaaaagaataaaccatattatttttgttaatttgtaattaatataatgattcttttgtaatgaggttttgttatatatatatatatatatatatatatatatatatatatacccctgggtcgcggtctcagctggtctggtgactggctagatcgagacgctgacgatgaca

SEQ ID NO: 13804 - DNA, 498 bp, Arabidopsis thaliana
gaggatagaggatcccccctcttgttctgaggggatggcaatccgattattgcgtcgatctgctttgggttagcttcgattcctcgttcggtgactatgtatcctaagaattcgcctgatgtcactccgaacgtgcacttagtaggatttagcttcatccggtacttgtcgaggatatcgaagcacacggtgaggtgcttgatatgatcttcggctcgtaaagatttcaccagcatatcatcgatgtagacttccatcgtgaccccaagcagtttggcgaacatctcgtagactagtcgttggtaagtcgccccaacgttctttaaccaaagggcatgactatgtagcaatagattctgcgatccgtgatgaaggccgtcttttcacggtcgtctttatgcatcaggatctggttgtatcctgagaaggcgtccatgaaggacaaaagctgatttcctgctgtcgcctcgactaggcgatctatgtgtggcagaggat

SEQ ID NO: 13805 - DNA, 599 bp, Arabidopsis thaliana
aggccaacaactatacttgttgttcttcatgttaaaaggattgaaaccatcagtagagagtcctagacggatgttcctttcttcagcagcaaactcagggtacttggcattaacttgatcccatgtcacagaatttatagggtgttgcatttttccatcactactcttgttagtaaaatgccaccttagatcctttgcaacttgctctgacctgaacatcctctttaatcgtgggattactcagacatgataagagaaacacaaatcataatctgaatactttgcattgaataataagattaagaatgaaaggagttcaaaatcctctattcacggattggattcttgtctccaaaagtgtatcttaatatcaaaacaaaacttaacaaaacttaggtctaacattgacattaaaaacctaattatatgtctaaaatacgtcttgggcctaaatattaacttctgggcctatttgggcaaaactaggcctgtgcaaatttcgtacagtttttgtgaaacttcgtggcagaccagtgtcgaccgacacaagtctggtattgatcgcactacattcaagactggttttctgctctgttttt

SEQ ID NO: 13806 - DNA, 643 bp, Arabidopsis thaliana
atccccgacttgcgaattctccaaaacccgatttcagtaggcagccaaacccaaggtttcttctccaaacagcgaattctccaaagtccaaaaaagagccagataatgctagatgcaaagctatgatggataagctgattgtagagatgccacttatagatgttgtgaaagtcttcacctacggttagacagtatgtgaagaggatggttactaaggatttgaatactgagccaggtgtgatgacgatttctacgcagattagcgacattattcagaataagattccacacaaacttccagatctaggtagctttgttctcaattgtagtattcttaacgagagttttgcgcgatgcttgtgtaatcttggttcgattgtcaatttgatgccgcgatcagttgcgctatgccttggtttgacagattgtgagccaacgcaaatcactgttgttcttgctgatcgatctgtccgtatacccgatggtatcctatgcgatgtccctgtacaagtcggtaatagcatgattcctacagattttgtggttttatcttatgagaaagaacctaaagacctctaatcttggtaagactttcttagcacaagtggtccattttgcgtaagaaggcataataggttgaatg

SEQ ID NO: 13807 - DNA, 840 bp, Arabidopsis thaliana
ccctttgactcggcactaatcagcacaacagagtaaatttgaccatatagatttagacacgtgtgcatttcatgataagagatactcaagctttaatacaaacaagccattgtcaaattaatatatagagactacaactttcaaggacggttaaaaaaaaagcttataacgacaagtcactgaggttcgatatgccacaaacgaacggaagcgtcttctccggaacttgctacggtgcaatcatcaatgaaggcgactgcgttcactccaccgagatgagcgtttcttgcggttatgcgacttgaagctggcttgtccacttcatatacaatgacgcaagtgtctatggaccctgtggctaccatcttgttgtttggtgaccatgccaagctgtttatacgagccgtgtggaacaacatgttgtttagcttcacctgcaaaacaaaaaccgcacttccaggttagcgtttaagcatgattgaacatataagacatacaagaacaactctaatcacgtcacctgtttggtctcgcgatcccagactacagcttcgcggttggcatcaccagaagcaaacattgttaagtcaggagagtaacgtatcactgtcaaagcacctctgtgtttctccaggactgcttcctctttgaggttgttgtcccctgagactgagtatatgtgtaacttcccgtcttgccctcctacaatcgcttctttcccgtcaggtgagatcacagaggctgccacagcaaaacccaaatcgatcttgctcaaaatgttcagaccattgagcaatacaactccggaatcaaacgagactagtgctgtggcttcgggag

SEQ ID NO: 13808 - DNA, 1347 bp, Arabidopsis thaliana
cccgggtaccgagctgttaaacctcgtatgttaactaattatcataaatatggagtttaagagagaatttatatatatcagcttaaactatatataataatatttctacacacctatggcggattcaagagctattttaagtcttatcggccagctcaaaacagaacaaccaggttttcctgcaataacaaccaagtggcttaagaagtttgtttgaaagagaacctataaattgttgtatcaaattttcatgtgttttacctgagagatgctcttttaagtttccctttcccattaactcgtagatgagagctaagccattatcatcatcacaatatccaatgaggcttactaacttttcatggtgaactcttaaaagtagttcgacctaacaatcaaggacgacataaagaaaaaagtgtaaccaattgattcctgatctcaaacattaacctctttttccaaaactttagtaaaagatttaataagaatacctctgttttgaattctttatagccctgagctgatgaatgagaaagcactttaatagctgcttgttcattatttaaacaaccttgatagacaacaccgaaccctcctttaccaataacaacttgaaagttatttgtcattttgttaacgtcagagtaagtaaatcttctattttccgatttgaaggatgagcgtgtaactgcatagaaaaatttaacagaattccatgagagctatacaatatgggattatattcttctatatgttattctcctttaagtacctttcccagcagatggctttctccttcttaaaacaaatatgagaactaacacaagtatgataatggccactgcagaaacagatgccgcaaccgcagctgtacgcgaatcttgtagatcaatgactactctatcatattatcgtctacccttatgattgaagagcgtagtgactgtccagactgtatacttatgtcgtagtaaatcaataaagatcatctcaaaaagaaatcttacaatagctttaatccttccttttttctatcaagaagggcttgaggaaccaaaccgctaagtttgtttccacttaagtttctgtgagtatctagacgaatcagtagatcatctcgttagtgtgcgtaaccgcttggtgtagctctggctaattttgctttcaacaacacttacatgaccaacaaatatttcatcttggctagaaattcaggcactttaccagtcaagttgcattgggacaggtccctgttgcaacaaagaattgttaccacagtgttttgaatacatcttcattttgttatagagatacgtacagtgtcttgagttgagttagattttg

SEQ ID NO: 13809 - DNA, 548 bp, Arabidopsis thaliana
tttttcctttgcagtttttcatgtgagcgatcttaacggagacaaattaaccgacgagaacctaatccgttacattgaaaaggtaaattagttaatccttaattatgcaattaaatttgtgaatcttatcggaaaattaaagactagttttttgaaaattttacagtctattgaaacgtctcattactgtaaaacggaagggtatacgggtttaaccgctctagagttaaccggaacagacagagtcggtttactctcagaggttttcgcggttctagctgatcttgaatgtgatgttgttgaggctaaggcatggacgcataacggcaggattgcgtcgatgatttatgttaaagacggtaactccgggacaccgatcgacggagattccgaccgtgtccaacgtgtagaaggacaactacgaaatctactaaaggccgacgatggttacaaaacgacacgaggacatgtgtgtcttatggtggcaatacacatatggagagaaggttgcacaaaggatgtttatggacagtgactatgagaagaag

SEQ ID NO: 13810 - DNA, 1028 bp, Arabidopsis thaliana
catggattcaacaactatatattaaagcaagttaatttaacgaatagagaaacttgcctgatattgattctagctcctcgtaaaagtccttattaataggttcataatcgatggagctatgatccagagctgtaataggctcaatcttccttttatccacaacaatcggattatcatcggaatcataatctagcatcccctgaatcgaccgccttagctgcagcatacacctcctcgtcggagttataaccggcgttaagtgcatcggcggctagtgtcaggcccaaatccttcttggccttgaggtaactctcaacaggatcgtcatcgtcgtccttgtaccgctctacgtgctcctttggcttacggaggtggagcagatttcatctcctggtgaattccctccataaaagcatctaatggatcgatctcatcaacctcgccaccgctagccgcagcagaaccgccttcctcaatatcttcctcagcttcttcgttttccatgtaatcaatgttatcaagatcggcatcttcggagttgtctccgccgcgagacgagggagggacgtagagacgttgcggtgcttgagatcgctcgaaactgtagctagtttgccgattaatgccgaatccttccattccgaatttgcgattagacattcttcacttcgaatttcgcttctcagctagagcttttagcaaagagcttaactgttgccaattacgacgaaatttagggcttcgtgttttttcccggtggtatgtaaaatcggagaggaaggaaacaatctcaagtaaaattattttcccggttcaccgacttgtcatcgtctatacatttgggcctctagtgggcctttgtttagcattttttttttttttttctaagggtcaatttttgtaaaaccacccaattagtggattagtgttttttctttgtaacatttatggattatacatgtaataattagacagataagataatttttatgcatataatggttttactagtagataatatagggtta

SEQ ID NO: 13811 - DNA, 541 bp, Arabidopsis thaliana
atcccggtctatccgctgtgcataactccaatctcacaccctgcataagagtaataactagtaagtaagctactaaaccaaccggttttaagttctgttaaccaaatgagagttgttcatcatagttttataccttaaccgttcttctttcaattgcagcttgtaaacattggatcaaacgttgtctctccggttctgaactaaccggatgtccatcactatgtctaacatagaattccaaaaacgccgtttctccaaccgttcgaatcgcggcgtggaacacaatgtaagccatatccgtcaacgtgcaaacaacgtcaaacaaaagcttcattcgatctttacactgcaagttcacaacagagtaaccacgtttcggaagattttgtaccgaaacgataggagatttctcgatatcaaacttcttctcatagtcacggtccataaacatcctttggtgcaacttctctccatatgtgtattgccacataagacacacatgtctcgtgtcgttttggtaacatcgtcggcctttagtaga

SEQ ID NO: 13812 - DNA, 566 bp, Arabidopsis thaliana columbia
ggttcttcatttatcctttttatatgccaaatttttaacagattacaagtgctataaatatttttaaaagagcaactggtcacctgcacaaccacatcgccatctgaccccccttcctccttaatgatgctaaaaatcttttcaaaagcaccttcaaagacaactattttttggatctcctacaaatgtaaaattgatcgatcaatggctgccctcggctcaaggcagaagaagaggaacagttacaaatataaccaggaggtctcacctctgcttcacgagtcaagtgcgtaagaagcaacaaagcctcgttccggattacctataaggcatacaccatacgaaaaattacgaacatgatattgttcccttccagagtttaccgtctcataacctcctatttgaggttgacaggaggttatagaggtcagagtcttacgtaaacaatggcaagatcatacatatccactaaataattaatgatttacctctctatccattagcatatccatgagccgagtagtccgcgaggagtggtcaaaatagcttcctgcaacctgtagaga

SEQ ID NO: 13813 - DNA, 1590 bp, Arabidopsis thaliana
tgttcggtttccttaatgtggcaatataggatgtgaaccacgcggttttggccgttggttatggagttgaagacggtgtaccatattggcttattaagaactcatggggagcggattggggcgacaaaggttacttcaagatggagatggggaagaacatgtgtggtaagttctttaataattatgaaaccatcacaccattctcaaattctcacagttggtctttctctatctattgttgattcgttcttgaattgcaggtattgctacatgtgcatcataccccgttgtggcttgagatgatcagcgaatgtggttggtcaattatcaaattacgaaatgttcacgtatttattggattaagacattacgtaaaagttgggacttgggaatgcatatggtttatgcttgttgtaacataaaaaggtctgttaatatgtacaaaataaagccaaaactatagacgacaaatttataatattttcatgttaaatttatgaacataaattgatttagatcaaagtagtttcgttcttgatcctaagtcaatttgtctaacatatagcttttactttgaatcttgatccttgagtcattttgtataacatacagcttacaagttatgactttattttgttttggtaattggtattctaaacgaaaatgaaatctaataacgtgattaatagtggtcacatggatatctcataaatctctatccaattgtgtgattaagaacatgcaaaactgcaaataaagtataaaaaatcatttacacaaaacttcatctagtttttggacatcaaattcacaaaaagcagcatataacactacaataattgatttcacttttattttatttgtttgtttacctttctaagttcaaatataaattctatgattagtttattataattacaatttttattttttttactctgatttgaattttttacatggacacgaaagaagaagaagaccacatgttggttccgaataaaacatggccgagtcaccctccgagtcaacctccgactcgcttagcaccaccacatccactaagcccgctcaatccgggactgtttctatttcaagccctcaaagtcaccatgtcgtcttccccgagatcccaatcgagatcatcagtgaagaagaaatggctattctcgatgcagctcttgcagcctcccactccatcctaccttccgtcattcgttctgtttctccgtcacagatgatcgccggcggaagcccaataactattcgttcaattactcttttctccaagaggaaattatcagcttgtttatatatcgaagagtcttatctacatcgatttagaagaaatcagtctttaggtgtcacagatctcaccggtactgtacgtttgttttatatcacagtcatatcataggaagaagagatcgaatagtagcgacgacgtggacagcggctaattgtgagagatgatttagatttagtacaattgttaggtttaatatctctttttctggtgagattaatttgtggtccactactcatccatttcattaattttccatttcattgctcatgttatttcataatcta

SEQ ID NO: 13814 - DNA, 545 bp, Arabidopsis thaliana
ctctagtaacgtgcgccagtgtgctctaaaggcggggtttttgcgttaattcagagcgggcctactgacttacgaagccggggcgttcccgtggcttggtactgttataggtgggtatatcttcgggctgggaattgttctggcgggtggatgtgccaccgggacctggtatcgcgcgggtgagggattgatcggcagttggatcgcgcttttcacttatatggtgatgagtgcggtgatgcgttctccacatgccagtggtttacatcaaaccttgcagcactacagtactgaacataactctattgctgagacttttaatttgtctgtgtggccgttggttgccgatttgctggtgatacgctctgggtggtgatgaaagagttgaagaagccaaaactcaaagtcgcgagcttaccgccgctgcgaaccgggatcgctcatattctgtttgacaaacgctggcatccctttgtcacagctgtactcatcggtttgattgcgcttttagcctggcccctgagtgaagcaacggacgcatgttt

SEQ ID NO: 13815 - DNA, 629 bp, Arabidopsis thaliana
tctagtaaaacttagctgcttgttatgtagcaaaagtatattgggatcaaggcattactgagctcgttaaagaaggtttcttggttatagccaagacaaggatgaaaaggattgtcagtcaagcaaagaagagtggtgaacaaccaccgtggattcgtgatacactttggaaacagatgttggtgcattggaacactgaagatgctcaactgaaaagtgaaacagcttcaaactgtagaaactaagatcggggaggtcttggggtgcacaaacacttagccggtcagaaatcttttgtgcaagttcatcaagaaatggtaagagttgtctttccatccaaacagttcacttaacagctttctattattaccttcacataagcttgtctttttctgtttaattttcttggtcaggaggaacgtttgaagcgtcatgtatcatatggggaattgtttatgcaaacacatacaagggctgatggatcttttgtagatcagatatatcagcatgttggtgaggcttatatgaagatgatggaagagaggatggctgaaatggacgaggatggcctcaagtttctgataatccctcgcacattcactcatcgtcgctcacattgatgaaagaat

SEQ ID NO: 13816 - DNA, 622 bp, Arabidopsis thaliana
tagtaacgtccgccagtgtgctttaaaggaacccactgatgtactgttttatgaaggtttacacggcggcgtagtcacgcacagcataacgttgcgcacgatgtggacttactggtcggcgtggtgcctatcgttaaccttgagtggattcaaaaactgatccgcgacaccagcgagcgcgggcactcacgagaagcagtgatggactcagtagtgcgttcaatggaagactatatcaactacatcacaccgcagttttcccgcacccatcttaacttccagcgcgttcccaccgtcgacacttcaaacccgttcgcggcaaaaggtatcccgtcgctcgatgaaagctttgtggtgatccattttcgtaatctggaagggatcgatttcccctggctgctggcgatgttgcaaggctcattcatttcccacatcaatacgttagtggtaccgggcggcaaaatgggtctggcaatggaattaattatgctgccgctggtgcaacgattgatggaaggaaagaaaatcgagtaactctgctattacgccggataaaatactatccggcttcacaacgggatagttaagctctttggcaaccacttcatacgagtgagtaata

SEQ ID NO: 13817 - DNA, 618 bp, Arabidopsis thaliana
tagtaacgtgccgccagtgtgctctaaagggtcacagcccgaatactgcgattttcgaagggcagctggaactggaaaacggctacatcaaagtacagtcgggtattcatggtaatgccacccagaccagcattcctggcgtctttgccgcacgcacgtgatggatcacatttatcgccaggccattacttcggccggtacaggctgcatggcacacttgatgcggaacctacctcgatggtttagctgacgcaaaataattttacaaatcagtaacaaaagtaaagaaggcgacaccatgcgactatgggtcgcctttattttttccccgttgtaacattgctctgcaaataattctgataactcacctgctaagcgtgcaatgaataaatctcgtcaaaaagagttaacccgctggttaaaacagcaaagcgtcatctcccaacgttggctgaatatttctcgtctgctgggctttgtgagcggcatattgatcattgcccaggcctggttcatggcgcgaattctgcaacatatgattatggagaatattccccgtgaagccctgctgcttccctttacgttactggttctgacctttgtactgcgcgcatgggt

SEQ ID NO: 13818 - DNA, 490 bp, Arabidopsis thaliana
ccagagagagagagagagagagagagagagagaaacacaaacctgctacactggcgaagaatcggcgacggcgattgtgtgaagaatcggcgacggcgagatcaccggcgaagaatcagcatcattgacggctatgaatctcaattttgagtgttttgtgtcgaggagagggtgaagaagagatgtgattttgggtgtaattccatatattagattagggtattatttttgttataattttggctgaatcagcttcagcagaatgaacatatcgaactcagtcagattttttttatttagtggatgaatttagaaaaaagcattcaactgaatcattcgaatgatctattaagacatgaaaagcgaacaacaattttcatcttcattgagatggttcatccacatggacatacgaacagtgccatagtactcaacttgaaaccattgaagctggttggcaggttttagtctttcttgcgatatttgcatg

SEQ ID NO: 13819 - DNA, 826 bp, Arabidopsis thaliana
ttagactattagccgcaagaaatacaaaaaatccggcaaatgtcttatagactattagccgcaaaaaaataaaaaataaaaaatcccggaaatgtcttatagattacaagccgcaaaactattcttagattattagctgccaaaaaaaaacatgaggatcctttgtaatgtctggtggattcagacagagtggatcataatcccgaaaaaagctcttataaaaaactaagccatgattgaaaacattccaataacttttacagaggactgcaagaacgatcaagaagcaagaaagacgtttcagaagaacaaacgtcttcttcttgttcttcttcttcctcctcttcttttttttgttttcattacgacgagaaaatttgagttcgtgatcgcttgaacaaccatcatcatcatctagagccccaaaaaagaagaagctgcgggccggttattttggttaattagtctaaatccatggcaggaggggcatttatagacgagagtggccatggaggagactacgaaggtcgtgtaaccgcgtttgtcatgataacctgcattgtagctgcaatgggtggtctcctctttggttacgacattggtatctcaggtttgtttcttgccagccaagtaaaccaaaattcttctctctgcttctttctttgttttcatggcggacatattatatgttttcaggaggagtgatatcaatggaggactttctaacgaaattcttccctgacgtgcttcgtcaaatgcaaaacaaaagagggcgtgaaacagaatattgtaaatatgacaatgagcttcttactctcttcacttc

SEQ ID NO: 13820 - DNA, 1376 bp, Arabidopsis thaliana
aaaatacttcaatggacccaaatctttcatatggaagcaagacgcaagatattctttaaattgctgagtcgctctttgagaatttccagtgataatcaaatcatccacataaatcagaatttttatccgaacagaacctttgacaagagtaaataatgaataatcagctagtgattgctgaaatccatacctctttaaagctgttgtcaacttctcaaaccaacatcgaggagcctgttttaatccgtatagggctttacggagacgacaaaccttgttcggatgtgaagcttcaaatccaggaggtagcttcatatatacttcttcacgcaaatctccatgtaaaaaggcattgtgaacatccatgtggtggatttccaattgcgttttactgctacatcaagaaataagcgcacagtagccatctttgcaacaggagcgaaagtctcaccatagtcctcaccttctttttgtttgttccccagcgcaaccagtcgcgccttataccgttcaaccgagccatcagaattgtgtttcaccttatagacccattgactaccaatcgctcgtttcccgggaggtagatcctcaatggtccatgtatgattttcttcttgagcatcaatctccaaacccattgctttaatccatcttttatccatcattgcttgtttatacgatcatggttcaatcgcagatgtaattacagcaacataagtagtatgagaggcagagaaacgacgagtatcatcccgtttttgcaattgatagagaatcgaattaagtttagatggcgactcttgacagactgttgtgttgacaacaaaatccttaagagtcacaggcggtgctttgtttcttgtactttgacgtcgtggaggagggaccgccggtggtgcgacgcttgagcggtcgttggcttagctcgagacaggggcaaaaattgcaggttcgtcggcgaggagggtgacgaagccgatgtcgttgaagttgcaggcgtcggaacaacttcagtgtctaacggagaagacgtcgagtgttcagatcgtgaactagttgcagaagggctaatcggagaagaaacacaaattggaggtgttgggcctgcgttttggcccaagtgaacttcttcttcaataagcccatcaactattggagcccataaagcttcttcttcttcttcaattacgttctgttcgtgagaaattcgaaatggaaattctagttctgagaaaaccacgtctctcgacacaaaaaattcattttgttcaagatcaaacaatctccatcctttttgaccatgagggtacccaacaaagacacaacgtcgactcctttctgcaaatttatcaccaccacgattacgattgtgtgca

SEQ ID NO: 13821 - DNA, 498 bp, Arabidopsis thaliana
cgccaatgtgtgttgtagacttgctttcttaatttcaaagtagccagtacctttcatgagtgtcgccaaaattctccaatcacatttctcatctgaacaactaagaacaaattaattccactttgttcttgtttgcttgaaatgaaacatgttcttgatcgcatatatagccaaaccgatttggcaatcttctttgcttgcatacacttttcccttgtatatccctttgccatcatcctctatatccaaataaggtgtgttctctatctcatactcgatgtcttcaaataatggtgggatatcaaactcctcatcatcaacttcctccaacttccttgctctagctctcaatccgtgagagctcccaactctacaaccaaccttagcttttgcagcccattccgtttttactctctgcatcgtttacacctgaaccttcaccattcaaaaacacagcgtggtcaaagactccactacctgtgcactaaacaactttat

SEQ ID NO: 13822 - DNA, 463 bp, Arabidopsis thaliana columbia
ttctcagtatcaaatcttcgataggcccaaagatatttatctcccgttatatgggagggacaaatcccatcttgttccatgcctgttccttatacaattcataacgcgcccaatcacttgtctttataatcaccttttcggctgatgtttgacagagtcaaagcgaactaatccatgagtaagaaatcatgacgaactcaggtcaaagaactatactctatagttgtgatgagaaactcttatgacactcatataacaatcttgtagagttctcataacgggtcagtccaatactgtgttctcgaacacatatctatgtgattgactttaataccacatattaatgactccatgaaacttagtcatcagtcacctcacatactagtcattcttagttattaatgtcccattttaataaccttgactagggacttaataagaagttgaagtttctacatatcag

SEQ ID NO: 13823 - DNA, 1253 bp, Arabidopsis thaliana
ttacatcaagaaggtgatatattacggggccacaaagccaccatgcagttggtaaccctaacaaaaagtcttaaagatagatgttttaattttgtatcgtacacaaatatcttgagtacttaaaggactggcatatgtcaataatctatcaaggcagccggctaatgaaattgtgggaataatattaaaataggctacatatcattccaccataactagaattaaaatgatgggaagaccataccgaatcaaaaatataaacgacatgaagtaatttggatatctttcttaagtataacaaatacgtttgcatatattttctaatttaaaataattgttcgacttttttttcgtcggtcgattgaaaagtgaaatatttgccaagagtaagaatgtaaaatataaggttaaataattaatcaaaaaggaaaaagaacagataaggttaaaaagaggtggtcacaacgtgagaaacaattgattcgttatagtatatagctaggtcgactaagaaaattacaatgtttcatttgttttcttatttagagaattttggagattccagaattgacacaaactaaaacgacacgtgaccaaccattcgccaaacctttcactaatcctaaccgtccatctttatattcttagatccaacggtgtaaggttaacatcacagcgtaattaagcttttcacataaagctccacctccacctctatgattcaacagtcgacagatcgagagtactccaaatcggaaaaaatggtttcgtctatgatttcgatcaaggcggcgctaatcaccgccggaatcgtggccgtgtctctgtttctgaagtcctctgttcctatcgcagtagacttctctgtatcacgattcccgatcttttggagctcctttctctcgtggctgaaaccgccgtatcttttcgtcgccatcaacgtcataatcaccattatcatggcttcttccaagttttatcagagcgttggagagcaagacggtgaagacgacgagattttactcggtggcgaatatacgattccgaatgtcatcacccaagctcctccgcgacggttggttgatctggacgcagattttgattttgtggcgacggttcagtcgccgatcctcgttgcggaggtggagatattggaggtcgtgtttgaagagaaggagatggcgatttcaggacagaccaacggtggagatgagtttgcggtgatgagatcagagttgaatcagccgataatg

SEQ ID NO: 13824 - DNA, 516 bp, Arabidopsis thaliana
caataccaatttagtgacggtctacgttgcgacagtgaatacacatgcaaataaatcatctccatttctcctaaagctgcaaccacagacctcacaaaatccctagcacctctcttataaccaggatcatctcttatgcaaagtaagatgagaccaaaaaacaataagaaaaccttaattcttttaatcccacattaaacccataagtatattttttcacatacttgttcagatgaacttatgacttttcgaccattgtatgttcttacccataagcaaaatataacaaacccaaaagaattcaaacaccaaacaaacacattgacattcacattgacaagattaaacaccaacgtgttgttggcttagtggtaaatctccgaggtggaggtgctaggtttgagataccttggaaaggatctttttgaacttctaaatattccaaaaaaaaaaaaaaaaaaaaaaaaattgacaagattaaacaaataaactaataccataagcttttgaagttga

SEQ ID NO: 13825 - DNA, 460 bp, Arabidopsis thaliana
gaaactttcatcttcagaaacccggttatactttaacaccggtatcccagctcgttcctaaacgttggtcgggaagtgaatctgatcgtgtcgcaaccgagagatttcacttcaaaacccagtatctcgcactggtaaataaaacggttcggatctaatcaaagattctaaccaaaaattttgcatttcaaaaacttttggataaagccatcctggcgcaggttctacaaatctttggataaagccatcctagcataagtactacgaccaaacataataacaaaaaaaaaaaaaaaaatccctcctcgagtccctagtcaagctcctcggatgggcggttgctctcggcaagaaggagacttccggattggtcagtacccccacctcgtcggcaagagactcaaccgacctatgaccacccagactcagaggagcgggcttgagaagcggttaatgttag

SEQ ID NO: 13826 - DNA, 364 bp, Arabidopsis thaliana columbia
taatccaaagtcgcgttcgttggagaccgagtcaagctctggtctggtctggtgaggtcgtcgtcttcatcggatgaaagtttctgggatcgataagcacaacgatgaaatgggcaacattgcttaaggacatcaagtagaaggttctgatgagctcaatcctctgactccgagccctttcccgttgacctaactgctccgccctcttcttcatcttcttcctcttctccttctgttacttacccctcctcgacttcgcttcatcacttcaacatctctccttcaaagtaatctcttcttcttatctcttctgcttttgcttcatctagttccgatgttgcgcatcgctgctgctagttatagc

SEQ ID NO: 13827 - DNA, 394 bp, Arabidopsis thaliana
ttccagctagaactggtagcttgattgttctaagagacatggttgaaccgcttgtgaaagccaccaaaggggatggaggtcccactatgtctacccgactaattcccattctttccaaagtacctagaaagattaaatcaaccgaactaaccgtatcgacgagaattcttgagacttcaaagttagccacgtccagtgtaatgactagagcgtcatcatgaggtctttcaaggtgtcgcgtttctttcccgtcaaatgatattgaagcgccttggtagttaacttcttcactcaaacttgatttaagtagaacatttcgcctatgctttttgattgcactaatagaatctcggcaaagtttggagcctcaaggattacattgatcttcccttcg

SEQ ID NO: 13828 - DNA, 558 bp, Arabidopsis thaliana columbia
gaaaccaccaaacgtttggattttatctaaattgatgtacataaagctaacatgattttagtataaacattataagcatcatggaaatcaataagctaacatgattttagtagaaacattatcagctaacatgaattactaaaaacatttattttattttaaggaaaaacatacaatactaagattttttataacattttttctttgtaacattataaattgttttagtttctacattaattaaatatataaaataaattcatttaaataatataagaccacggaatctttgattaactgctgattattggccactgattaatttccgaccccatcaatagatgagatcagacatacacaacttaagtagaccaaaaaagcggttggtgtaagatcccaaactcacagattcccaaataatagtaatactcttcctcttctcaactctcaccagtcaccagcagatcatcggagatgggcggagacggaaaagttttcacttgtccgaggtttccagcacagtagcgccaaggattgttggatcgtcatcgacggcaa

SEQ ID NO: 13829 - DNA, 390 bp, Arabidopsis thaliana columbia
gaagtcgtctaaggacaagaagtcgatgaggagagctgagaaggaaagactcagagaaggtgaagcagctgatgaagagatgaggaagctcaagaaggaggctgctagtaagaagaaagcagcgaccacgggtacttcgaaagacaaagtgtcgaagaagaaagatcattctccacctcgaagcctgtctgatgaaaatgaccaagcagacagtgaagaagatgatgacgatgtccagtggcaaacagatacttccagggaggctgctgagaaacgtatgaaagaacagctcagcgcggtaacagctgaaatggtgatggtgtctacagttgaagaaaacaagccagtagctgaggtgaagaaggcaccagaacaagtgcatgagaatgg

SEQ ID NO: 13830 - DNA, 474 bp, Arabidopsis thaliana
aatgatgttgttgctgctgctgctgatgatgacgatgctgctgatgttgacaatgatgctgatgacgacgatgctaatgatgacgatgatgatgatgatgatgatgatgatgatgatgatgatgatgccaatgcctatgcgtctgcctctttatcagatggaactttccctaaatgcaagtgttgtcggaaacgtttagaaagggaattctatcattgttccatctgcaaattcagtcttaacgggaattgctcaatgagaccagtacctcccaatactatctcagagttgaaaagtcatgagcacacgctcaccctcttccctatacgactccctttgccatgtgatgtttgtggcttgtctttaagcgacgctgaagatcttgtatactcttgtctcccttgcagccacatgagtcacagatcatgtatctatttacctcgtgtcattcagatcacccgtcactctcatcgt

SEQ ID NO: 13831 - DNA, 616 bp, Arabidopsis thaliana columbia
tcaacaagaaaatcatcagagtaatagaatttatcttccaagttagagaaatgaagtatcttccaagtgaaaacattgtttggagggttggatatgaatgtgactttctcttgtacttggaccgctgtgccgctgaagatctcagcaccaaaagaagcaatgtcctgctcaagataaccttcgttcgtgtcaaggaatgttgtaagaggaatcaattttccgtatccccactcttttttcgcatcattgtatcgtttcactattccatctacaatccacaattttgcaaaaacatgcaagtcacaatcaactcatcggttcatagaaaatgttaagacaaatctttgaaatctacagtcacacctttaacaatcaaatacttgcgttgcttcccattgtagacaaagagtttgagttcaacattgacttcccagccttttggaagagattctgtctcttcgatcctcacgtaaagtgaaatatggttatttcaccatcgttttgataccattaacatcaaaactaacacctgattcatttttatgtcacatcaaaataactcaaatatatatctgaaaagtgaaaaaccagtggaagtgtagtctttacatttgta

SEQ ID NO: 13832 - DNA, 565 bp, Arabidopsis thaliana columbia
agattatcccctgcaggaactctgctcatatatacaagaatgtttcatcggtgagttagcaacaaagacatatatgccacataatccctgtcaatagtttacggacaacattttaaccgattcttcttcttggtgatttcaagggaataaaacctgcttcactctccatggttaaagacccagaagtaaaacagtttattgagaaatgcttacttcctgcatccgaaaggctgtcagcaaaagagcttttattggacccttttctgcaactaaatggtttaacaatgaacaatcctttgccgcttcctgacattgtaatgcccaaagaaggcgcatttggagaccgttgccttatgtctgaaggtcctcctacaacacggcctagtaaaaccttgtcgatagatcttgatgaagacagtaacctgcctattgttacttttagcgacaattcaggatccaggtgtattgaggttagacgcgcaaagagagggaatttctttgtcctcaagggtgaagaaaacgatgagcagtctgtgtccttaattcttcgtatagtagatgagaa

SEQ ID NO: 13833 - DNA, 548 bp, Arabidopsis thaliana columbia
cttatccattagctctaacttatctgataaccattggtactaatctctgagtttttcggttggtgcgttcttgtgtacgcaaatcaagtattgacagattgacgaggtccttatcttttgtgattcttgtgagcctatacatacacatgaaacacagaaaagaataaaaaaaacaagaaaggagtaggcaacaaaaggaaaataaaaatttagacaaaatctcgaaagcaaaacctaatggtcattcccaagaactttggcaacgacgccaaatttgataagtgttcaaattaaccctagactactctttctctaataaaaggtcaattctaatacttagggacttatttccacaaagttcgttttgtgcacacaataggttatagtgtcgagattaagctaaacaataagtaagaaaataaaataaaacaaaagctagcaatagcagattatgaggatgtaaattcaagatattaaaacgttaggtttagggaagtctcagaaaatagatgattagtaaatctaataatgactaggtgatacactgt

SEQ ID NO: 13834 - DNA, 529 bp, Arabidopsis thaliana columbia
gcgctatgttgttgagttgcagcagagactaaagactagtagtgtaggtgagatgtggcagcaggaaaattcccagttgagtaggaggaggagcaggagttttgacaatgcttttgagaattcatcccctgattatttacctttcgagtttagagctcttgaaatagcccttgaagctgcttgtacgtttctcgattcccaggttagtaacactttagcttcgattttgtttccccctcagaaaatatagactaatattgggcttggatttgactactacacgctaagttgatttaattttatccttctctataggcttcagagttggagattgaggcatacccgttattagatgagcttacctcaaagatcagtacactaaacttggagcgtgtgcgtagactaaagagcaggcttgtagcactgacaagaagagttcagaaggttcgggatgagatcgagcagctaatggatgatgatggagatatggcagaaatgtatctaacagagaagaagaggagaatggaag

SEQ ID NO: 13835 - DNA, 659 bp, Arabidopsis thaliana columbia
tgtgctttaggctatttcgtagtgataaatgggcctgacttgagttgctttgcatcgttaacattaagatcctcgacatggtctgtaatagtgtaaactctacaatgattctccaatccttggatttcaactctttggagagtttctctttcgggattgaagtagaagacataaaacgatttagatgcaaacttctccgacaaaacaatttcacatgtagcagtcatcccaacggcaagagaaatattgtagaacatgacttcatactcaagaaaagtgcagtcgtatttcgaccattcatgtttctcgacatcctcaagaacccacatactcaactcaaaggtacgacttccattagcgttaccatgtttccaatcaatcccacctaattttcccttataatttatcaaatgataaaagcaatctacgtcaatgaacgtgaatttttcaaatctaacatcaaagcaaactatcacaaaagacctttggttaaccaagggttcatcaatttggatagctaagtaatataaaaccccattgatgcatatcgcttcacaaaaaggatcatgagttaaggggcaatggatctttctccacctcattcttctagtcccaaggtcagaattttatgatcatcaggaccagatggataagcgatg

SEQ ID NO: 13836 - DNA, 494 bp, Arabidopsis thaliana
  unsure (1)..(494): unsure at all n locations
gagcattcctagctacaactggtgctaggtttgatgtgaagagagggagaatctctctcaaggttgtgattcagagatggagtttgacatggatggttcagagcttactaagcctatcaattgcattgcctcccgcacagacacacctcctctgatcagaatcccaccacagagccacacataacgctccaacccgtccagctcgcaaatgagagttgcagagcaacggtgtcgatcgacaccactaactctgtcgatcgacacccacgggtttcacagacagaggattctgcacactctcttcagtccacaccaattgaagatctctgtgataagttctcttctctctcttctccttttttatctttgattaattctttggattattcgaagattgcttcacaagataacaagcctagagttcgtcgaaagcttgtttctcctgttgtttttgcaggtgatgagatgagtgtcgatcgacacacncctgagtg

SEQ ID NO: 13837 - DNA, 609 bp, Arabidopsis thaliana
tagtaacgtccgccagtgtgctttaaagaagaatacgcgtgccagccggtgacggaggcaaaatcgccgccggattcacggatcaccggtgccgattccccggtgatggcgctttcatcgaccgatgcacccccttcaataacttcaccatcgcaggggataatatcgccagcttctaccagtacgatatcgcctttacgaagttggtcggcaggaactttgtccgccgcagcgccatatttcggctcacgcagcttgcgggcaaaggcagtttttttcacccctttcagactgttggcctgcgctttactgcggccttctgccagcgcctcggcgaaattagcgaacagtacggtgatccacagccaaccgctaatggccgcgctaaacagcgcattgccgggcatcgcaccgcttgccatcgcgatgctaatacaggtggtcagcagactgccgatccagacgataaacatcaccggattgcgccattgcgctgcgggtttaattttttcacgcttctttcagcgcctgaacgacaagtgttggttcgaatagcgccagttgtttacgactcatattcagtgctcactcaatatcatcaggagagat

SEQ ID NO: 13838 - DNA, 570 bp, Arabidopsis thaliana columbia
ttcttccttgtcactctgcaattcctccaaatacactgagaaggccggccattcggtttgggaagacaccatcttcaccagatccgaacagtctgtgagaaacacaacatcttgattgtcggcgccaatcatgcacttcatcgcccatagaagagcttccacttcggcatgtagtggggatagacttcgtctaaggtttgctgctcccattgttgacgtctctccaaattcctaataataatgattttaaaagacttttaatattcatttttgtcacttttattgctaatagtaaaatataattaatctgaaatttctgaacttgttattaggcacaaacttagatatcgtctccaatgaatttctaaatgatttttaaaaaaaaatcttgaaaagtattttgttaagagtaaatttaaaaaagagcatcaaacgggtgtgtccttcggaattactaattcgtttgtttttgatggttatatgtgtaacgatgataaacgctcgcaagtcgcaaaacttccacgtaaagaatgaaggtttctttaatagatcaacactttagtatatata

SEQ ID NO: 13839 - DNA, 626 bp, Arabidopsis thaliana
tctagtaacggtccgccagtgtgctctaaagaaagagcgtgagaagctggaaggctatgcggaacggaaagatatactgattgaacagcaggctgttatcgccgcgctgtaatcaaaacacagtgatgaaaacgaaggccggagcatgctccgcgttttttatctcttacagaaatggtaaagaaggcataactccccgtgaaatactggctaagaagcctttatctggttgttcttctttattgattaaaggaaggtcatccaaatcgcccagcaaatacgtattttttgcctgccagtcaatcatccatattttcagcagtggataagccagaccgcccgtaatcccggatatcaccaccaacgcacacatgcgataaagcataccgtggtacgttaaagttaagcgaaaacgaatacgcccatcattcagtgacaggttgctcataaaatggtttcgcaaagacaccgttaaataacttgtgctaacagcaatcccaaaataatagattaactgcgcgattatcattttacgttgcatttccataaattgctgtaaattctcaatgtcatcatttgcatatacagaactatcatacgcatttaatatttgatcgaagataata

SEQ ID NO: 13840 - DNA, 561 bp, Arabidopsis thaliana columbia
tgaacctaatcctaatgtaaatttgactaggaaattacaaatgaaagtttagtagtgaagcagtccaatttagtgattaataacttgattgagaattaggctaaacttgtgttcatgttcgagaatggttctttatgttgaatttcctgtctaatatttccattaatcatggatctctgaaataccctatggccgattgctttttatcatataagtttaatcgtttattttcttgcattttaatttataactctgaatactaaacaaacaatctctttagctttagctaagaacgagtcttgaaaatccttagagtatcttttgtccttgtggatcgacctcgaatatactatctaggggttaagtgtattcagtaattactcaagcaatcagttttaaagatggtcactctcgtttatcagttccaaagcattcttgttcatggacctgaatatcttaggcgatcacttgatgtattcttacaatcattgattcatgagttcaaacattgtggtcagagggagtagttgcatatgatgttctctaaggacatttttgtga

SEQ ID NO: 13841 - DNA, 659 bp, Arabidopsis thaliana
tgtttccaatgtaccaatgtgtgttcagcgcttcggtgctaacaataagagccaatgagcctcggtgagcctgtagcaaatcattagccaaattgactgatagaatcccagccgcacaacccatcccagacaggttaaagctcttgatattgcttctcatatggaatttgttgatcaccattgcacttagagacggtgaaggcgaatgcaaactacagtttgttatcagtatgtctatgcttcttgggcttagtttgtttttcctcaggagatcctcaacagaggtgaagatagtggtcatggtttctattttgaccgaggagagagatttcttgaggggtatttccatcagggaacgaggaatactggtttggttgcttaaccaggacctctcaagaatccgggcttggaagtcaatactctcttgatcaagcttgtcatcgaggtagatggtttcgataagagttgacattgggacgcggtttgagtcaggtgcccggtaacaagtgaaatcaagtaagtagactttgactcttgttctaattctttggtagatcagatgcactactagcaaaccggcaaagatctcaaagacagaaacacctgagctgagaagtgttgtcagctctgagatgctcatggagattggtgaaactctg

SEQ ID NO: 13842 - DNA, 503 bp, Arabidopsis thaliana
ccaaatggactaaatccatctcgtgcataagccaagatacacatttctacactagttagcaaagtcagaatataccgtttggaagtgtttccatgcctttgcatatgatgggtgcgttatttctcagtctgcagttgtatgttgagcatgccatctcattttcgccgcagttctttccgattgatataagcgtttcaatctatcaattattggcaagtaccacatctgtttatatggcactcgcgtccttctactagtagtctaatatttcggcttcccgcaaaacggacattcctgcagattttcatcatctccccatagaatcatgcaatagtcatcaattatttatgatggtaatcaagactcgaaaccaacttctgtatttcataataactctctaccgatatattatctggtggcaaatattccttaattaattcagcccatgaatccatgcaattttcacttaagttattacaactttaatagtcatcatcctagat

SEQ ID NO: 13843 - DNA, 561 bp, Arabidopsis thaliana
cctcctggaatgactgcaagaaagccttcttggctaagtttttctcaaactccaggattgcgagactaaggaatgatatctccggtttcatacagacaaacaatgagactttctgcgaacatgggagcgcttcaaaggttaccagacacaatgtcctcatcatggtttctccaaagcttcacttcttagcaccctctacagaggtgtccctcccaagataaggatgcttcttgataccgcttctaatgggaacttcctcaacaaagacgttgaagaaggcagaaatctcgcctaaaagatggcagaaatccacaacaaggttgattgcactttcaacgatctgaatatcaaacttgaggcacttacctctaaggtcagatacatggaaggacaaacagcgtcaacttctgctccaaaagtaacaggacttccaggaaagtccatacagaacccgaaggaatacgacaccgctcacactatcaccatctgtcatgatcgagagctgcctactcgacatgtctccacatcaatcaccgaggacagtgatgttcaggacgggga

SEQ ID NO: 13844 - DNA, 481 bp, Arabidopsis thaliana
cctctagtaacggcgccagtgtgctctaaagcacgctggatctcgacatcatgctgtttggtaatgaagtgataaatactgaacgcctgaccgttccgcactacgatatgaagaatcgtggatttatgctgtggccgctgtttgaaatcgcgccggagttggtgtttcctgatggggagatgttgcgtcaaatcttacatacaagagcatttgacaaattaaacaaatggtaatttatttatattgcgaatataaatattttctgaaaatcatatctcatctctttccttaattacgattttagtttaaacatctctttgcggaaataatataacttcctataaataaatatcaatcccatctccataccctaaccaattgcacttgtgaacttatttttacttaattttgaattaagtaaatttaatttgttcaaaagcttctaaagtgcacaataggcgacctaatgaacaatggttgt

SEQ ID NO: 13845 - DNA, 722 bp, Arabidopsis thaliana
gccgtcgctaaccacctgcacttcatcgcctggtttcagtgccgccagtcgtggcttaatttgccatcgggacggtgaccagtaaaactccagatcgggattatcgggcgagtttacataggagtaggcgcgctggacgcgttcgccgtcgatttcaaggccaagcttggtaaattgcccggcggtaaacggaagcacgggggcgtgaacggtgagactaaacagggcgtcggtccagttctgcactttagtgactttgcctgttacccaatcagccatgtttttctcctgttttgattgacttgccttatcttcgttctccgaacaaaaaaattccagtcccgaaggactggaaggctcaatcgatcaaatcaatcagaggatgtgcacctgcatttccgggtctttgcgatccagatagtggatggactgaatgcggcgaatggtgcgtgacttgccgcggatcagcagcgtttcggtagtcgcgatattgcctttgcggctaatgccttccagcagatcgcctttggtaataccggtggcattgataatgacgttatcgctgcgcgccatatcgcccaggcgcaatactttaccggcttcgatgcccatcgctttgcagcgtgccagctcctgctcgccaatgcgacgattctcttcgttgtcggctttgacgtcatgacgcgccacatgacgaccgttcatgttgccatctaatgcgc

SEQ ID NO: 13846 - DNA, 525 bp, Arabidopsis thaliana
  unsure (1)..(525): unsure at all n locations
tccatttgtcatcactttatcatcatatcatcactgttttataccatttcacatcatttgtcatcactttgcatgtttaggatagttttgcatgcatgttacatatttgcgttgatttcaggtgatttggagctgttgacgagctatctggaagaagcggacctgatcatgccaaaccactcgacccagaggtcgagtaggagcttcaagatctcaagagaccactcgaccaccaggtcgagtangaggacatcaccacttcacttcaccactcgaccccgaggtcgagtgccctcatctccatcaccagaccatcactcgatcacttcactcgaccatgaggtcgagtgtcttcacctctatcatcagaccaccactcgacctcgtcactcaacctggaagtcgagtatcttctgacaccactcgactgcatactcggtgacaagcttcagatccttcttcattccgcactcaaccagacacacgagcacaaggaaaacaagaaggctccagctattcactcga

SEQ ID NO: 13847 - DNA, 348 bp, Arabidopsis thaliana
gttcaagtacgatgacatgtcttggtcacttccggttcttggtagatttgtgttgatctcttggagaatcttggttaagacgttagggtttttagataaattccaaaagaaccaagtgagtgtagaggccgtggaatctctcccagctgccatgaaacctattgtgaagtccctgaggaacttatcatgactaggtttcaaaacctcgtacttggttgcatcaagctttatgaaggatgttaaaagatcctccctttctccattagagttgtatgtagtcccttgtgatcctagctcttctctctttgctgctaatatgtttcacgaacacggtcaaaagtggcatga

SEQ ID NO: 13848 - DNA, 511 bp, Arabidopsis thaliana
ggccagtctcttacgttcacgggtattgtcattgccggtatgggcttctttacggacgcgtacgatctcttttgtgtgtccttggtgaccaagcttcttggccgcctctactacttcaatccaacgtcagcaaagcctggctcacttccccctcatgttgcggctgcagtcaacggtgtggccctttgtggaacccttgccggtcaactcttcttcggatggcttggtgacaaactcggacggaaaaaggtgtacggtatcactttgatcatgatgattctctgctcagttgcttccggtctttccttgggcaattcggccaagggtgtcatgacgactctttgcttcttcaggtacaatttatttagccacaaacctaatatcacatacgtcacagatacaagctcgagagattagtcactatttcgacctagattatggttacttaagatactgatatctagacgattatatataggttttggctcgggtttggcattggaggtgacta

SEQ ID NO: 13849 - DNA, 527 bp, Arabidopsis thaliana
  unsure (1)..(527): unsure at all n locations
tcataaacatatcataaataagatccacattaataaaataaattttttttttttgcaggacgagttttgctggacgggtttggcaggacgttacttaataacagttgtaaactataaaataaaatattttttataaatagataaaatttgcaaatttttatatatactaactttaaaaaataaattatctccgcggtgtacccggnnttaaaatctagtttatgtatacaaatagagactaataaaataaattatttactcacaaattagatgtcgatcatattatttcttaaaatgtcaggagctctctttcttctctcttacatatctttcagagagacaacttcttatctttaatcgctgtccgaattatattgtcggtttttgtgccagacgagatctgattttgctatcaacacggcttttccgttgccgtgttcttgccgttaacacgaagtagttgttggatttccatagagaggtggaggacgcaaacaagagcctacagatctcaaaggagaagagaa

SEQ ID NO: 13850 - DNA, 610 bp, Arabidopsis thaliana
gaggatactaacggccgccagtgtgctctaaagacaggatgccaattgacgcgatcttgacgtttttccacggtttcatgtccaccgcaaacgcatctttgaaggtgaacggcgtggcgcgcggtttgataaaaccgatcaccagcatcacgaccacgttgatgcagaacgtacaggccagcacatagaggaaatggaagtcgaacttcaccagatagttgatggtgatgtagctgattatgccaatccccatcgctacttttgccgccagcgccgggatgcgcgggaagaaaaagcccataatgatgatggtaaccagcggcacgttgtaaatgccgttgagctgtttcatcgcagctatacagcccctgcggcgcgttggcgatccacggcgcgaccagcaccgaaacgatagcgataaagaaaccaaatttgcgcccgacggtgaccagctgctgcggctcggcattctggttaatgatgcgacggtaaatacccatactgaataacgtactggcgctattcagaaagccgttgaaggtactgatcaccgcaccaaataacactgcgccgaagaaaccaccattggcactggcagaacgttattgac

SEQ ID NO: 13851 - DNA, 545 bp, Arabidopsis thaliana
ctaatgaagtgaaagaacctatcaagattgtactgccctctataatctgtttcttaactaacctgttcatatcaaactacatagtaagatcatcaacattcagccctatccttccttttcgaacatcaataatggctccaactgtgtgcaagaaaagtcccccaaggattaatgggtccttaggttccttctcataagacaagaccacaaaatctgtggaaatcatactagtcccaatcatcacatgaaaatctgtaaggataccaagtggaatgcaggtagagcggtctactagtacaagagtgatataagtaggctcaagatttgaatacccgagactcatagctacagagcgaggcatcagatttacactagaaccaagatcgcatagagctcttgggaaggcatagttattgatagttacgtcgagtgcaaaggtttcagggtctgacagttccctcggggtccattcctaaatgatatcgctgccttgctctaagatcatcataacactacactcattcttattgtaggagagagatgaa

SEQ ID NO: 13852 - DNA, 593 bp, Arabidopsis thaliana
  unsure (1)..(593): unsure at all n locations
atgtccttgctagcttgaatagcttcattatgttctttctcagccgctaattcagctaatcgagtcttctcctgctttcgcattagatcaaacacctggtgaacacaataacatgtaagcaacgtctcaaaacacaagaatcaacgactctagagcttgttgatttctcgaaagagattcaattatcacctgtttggaatgaggagagctattgatttcacgaagagctttagcacctctttccaatgactcaggatcgaaaccagatcctttaggctcatcggagtcaggtttagtctccgatttagaattcgaagaagacttatgatcggttggagattcttctgccggaggtgaagaagagaagaaaggaaagcgaaatcgcgagtcagcgtacgcnnggttctgtgacatcgacattgaagtgaacgcagcagctatcgccgccgcggaacataatctagaagcagccattgaaatacgactaaaaagcagcctcctaaaccccaagcaagaaacaaaagtccttttacaattcaaacatttcggaatgagaaaatggtactctcaaggttaatagaaatgattgtgca

SEQ ID NO: 13853 - DNA, 612 bp, Arabidopsis thaliana columbia
ctgctttttgattcgagattgattttttgaagactttgttagccattggtataggttgattatgtggccaattgattaccttctcttaagaactcaaatagttattcattgcattgaataagacgatgcactcttttgatcgtcaatgaatgaaaagcttagttttctcagaacatcagctttgatttgtcgaagatgtggtgtgccctctttgtttcgagcttaaatgctcacaacataccaataatctatgtgttatgaattgcatttgggttttcactaatgatttactcccaggggctctgtttctatgtgatgctgtatagtgctttcctgaacaaacgagagatcaagacgacgtggatagttgggtgaacaaagaggacaatgtgacttgtaggtttgactcagatgaagacaccaccaccaccggactccggattccaacacaagctcaagctatcgttgaaggacctggttcacttgctgtgtcggagctacaacgagtccctgatgtagattatatacaagtaagttaatctaaatttgactgcgtagatgatggaagaccaaatgttttatcagtcttttaggttgtaccatatgcgaatt

SEQ ID NO: 13854 - DNA, 575 bp, Arabidopsis thaliana columbia
atcataatcaccaaaaaaagacatactcatccaatcaacgccttggtcagttctccaagtaggttgcgtaggatccacgtgtttgatactcttcacgaaaagcgagctatagtagtttataccaacgtaatcgcaagagcctataagtttcttagattgttctggtgtaaaactcggtaatctatctccaactgatttcttcatcgtttctggatagtctccacaagcagtcggatgctgatgcctgccaacatatcgccacaagaagacaatcaaaaacggttttgtgaacttgtgcctcaaagctaattgacccatctatttatatgtagattcgtaatgaagattatttacttgactttttagtcatgacttaccaaccaagcatgaagtccatagctcgattacatccttcgacatcatctggatcactcggatcatatggctcgtaccaaagtggattatgcgcaatcccaatttgtccgtttttaatctgcattgtattcaaatcagatcaatacaacagaacatagtattggaaaatgacgaatattatctattaagggaaatttttt

SEQ ID NO: 13855 - DNA, 573 bp, Arabidopsis thaliana columbia
tttggttaacttgtttcatcttaatatgtagatgaatacagaactcctcaaggaaaaagcagaaatgttagaggagtatttcagcgtgcacattgactccagtgcaaatttgtcaaggcttcctgtgatactcgaccagtatacacctgacatggatcgtgttcctgaatttttactatgcttgggaaatgatgtgagttacgcgattactatttgtacaattatatccactattcgtgcctactgaagtgctactaatcatagtaatagtgggttctaatgtcaccctaacgtactgtttaggttgagtgggaagatgagaagagttgctttcaaggagtttctgcagctattgggaacttttacgccatgcatcctcctcttttgccaaacccatcgggtgacggtattcagttctatagtaagagaggtgagagctctcaggaaaagtcagatttaggtatgtaactcctctagtggacaatgttttcgcttttggttcctgcatttgaaatggatgagagcatttaattttacattcaactgttgcagagggtacgtcgatatggaggc

SEQ ID NO: 13856 - DNA, 385 bp, Arabidopsis thaliana
tagctttcgcatgatgcaatgtcgtgagatccactttgataggttgccctaatccctgaacaatacccaacaggatcgtttcgtgatacagattcaaaggaatattcgacaaacgaacccacactggcgttgttactatctcattcctcaacggatcatagtccggagaccaagcttgcaccattaggtggctcccaaacgctctccatggtccaccggtaagagccaccaagtattcatcttccagatcagtgcgaatcataaagaactgtcttgggagatccaacacatgcatccctccctttggattccacatttacctcaatctcttgttcaacgctggtaacgctatgtgtctcccaaacagcttgacaataatacgatg

SEQ ID NO: 13857 - DNA, 484 bp, Arabidopsis thaliana columbia
  unsure (1)..(484): unsure at all n locations
nnnnnnnnnnnnnnnnnnnnnnctaaagagccacttagggcagagcgagcaattcatgcttttttaggatggttgaaaagcagggatatagttcaaccatccatgaattaccttttatttattccccataatgatattaagcgttttctgatcgggcaaccccacggcctgttgtagcgtattttccttactcatgtaatagatagccggcgtgacatttgcccccagatcgtccatcagtttctcattgtcacttaacactttcatttgctctgtacttacgtttgcaggcacgtttagcttaagcttgccaccagaggcttcatagtgttgccaggtttttgcgggatctttggaggcaagaattggtgatgctgtcgccggtctttctggcttgataacccaaccaacaatgttctgaattgcactgtgccagaatctaccacgggcgctcctgctgccagaactgtttagaatatgggca

SEQ ID NO: 13858 - DNA, 566 bp, Arabidopsis thaliana columbia
actttgccataccccaagcaagctagctccttttatcatcttagcaaagttcatgattcgcacaacattgcttttacttgcaaggcttggggtattagagccactgatctcaaccaaggagttgtttatggagtgaagactgatgagacagagatgcatgaggaactccgtaaccgactggattacgatgctgtgtttggtacagcacttaaccggttctgtgtgcaagctgctgttggtcacccacttacagtttatggtaaaggtggtcaggtaaatgactttcttgatctgttttcacgtgaaatttcaatcgaaaaatttgaggttttgattgaagtttttccctttgcagacgagaggctacctcgatataagagacacggttcaatgtgttgagatcgctatagcaaacccggcaaaagctggtgagttccgggtcttcaaccaatttacagaacagttttcagtcaatgaactggcttcactcgtcactaaagcgggtcaaagcttgggctagacgtgaaaaagatgacggtgcctacccgagagtggggcagaagaca

SEQ ID NO: 13859 - DNA, 612 bp, Arabidopsis thaliana columbia
cggtacctctagacgatccccgtgttgatgggtgaatgagtactgatagaacaacacatggaataacctgcaaccatatttaaaaactcttcacaactaaacacttcaacaatgaaactcaaagtgattagcaaaggaaatctaacaaaaatgatcacatatggaaactaatggaactaaaggttgctactttataacccttttcaaatatatgattcacattcttcaaaaacacaagttgagattctcgaaaaagaaccaaaaaaggaaagaaagaaagaacaacttacgacgtagtagatagcaaaattgtctttgtcgtccatataactagctttgagcttaaaacggatcatatagataacaaaaagtgtagtcaccaatgtagccgagtcaagtaacgtgtgaatatcaaactccatcacaaaactacaatacagtctcaccgccaaaaacagagctgttagctcttgtgacttgagagataatcctgtcaaaacatatcattcaaagattgcaactttgtacgaattcaatagcatcaaacaaaccctaattcgaaatcgaaacagatcaggggaaaatcaaattcaataatcactaatccactaa

SEQ ID NO: 13860 - DNA, 593 bp, Arabidopsis thaliana columbia
taccgagtgatttgttgatggtggatttaggtctgaaccgtacgatagtattaaatacaatgaggtggtggaaaaaggaaaagacccaggttatgatgcgagcttgaggctctacaaagctctcaagaaacttggtttcactatcattttactaactggccgagacgaaggttatagaagtgtcaccgagaaaaatcttcgggatgccggttatttcggttggaaccgactcctcttgaggtaaaaagctataccaaaccacttctcttgttttgtttaccaatctactaactaatttactaaacttatgaaccggtaaatgcaggggtcaaaatgatcaagggaaaacagcaacacaatacaaatcagagcagcgatcacaagttgtaaaagaaggctacacaatccatggtaatactggagatcaatggagtgacttgctaggttttgccgtggcttctcgttctttcaaagtcccaaatcccatgtactatgttgcttgatcacatctgccattgatatattgcatgataatttatcatttatgtatgaataaggatttatgaatgtatccataattcccgaatgtagca

SEQ ID NO: 13861 - DNA, 649 bp, Arabidopsis thaliana
tcatcattacccgtagaaacgcattaaaagaagcttgaaattgactataactagtagtagcctagttagtaggactctcaatttatgattaaaccggttttcgataaccgttttcgataaccggtttttcagaaatgagtgtgattgattcggttagcagaggaaaaagagagaggtaggagaaagaagataatcgccgttgctgacgtcaccgccggtaatcaaaaatctctcctttaaccgtaatttctcttttaactttaccaaaaatccgatccaacagaaattcttatcctaagcctctttctccaccgcgcacgttagcctcctctctttcccactccgagatggagacgacgccggagactcagtcgaagactcaccgtctaccggcgggaagagaggattggtggagcgaagacgctacggcgacattgatcgaagcttggggagatcgttacgtcaatctcaaccggggaaatctccggcaaaacgattggaaagaagtcgccgacgccgtcaattcaagccacgggaatggccggccaaagaccgatgtacagtgcaaaaaccggatcgatacgttgaagaagaagtacaacactgaaaaggcgaaagctttatcgaattggtgcctctgtgatagact

SEQ ID NO: 13862 - DNA, 1014 bp, Arabidopsis thaliana
ccagagcgaaaagatatgctaagaaggctcatcgtatgtatccaaatctcgttggtttggaacaagtgttgataatgatcgatgtttatatctctgcaacaaacaagatcaacggagaagctgattggtacagagttctcggtgttgatcctttagctgatgatgaagctgtgaagacacgttacaggaagtcagctcttttgcttcatcctgacacaaacaggtttactggtgctgaaggtgcgtttcagttgattctagaagcttgggatctattgtctgataaatctcagagaagttcttatgatcagaagaggaaatcgaatcaagttaaacagagaacgagtggaatgcagaagcctaagagaagttctacgcctaaaccaacagagtcagacaagccagcttcttcttatggacctacgcctccacctgagcctaggcctaagcgtaggcctagacctaatatacctgagcctgatattcctatgcctatgcctactaggcataaacctaagtctaagcctgatatttcattgacaacggtgaaagttggaaccttttggacggtttgcaatagatgcaagacgtattgtgagtttatgagggctagttgtcttaataagactgtaccttgtccaaactgcggtaagtatttcattgcaaccgtgataccttcagagttagtcaatgggaggctagtcatcagattgagtccttgtaatcagtcaacatggaaaaaagcaagtgatgatacttcttcaacttcagcaatggcaaagactgtacccgaaagagttaaaagatggtttgaccctatgcctgagatggattcttcaacgcaaaaaattggtacgttttggacagtgtgcagtagatgcaagacacattgtaagttggtgagggctaatcatcttaacaagaccttcccttgtcctaactgcagtcaggaatttgttgcggccgagatgattatagaggtaatcaatgggggtccagtcataaaattgagtc

SEQ ID NO: 13863 - DNA, 428 bp, Arabidopsis thaliana
  unsure (1)..(428): unsure at all n locations
cagtgtgctctaaaggctgataaagcaaggtttggtgacacttaatggaaaagtggtgcgtgaactacgcaacactatgaagttaggtgacaaggttgaagttgaaggtgaaattatgtataaagaagacaaggtatatcacatgattaagaaatcacgtggtgccttttngagtgtaatagatgctaagggtagaaagatggttgtggagttattgagcactgtgaaagagcggatttaccctgtgggtagtctggactgggacatattaggactcttgattctgaacaatgatggggagctcacagctgagatgactgaagacagcaatgagattgatacggtttatgtagtgcgtgtcaaaggtgtggccaataaggataatatccggttattgagccgtggtcttgagattgatggtaagaaaa

SEQ ID NO: 13864 - DNA, 411 bp, Arabidopsis thaliana
  unsure (1)..(411): unsure at all n locations
nnnnnnnnnnnnnnnnnnnnnnctaaagcatgatgaggtgaaattccaaagccgacaggatagtctggaggacagaagagatcagtatagatgtgcattacgcgtactctgaaatgattactgggcacttcagaacatacctgtgaagcgcagtaatactctgctggataccgcaatcactcgagaagcaggtgtaccattcttgaagatcgcaagatcagcgattgtagatatgtgtgacggagatggagctaggcacaatcaggcgctggttacggctgccccaaaagcagcaccagctgtcatcttgatcgatgtaatcgcagctgcgggccgtgaacgcataatcggtctcggcgcacgtaatgacaaacgtgaacacaccttgaacgaactgaagatcgagatgga

SEQ ID NO: 13865 - DNA, 647 bp, Arabidopsis thaliana columbia
cggttattattagctatagatatagggagtttcacttcacgcccactggttattccataattagagtttgagtttaagaatggttcgataacaacctagttttcagtagatctactaaccaatagtttcctgagaataccctgtttctagctctttattaaaacgtttacaacaccaatcaatctgatgtctttttactttgttctattttattttcactcataccctgctagcttgatctcgatatttaactcattgtttgaacaaaaaaactacgtgaattcgatcctaaaatactgcaattaatctcttatttgagagagtaattctaggtaattttaaccatattaaccgcctcgggtgcagtcgcatcagcgggcagatcggccatccgagcctcagtagacgccgactcaatcggcattgtcgcctcgggtgcaagcgcatcagcgggcagagtcgcctcgggggaagccgcggtgagatcaacccgcctcggcaagacgcttctcctccatcagacgcctctctcgtcctcttttttctttgcgtaaactccctctgagtaagcttggtcgactggatgtctacgaagaactgggtcgatgatcaaggactcgagctagaagggaagaacacggtgaagt

SEQ ID NO: 13866 - DNA, 475 bp, Arabidopsis thaliana
cgccagtgtgctctaaaggttgctggagtggaagcagagaatcgctagtaaacgttctgatgatcgacactacgattttcccaacatagagagagatgcgtctgtatcatcacataggactcgtagagccagatgataccacaggtactagccctaccgcgtttactcagcataaccgtaattcagatcatgatgacttggacaggtatcaacatgccgaggattaagagggtatacctcatggtctaggccattcgttgactcataatgcgagcgctggagtatgctgccactagagataatgatcattactgctagtatagacgagacagtgatgacgactgagttcccagcagagcctccagatcccagcagctacgagacgggtagagttgcccatgtgaagttgggctggtaagccacagaaattacctacaatatccgttagtcggtgtgaacgcgctaacgagggtag

SEQ ID NO: 13867 - DNA, 570 bp, Arabidopsis thaliana
ctcgatccttagctgttataactgctcagaaattgacttctcttcagctcggccaagcttggccttcttatgactcgcgtcggctgtcgattcagtgacggggttcctgagcttgtgtgctgccatgaagcagatgcgagcatttttctgatttccccagatggttttcacgccgtcgctggtgggaaatttcaggcagagatgatacgtcgagtcaacagctcggaattgatttaaccatggtgtgccgataatcgcgttgtacacggtcggctggtcggtaacagagaaatcgacgatttttgttagggaatgttccgtaataaggcactttgagaaaaaagtttagacaaaacaggcactttccaaggttgagacacttttccttgtttttggagtaaaaatagaccattataccccaaataaactgaatcacgaaaagaagaataaccggtcgttggttttggtttgtaattgtgtgtccaaacacatgtagaataatgggttaattcggataaaatgaacgtgttaagatttgcggtttagatagaagttagtgagaaataatga

SEQ ID NO: 13868 - DNA, 496 bp, Arabidopsis thaliana columbia
cttttggtataacattgaatcactaattcatgtcaaccagcataaattatttgcagatacgtttcagcatccgaaactatttggaggatatttaaatatccaattcaacatagatcaactcctgtttagaaattatcttctcatttagaagcaaaacaaccagcttattttgatctacatgctaatattgaagatgttctagaacgattagctaatgaagactctcagtttatggcttgtctcactttgaatagaaaaaatgcggttggaaggaatggtaagcgtgccagatattgtttatatgctcaaattcctgcctatttcacatgggataaagaaattaaggcgtttaaaaagagatccaaccgtttttctttgggtcgtattcactatattccaaggaaaatggaagatgaatacttttttagagttctgctaaacattgcatgctacaagaacacagacattttacgatagatatttgcagaagaaaagt

SEQ ID NO: 13869 - DNA, 586 bp, Arabidopsis thaliana
taatcaaattgatcaggtacatgctgaccataattcgcatcattattaaaattactaggttgctcgacaccataatttgtattactagtttatgcgctatctctacaaccctctccatgacgtaaccagacatagtagtttgacataaatcctctattataaagatgcttcttgactacattaaattccaaatatatctcattgagtcacttacgacatggacagaatattgtaccgttctcacgagcaaatggttcgtttgtcgcttgatacatgaaactgcgcagtccgtcataatactctctcgtcacctcatcggtcgcttgatctctatgattgtacatccaacttcgtaatgtgtaaatttcatgttctccaccccaagacattataatttttgaaagaagttttgttttttgaaaatattttttttgtttgtaagtaaatgttgtgatttgagttatgatttcttagacgttacgtaggctatttatagatatccaaaaatatattgcgagggaacctcaagactgtttgcgacggatttgctaggaaaaaagtttttttgctaggaatttgcgaggga

SEQ ID NO: 13870 - DNA, 508 bp, Arabidopsis thaliana
cgccagtgtgctctaaaggttacgcaaaaattgctgctgcgagtaatatccccccagcatattcaccgttggacgatcggtaatcgccgtcgagctccactcctgacgagcaaaaaacgtatacgccagcgcgattaacgcaaacgccagccccatgccaataatccatagcttcccagcccacaaggtacgaaacaacccacgaatatccagttcattttcagcgtctacggccggtttcccaggcattggttgtgtcatcacatcctcatttatttggttaaattggggctgccacacgatttctacgcagtctgcgtttgacgcgcttaataaagcgagcaactttccaggcacgcttaatgcaatatccatagaggaagaatgctagcaaagagatcaccagcatgacccactccgggacagaatgagaatagtctgccagcacgccaatggaagctagcagtgctgcggcaagggtaatcacacaaacgcctgacgggaagta

SEQ ID NO: 13871 - DNA, 531 bp, Arabidopsis thaliana
  unsure (1)..(531): unsure at all n locations
tagtaacgtccgccagtgtgctttaaagctctggagtttgccgttgccgtggattgcgattgaagccgggtggtttatgaccgagtttggtcgtcagccgtggggatacaggacatcttaccgacatactccgcgcactccgctttaaccacaggacaactggctttctcactgatcatgatcgtagggctttacaccctgttcttaatcgccgaagtctacctgatgcagaaatatgcccgtctggggccgagcgcgatgcagagtgaacaaccgacgcagcaacaggggtaaaggagaaaatcatgtttgattatgaaacattgcgcttcatctggtggctgctgattggcgtgatcctggtggtctttatgatctccgacggatttgacatggggatcggctgtctgctgccgctggtggcgcgtaatgatgatgaacgccggatagtgataaacagcgttgctttagagnnnnnnnnnnnnnnnnnnnnnnnnnnnnnnnnnnnnnnnnnnnnnnnnnnnnnnnnnn

SEQ ID NO: 13872 - DNA, 521 bp, Arabidopsis thaliana
cattacctacagttgccgtctctcattcgctttctctcgaccgcaaaaccgcaaaactcgaagccacaatttcaatgtactcgactagtttactcgactggtatactcggccggtttagtatttgcgcttattgaaactaacatattgacgtttagttcgagtagtatacgcttcaggaaatcaatatgagtaactacagtggcgagtcctctatggatgcggattacaacgtcgaggaagctgagtcttggtcaactagaccggagagagagcaacaagcttatgagagtttcagagctgacacccaacgctcagtagctcgacgcaatgaaaggagggctgagattgctagaggaaaaagtgcaatgaccagtagatatgcattgatcgacgaagatattgacgtcgagtatgagcctgagtcatggcccagagagacgaagctgttgaacaggcctgatgaagttacagtggaggagtacatcagaattttcgatctgaacgacttctggggaatgag

SEQ ID NO: 13873 - DNA, 570 bp, Arabidopsis thaliana
atccctgattaaagagtaagatcagcacaaaaagagtgagttatctacatttctgatcaagtatgtcacatttttcttgtggattcaggttttagtctaccatgatcttctgggaatgatgcagcatccacatcacgctaaggtaaaatcctggaccattcatatatcatcatgcttcttcctgtatttatgattcattatctgatagtttccgctgtgttgcatccctatattttttcatttcaggttactccaaagttttgcaaacagtacgctcaagtaggagaagtgatcaacaaagccctcttggagtataaggaagaagtatccaaacacttgtttccaggtccttctcacagcccttacaagatctcctcaagcgacctggacggattcttaagcgagttacagaaattgggattagataaagctgcttctgatgcagcagcatcagctgaaaagatggatcattcagattcacatcttctcagtgacaaagctgttcaattctcgtagctcttcattttgagtaggttgaagaaataaaatcctttaataggatagttatta

SEQ ID NO: 13874 - DNA, 531 bp, Arabidopsis thaliana columbia
ggcatgcggttaattcatgaaaaggtaccataacactacaataattataaatatgtaatcaaaaacagaatcacaagaaaataaacatcgtttcttaaaagttcaaacagatcacaccatgaacctttcctctaacgaccaaccaagccaaggccgtatcaaggccaaggattggtcgactgatttgtgtgaatgttggatggacataaactcatgctgcttgacttgttggtgcccttgtgttgcctttggacgcatcgcggaggttgtagacagaggttccacatcgtgtggtgtgagcggacggttgtacatgatcatattcatgttgaccgggtatggaggaagcagtctctactcttgcttttaccgaaccaaacttagagcccaatacaatctcaaggagagaccttgttgtgactgttgtgtcacttttgttgcgagcatgcgctctttgtcaagagtataggaacttcaacacaaccgcgatttggacttggtcatcgggtggcatgggaatatggacgacat

SEQ ID NO: 13875 - DNA, 529 bp, Arabidopsis thaliana
gggctgtaatgatgtcagaatttgcaccaatttctatctatttagtgattagtctgctagtttctttgatcctactcggtgttccttttccatttgcttccaatagttctacctacccagaaaaattgtcggcctacgaatgtggtttcgatccttccggtgatgccagaagtcgtttcgatatacgattttatcttgtttcaattttatttttaatccctgatctggaagtaacctttttctttccttgggcagtacctcccaacaagattgatctgtttggattttggtccatgatggcctttttatttattttgacgattggatttctagccacagtcccgcagcgaatatttctcctgcatcagcggcagtttggaccacccagagtgccagaatcagcagcagtgtgatccctaagctatgtaatacggtcaccgtgcgagtccagaaagtctccgtttccggcagcaaaacagacagcgaaaaaagcagcggcgtgacgaggagtaaagcgaacatcacagaa

SEQ ID NO: 13876 - DNA, 477 bp, Arabidopsis thaliana columbia
atttcctcgtagcatgtccaaaatgaactcctgctctcatcatctcttccagatcgatgttccaatatctttttgtcatttctgttcacacttaggaagggtggcaccaaactaaaataaaattttgttccgagtgaaccttctcttgtaccgggtatggcgatttatgcatgaaccaatccattattttgtattgagtagtatctttgttaatgttagtaaactacgtaatcgattgagaattagcacgcacttgggcaccgtaattcggcttccggttcatcccgcatcgccagttctgcttaccaaaaatggcccacttggagctctcgattccgtgtgacggctcaacaaagcagccgacacgtcctacctatttaaagtttgagaataggtcgagggcgttgcgccccaatgcctctaatcattggctttaccgatagaattcgggtccgagctccagctatcctgagggaa

SEQ ID NO: 13877 - DNA, 673 bp, Arabidopsis thaliana
caacgcatgttctccctccgcggacatttctgattcggtcatggactatggttatccgaccctctttgattcgtaactccaccatcctcctctgtctctctggtggacgaggaactacttctccattcacaaacagttcagctacatttgcataacaaacattcagcaatgagtttataagctaaactgatagaatcaacaaaattttatgtacataaaccagagaagcccttagcaagttcaatctttcatacatacgaacaaatgcatcatcacagaatattgtttgcttgaaaatgcagttaagtttcagtgtttacttaagagtgatgcaaaccagactttgatcagacaagttcttgatgattatgattatgacaaaggacattaagaaaatgcagaacaaagttgatgatactacttacctccgtaatctttgaactctggatcaacataagagtccggaagcacgaacagaacaccaggaagtcctgaaactcacaaaagacccaattccatcaattacattcacatcatcgggtgctatgctacagtatcatacacaacaagtgttacaaaaagataccttcgagtttgtttgatgtccctcatcaatctcacagccaaacccactatacctctcacacgatacattatagatcttctttctagc

SEQ ID NO: 13878 - DNA, 594 bp, Arabidopsis thaliana columbia
tgagttttataacagttaaaaaagtataatttggtaatacaccttggcaacataataagaattttaatactagttatgctaaggtaaataaatgaaataaaaaagtctgtatgtatacatattcttcgcggcacattttgtcattttgagacgagagaaagagaaggtaatcggccacgatgacgatggcgacgcctttcagtggggctgcgaactctattgtggcggcgaggaccgttctgataacgggagtgagcaaaggtctgggaagagccctagctctcgagctggccaagaggggtcacactgtgataggatgcgctcgtagtcaagagaagctcaccgctcttcaatcggagctttcctcttcgaccaatcatctcctcctcaccgctgatgtggtaattgccgctcttccgactcccgtgcttgatttcttccgtgttctgtgtgaaatttgatgctagttatctgtaattaagaaactttctgggcgctgatgattgataatattttttgtccacaaaaatgtgtgatgcaaatgaattggaagttgccaagttttgataaagatagttttattggacttggatg

SEQ ID NO: 13879 - DNA, 532 bp, Arabidopsis thaliana columbia
tgtattttcattttacatcaaaatttggagatttttattttcacctccaaaacaaaataagattggagaaaaaaccaactctaagattaagttactactctattttggagatgctctaactaaactccttcctagatctaaaactttttaaatttttaagtaattcaccataccaaatccattttaatttttcaacgtaaccctttaattgaattcaagtgattcgtacaaaattcacatcatatattggaagtttttggaacatattttatttatttcttcaaatattattagaaaatcaattgtaaagtaatatttctaagaaacttgtttttcccctaagtaacattatgatgatcatgattattatcatcttcataatatctaatgactaaaaacaagctatattataaatcgagatctctcatcataaactcttccaatgttgccgtctcacggtggaaatgttgataataatccatgtgatccaaactttcatcatagctactattcccggagtatccctcggaag

SEQ ID NO: 13880 - DNA, 547 bp, Arabidopsis thaliana columbia
ctggacaaaatggtcagtggtcagggcagaaccgaggaggagggtatgcaggaagagttggttcaggaaacagaggtatgcagatggatggctcaagccgtatggtgagtcttaaccgaggtgttcgtacttaaagaggatgaggagaaatctgcagtgttgaccttagtctcaaccttttgttatgttttggattccttttggttatcaaatggttctttctaagagatgttcatcacattttctcgcattgtgattgtttattttctttgtgatattggcagttgttggaaaagacttttaagaatgctttactggaaagtttaataagtttttttttatgcgtcattcttgttgaaaagaagaaggcttaggttttttctcgtatgcttgcaggtctgtttttgttgatgtcttttactctttcatctttgtttgcttagtaacttcctctcgatgaagtgtttgattaatttcttatcaagaacatctgtgatttaatcggctactttcgtggagctagcaacaatgaatattgttgagaaaa

SEQ ID NO: 13881 - DNA, 555 bp, Arabidopsis thaliana columbia
gataccaaggaaagagtaaaactttaatgtatgatgttactaaaataatatctgcattgaaaggaaaacgtggtgaccaccgtatattcagactagctgaaaacttatgcatgaatctcattttatcactcagagactttttctctgtgaaacgggagggaaaagtaagtggtgttttcgaattactcactgtcccccttcttattttgtgcctggatctcaggtgtaaataattgttcttatgttatcatcactaggggccaactgaattcactgagacgttaaatcgcataaccatcatgactcttgctatcactatcaaaacacgtggtatcgcagaccctgatcacatggtttatctgcaaaccatgttggaacaaatactcgcgacgagtcagcatacatggtcagagaagacgatgcggcatttcccatcccttctccgtgaaactttgaaaggacgggtagacaagaggggcctatcaattcaggcatggcaacaggctgaaacaactgtgataaaccagtgcactcaacttctctcaccatctgctg

SEQ ID NO: 13882 - DNA, 183 bp, Arabidopsis thaliana columbia
caaaatggtgtggaagccatagccagccccatcaatggtgctagagttgtgctaaagctgagcaagacaattatctgtacgagaattggagtcccgagaactgtgatcagtgacggagggaaacattttatcagcaacgtgtttgagaaccttatgaagaagcatggagtacagcacgaggtc

SEQ ID NO: 13883 - DNA, 633 bp, Arabidopsis thaliana
ctagatcgactaagaatattggttcgatgagtgcttggaataagtttcaatacaagatgttggaaaaatgtggcaaggccatcgccacaattcaggctgtactgagttgttcatcctcaggcgccaccatggtgcgagaaaaccgccttgaagaagtggtttcaagaaggcatagagtttcaccatcaaggcaatctgcctatgagaacgagaggtaagtcgcccccaagctcatgcaagacattcatctcatgagcactgcgagctgaaaagaagaagaaaaacaagagtggttcggccaaggagcaaggaccttcttatgaccagcaggagatcactcaaccaagatgctcgacgtgatatcgagcagagtgtcgagcacgatctgtgggctcagaacgagcagatagtcgagcaagatcaatgggctcaagacgggcaatactcggcaatgaattgggatgcttaccacgacatcaacgagcaggaaaacacctatgacaactgaggtacaccacctcaaccattgtatatccatagcatttctatttttcttgtgtgttgtttgttttggtcttgaattttttctctgatttttattcacaagggactgtgtaatttaagtttggggga

SEQ ID NO: 13884 - DNA, 480 bp, Arabidopsis thaliana
catttatcaactcatttgaatcaaaaaatttaactcattatggttcatgggttgagttgagttgacccatgaatcttaaccgattttgacacccctaaacaggaggtacaaaagcgttctacatagagtattggtgaattccacaaagcctaggagatcagtggcgtcgatgcaaagctttcccttgatatccgtcgtgaagccatcaccaaagctcgtcgatgaacataatccaccacaatatatggacaccgagtttgccacttttctagaatacgttttctctcgcgaacctaaatgaaaattttcttgaatcatgcaagatcattatataagataaatgaaattaccatttttatgatgtttataaattaaggtgaattaaattttttaatagactacgtcagatatggtaatttaaaggaaagaaatacaaagcacacaagcaatatctttcatccacatgaacatgattgtgat

SEQ ID NO: 13885 - DNA, 575 bp, Arabidopsis thaliana
tgtcaaactccaaagcatagtccccaatctgcaggttaattgtgcttcttctcacatcaattatagcttcaacagtgtttaggaatggcctaccaagattaagaggatcatgtggttccttatcaagttcaaggacaacaaaattagtgggaatatagaaatttccaactctagcatgcacattctccgccaaacccattggaaattgcacagagcgatctgctagaatcaaagagatccttgacggcttgaaattggtgatgcctaggcaatttgacacagaaagaagcatcaaattaactccgctcccaaatcacaaagacatctctcaaacacagactttccaatccggcaaggtaaaacaaaaatccctcgatcaccaagtttcttgggaatagtagctggagggattgcactacaagtgttgaccatctctttccctgctaacatttctactacattagtgagctgagcttccttctgttgtctctgagactccactagctgagcgtgctcttctcctttggaaatcagtttaacccttcctcaatgctcctcttgttggacaaaatata

SEQ ID NO: 13886 - DNA, 519 bp, Arabidopsis thaliana columbia
agatttatcttaaccacaaatttcaatcaaaacattacatattttcttctgcatcgccacatcgtctaaaaaaaatccccaaattcgtttctcttcgattcaaaatctctccgcaaaaaatccccaaacacgatctcaaccttgtgagatttccaatcgaaatcgagaagccatggataacagcagcagcatcaattccaccgcttccacggcctcaaatctgagcacggcttctctggaaaagctagatcaagcggcgagctgggtcagcaccaccgttatttccgccttcttcgcctccctcgagcgttgctcatgcgttaacctatctacctccgatgatgacgatgaaggcgaagaatctcacaaccgtccccttgctctctccgccgctcctcacccagacgacatcgtttagattcccttcgttcggtaaatccttcttcggtttcgccttctttttatttttggtgatctagaaattgtatcaacttttgattgtacatgccagatttggtg

SEQ ID NO: 13887 - DNA, 525 bp, Arabidopsis thaliana columbia
  unsure (1)..(525): unsure at all n locations
accgcagtaatctgctccagcgcacgcgctgcccctatttttacgacaccaatcagccctgcaataagcgcctgcccgggagcggctgcgcggcgcttgaaggctttagccgtcagcacgcggtggtaggcgtaacgcaacctgcattgccacccatccgagcgatatggcggtcgcaatgcggttgctggatgcggtggtggaaaccatcacgccggaggaaagactcgcagtatcacactggctgatttttatcaccctccgggaaaaacgccgcacattgaaaccgccctgcttcccggtgagcttatcgttgcggtgacgttacctccaccgctcggcggaaaacatatctaccgtaagtgcgcgatcgcgntcctacgcctttgccctggtatcggtcgcggcgattattcagcctgacggcagcgggcgcgtcgcgtgnggcggagtagcacataagccctggcgcattgaggctgcggatgtcagctatccagggggcgcagcgtatatgacacgctg

SEQ ID NO: 13888 - DNA, 584 bp, Arabidopsis thaliana
gtaggatctctagtaacgtgcgccagtgtgctctaaagtttactcactccgtctggcgattgctgctatgggcggcagattactatcatcatccgattggcgatgtgctgtttcatgccttgccgattttactacgccaggggcggcctgcggcgagacgcgccgatgtggtactggtttgccactgaacaaggccaggcggtggatctgaacagcctgaaacgctcccccaagcaacaacaggcgctggcggcgttacggcaaggcaaaatctggcgcgaccaggtcgccacgctcgaatttaatgatgccgcgttgcaggcgctacgcaaaaaaggtctgtgtgatttagcaagtgaaacaccagagtttagcgactggcgaacgaactatgccgtttctggtgagcggttgcgattgaataccgaacaggccacctgccgttggcgcaattcatagcgcggcagatactttttctgcctggctgctggcgggcgttaccggttccggtaaaacggaggtttatctcagcgtactggaaaacgtgctcgctcagggcaaacaggcgctggtgatggtgccgg

SEQ ID NO: 13889 - DNA, 426 bp, Arabidopsis thaliana columbia
actaaggagcgatatgatgccaattccgctgtgaatatcagccaatcttcttgattgtcaatgataaaaatcaggtctaagcagtcggaagcaaaagcgccagaagtattgccaatcgaggtcatgcattccattgcccataacaaggaatcaaattccgcatgaagcggtgataagcttcgtcgagcacttttgagtccaagatgatggattaagtcttgtgtaacaattcgtaccggtttataatgatttataaatactaataatgaattaaattacgaggaaccgtgtaaacgataaattaaatctagatcataggatttgaaaataaatagatatttcgcagcagaaaagtgaactatattctatcaatattattttagcattctaagtattgtgtctctaccgatatcacacgcacacaaa

SEQ ID NO: 13890 - DNA, 592 bp, Arabidopsis thaliana columbia
gctaaggggtaagtggccaagcacgaaacatcaaggaaagatcgaggaagaactggaagagaaagaaatagttaagggatgaaatccaaagagatgggcaaggcaaaatgaacctgccgagtctagttcgaaatggggtcatccggggcgaacgaaaacgggaggaagttgccacgaatacatggctgattgcccatatgtgcccaaaaggtgataaaccatcaaagggcaaatgaaataactatttacgcaagaatgggcaaagatgggcaagaatgggcaagattgggcctcaggcgtgctgtgggcaaagtgtgccccgtcaggtgttaaccgccgtttgaccgtgccatagacgagtgcactggctaacttggagcccaagcaaagttgcttggagacgaattttaaaggattggagccgaagttaagtcccttggagccgaagtcttgctatccgcgtgtcatcgtcccgacgctgccacatgagtgacttcacgtgcaaacggcacgtgtactagctgattcaccctgccacccctatataagcttcattcggccttgagaattttcggagggagaaaggagagag

SEQ ID NO: 13891 - DNA, 430 bp, Arabidopsis thaliana
tctgaagtatagcttgcgcatcgtaaaataaataattatatttaccttgattttgtttgtatatgatcgacaaagtagtgctctgaaaaataagcaatcttgtcattgatatatgactcaacaattgatcctgccgcatatcttttgttctttacttttcctttcaactttttgaaaaacctctcaaatgggtacatccaccgatattggacactggacaggacctcccaattcagcttcgtatgggagatggataggtaggtgttccataacatcaaaaaatgatggtggaaagattttttccaagttacagattattaaaactatgttctgtttgagaatttgaaccacatttttctgtaaagttctcgaacataagtcccggaaaaatgctccaattcctaaaatatatatatatatatatatatat

SEQ ID NO: 13892 - DNA, 536 bp, Arabidopsis thaliana
gaggctacccatgcaaacactctaatagctaagcttcatgagtttggtggcagaagacacattcgctatagagaccttgctggattcatttacggtaaataaaagaccaaaccagctctcttaatctcttctctgttgttaccttcattggaatgatctctctttttatcaggtaggaaggcttatcatcttacatggggattgcaatatgttaatcttttcatgattaattgtggattcattatcctagctggttccgccttaaaggtagtaaaacattttcttctcttgattcttgatttcgttagacgagttagttaattttggttgtgtgttctgtttctgcaggctgtttatgtgcttttcagggatgatcataccatgaaactacctcattttatagccattgctggtttgatttgtgcgattttcgctattgggattcccatttatcggctcttggggtctggcttggagtttcgacttcctcagtctcatctatattgttgtggcaatcgtgctatcggttagagatg

SEQ ID NO: 13893 - DNA, 494 bp, Arabidopsis thaliana columbia
ggaaagactcacaactcacaaggcttccttttgtagggttaatcactcacaaatctggtttagcattacaaaataaattgtccgttcttattattaaactccggaaataaaagaaataaattcactaatatttctaattagcatcttcacaaaattcactacctacaacatctataaccaatacaacaacaagaaaaaaaaaatctaattgccaaaaaaaagtgtataattatttcttcttcaatttttagattgcgtttgaccagagacttcaccaaaccggcgatgatcatatcctctgtttctaataagttcagcgaacgtaacacaactctctgtctggctatgtcctctcgtgaccttaatctttacatgttctggtaatctcaatgtatacttatcttcttcctccggtttatttctcactatcgagtgtcccgtagaatgcgatctagagaatttctccggcaagttttgttcctttttgatgctac

SEQ ID NO: 13894 - DNA, 815 bp, Arabidopsis thaliana
atgtctggtttcccactcactgcagacttactactactcatcttcttcctcttcttcttatctccagaagcattgagatcatcagcaacctcatcttctccaacactcctatcgaattcatcatcaccaagagtctcagatacattactatccatatatctaacctcatgaatctttccattcttcttctttgtcttcacactcttactactactatcatcaacatcacttttagctaatccttcaccattcttaacttcttcaacacctaaaggatcaatcttgagctgcaaataaggcactgtctgatataatggcaaagataaactctcagataacttcaaatgcaaagatcttatgtatttccacctactaggcaaaacatcaacaacaccattcaaagtcgccgtcacattctcaacgatatcatcgctttccatggacaatttcgcaactttgatcgcactacaagacccagtcctcatgaagaacatagcagcaccacaagctttctcaatctgctctttccaattcatatgcttcaaatcaatagccacaggagtcttcttgctctgaaagaacttcttcccaatcaattttggcaacataggaatcactctccgatctgagaaaaacatatcgtatgaatcacaaagcttccgtttcgattcgaatgatccataatccgatttcagcttcgaaagcttaacaactttcgtgattggtatgttctctgatttgatattcttcttcgcatcttcctcggtgagaccactttcaggtctgtcgtcgatgatgagacagagctccggtga

SEQ ID NO: 13895 - DNA, 1395 bp, Arabidopsis thaliana
cagttttcctcaacacaatttctatgcctccgacctactttcctctccgttgggagagcaccggcgatcagtggtggtacgctactcccattgattatgctgccgccaacagccagtacgacctagtccgtgagcttctccgaatcgactccaataacctcattaagctcacttccctccgcagaattcgccgcctcgaaaccgtctgggacgacgattcccagttccacgacgtcgccgcttgcagatcacgcgtcgccagaaaacttctcgccgcctgcgacgaaggcggctcgccgggatccaagaggaacactcttatccgctctgggtatggtggctggctgatttacacggcagcctctgccggagatctagcgtttgttcacgatctcctggagagaaatcccctgttagtgttcggcgaaggagagtacggcgtcactgatatactctacgcagctgccagaagtaaaaacgacgacgttttccgtctcatttatgattttgcggttactccgaggtttggaacaggtggcatcgagcagcaaaccggagagattccggcggcttacaaatgggagatgaagaacagagcggttcactctgcttcgagaggaggcaatctgatccttctcaaagaacttctctccgattgttctgttgaacatgtcttggccttccgagacaaacagggctccactatcctccactcagccgccggaaaaggaaaaactcaggtaagtgtctccggccactgctataactaaaatatcaatcgatagatgaacaaaattacggatcttggtgattatgatgcaggtggttaaagagcttgtggcttcatcataccatttagttgacgccgtggacaaccaagggaacacggctttgcacgttgcagcttaccgtggccacgctgatcttgtggatgttctcatctcggcatctccatctttgatctccgccagaaacaacgccggagatactttccttcacgccggaatctccggtttccagactccctgcgttcgaaaggcttgacaagcatacggagctcatgaaccgtctgatcacttccgcagcctcgaaatcccaaggggattttgtaaattataggaacaatgagggacgcacggctcttcacttggccatctctgggaatgttcctctggagttcgttgagatgcttatgtctgtgaaatccattgatataaacatacgtgacaacgctggtatgactccgcttgatctgatcaggcagaagccgctgtctccaacgtctgatctcctggtccgacgactcgtatcagccggagggatgttcagttgtcgtgatcaaagcatcacaagtgtcgtcgcgtctcacttgaaggacagaggaaacttttacag

SEQ ID NO: 13896 - DNA, 533 bp, Arabidopsis thaliana columbia
gagtttcctagctgtgaattaattaagctgcagtcacttaatcttaatcaacaatagtacaatgcaattacttggattagataaaatatcgaattaggattaccgtttagattgttttttttccctcaagtttagtgtatttgatttagaaaggaattcaaatagtttatgagactatttagataagtaagataaccatatgtatgtaggcgagtattatatatttggtaccgttactatatatcgggcctaattagtaaaacattaggctttaatcaagtctaagtaataaagcccaccaggcccaataaagaaaatcgctagggtttaagtcttaagcacagaacaaggaggcgatgaagaattgaatctgtagtcgaaagaaaagagttgggaaaaaaatggacgcaagcatgatggctggacttgatggtcttcctgaagaagacaaagccaaaatggcctccatgatcgatcagcttcagctccgtgataggttcgtcacttagatcggtttctctgtttttcattta

SEQ ID NO: 13897 - DNA, 605 bp, Arabidopsis thaliana columbia
tgccctcacatctaatgttgtgatctccttaacaatccgtttattccaactctacgttagccggaatcaaaacctataccataacatgtgaaaccataatgctttctttgacactagaaacagtaaccctaatcaaacaaaaacctaattcccaaatccaatacaaccaaagagaattgcataacaaaggggtgagaatcgagaccagcttgttggattctttggctttatcaagttgcacagtccatacatcgttcgtgtgacaaccaatcacttgaccctcttctgccgccatttctcccaaatctgagaataagccaaaatctccgatcacctttttttctttcttccgttcatctttgtaacctatatatgaccaagagatattgacacaattacccctgcaaattcatggttactacgaaatgatatccaagtggaccggtgtctcaaatgcatgtactacacacttacacacgaaccaaatggctcgtatatatttttatttctattctaaacaaatttctagccacaggaattatgaaataaaaatatctgatgagatatattttctcaaccagataaaggttaattttaaagacgaa

SEQ ID NO: 13898 - DNA, 538 bp, Arabidopsis thaliana columbia
aagtgccaaaactgaagacctgcgaccgataaacaaactgcaagcgacacgaaactcaaccatgccatcttcgaatttgtcgctatgttcagattgtgcatttcttcttccctgtaatataccaaatgaagaagggttttgagttttgattcactctcatcctctgatcaagtgacttcaagggaagacaggttttgttgtcattacctgtcgcggagatagaacatctcatcgtggattccattcacggtttcaaataacttcttaacctcaaactccatcgtctggccaataaataaaacaagatccaaccataacaaggttaacaaaacattccttcaaaaactctgcaatctctttaagaggctatgttacatttcaagctagtcttgctctgtagtatgttaaagcctagtcctatctaccacatttcaagatagtaattttctgcgtctgttaaagcctagtcctatccaccttcatttagcagggaaagaactcctgaatgagctgaagaaatcgatggggttcaaaggtg

SEQ ID NO: 13899 - DNA, 815 bp, Arabidopsis thaliana
ccaccaaacatagcagacggaacaattatctctggtcgtggcccatcatctggcaaagttccctttacaataaaacaagaaagaagcgaaatttgaaatctggaggaaaatacagtgaaagatcatttggtctgcaatgttacccgcaagaacagcttagcctgggagtatatgccaaacatcaatgaactttcaaaagccattcccataaacgacgatgttgctcccctataaagtcctttgacctaaatatgaattcaagtcagcaaaacaaaaacccttgtatctggccaaacaggtgatgatggatctagtaagattccattgacactgaaaaatccagactttcaataactaaaactgtttgcaggatgctaaagtcttgaaaacataacaaaaagagtgcagtgaaaatatactccttcagtttgcaagatcctcgaagcacaatgcagcccatttttgtatctgagcccttgcacatctgtattatgtttctgaagtttcacctgacacaagaaacaaaagccaaaaccccaaagttagaatcattacttccaaacatgagtgatgccaatccagtgataaactatctaaaaatggttagcctaaaacaagaaatgatttttatgcatagaaagctcctaagcaaaaagaaaccatttaagtcccaaacagcatcagaagaaacctcattgagatatatgatggatggttttatatcttctttgcttaacgatagttttaggcatagaggtaaacaatcaacacataactgataagtgaatatatatcaatggtccagtgtagacact

SEQ ID NO: 13900 - DNA, 536 bp, Arabidopsis thaliana columbia
tccaatattacatacacaatccaaccaaacgattcgtatttcgccattgctaacgacactcttcaggggctttcgacatgtcaagctttggcaaaacagaacaatgtttcttctcaatctttgtttcctggtatgaggatcgttgttccgatccgttgtgcgtgtcccacggctaaacagatcaacgaagatggcgtgaagtatctgatgagttatactgtggtttttgaagacactatcgcgatcatcagcgatagattcggggttgagacgagcaagactttaaaagctaacgaaatgtcttttgagaattctgaagttttccctttcacaacaatcctgatccctttggtgaatcctcctgcaaatactaactctctcattcctcctcctcctccacctcctccacaatcggtttctctcctccattgtcgccggatggtaggaaatcgaagaagaaaacatgggtctatgctcttgcaggagtactaggaggagcattggttttgagtgtgatcggtgcagccatattttgc

SEQ ID NO: 13901 - DNA, 579 bp, Arabidopsis thaliana
gtcaatcttataagtcagataggttgatatggcatcacacaaaatcagagagatatacggttaaatcaggctattggcttgctcgaaagatgacgaatacaactggttgaggcccaaattgtaacatactaaaagcacaagcttgaaaggtcaaaactcctccaaaaataaaacacttcttatggcaaattgcttcgggtttcttagcagttacttcaaaattatcacatcgtgggatacagtgtgatataacttgtaaaatgtgtgagatggcagatgaaacaataaataatgttctatttgaatgctctcactctcggaaaatttgcgaattatccaaaataccaatggtatcagaaaactttcctctaagttcagaactttcaaatctagattatctttattagaggttaccacgccctccagttgggggagagaaaacatattgttacgcttggattttgtggttcatatggaaagatatgaataaaaaagttttcaaaggaatacaatctgaatctgcggatatattaaatcacgctatgagtgaaaaattaatgtgggaagaagctcagttgg

SEQ ID NO: 13902 - DNA, 582 bp, Arabidopsis thaliana
aaagttttcgtattttacaaacaaccagaagctggcatcaatttgtgatcaaccccacacattatccgtcaaattagtcttttgcagccgcgcggataattctggcacacttattgttagtcccaggtatagctgtgaaaacaccaatcactttggcaagtcacagtgaaataaaccactttgcctgtcattccactaccgggactttatgatgaaaactgttaatgagctgattaaggatatcaattcgctgacctctcaccttcacgagaaagattttttgttaacgtgggaacagacgccagatgaactgaaacaagtactggacgttgccgcagcattaaaagcactgcgtgctgaaaacatctcaaccaaagtctttaatagtggattaggtatttccgtattccgcgacaactccacccgtacccgcttctcttatgcttccgcgcttaacctgctcggccttgcacaacaagatctcgacgaaggcaaatcacaaatcgctcacggcgaaaccgtgcgtgaaaccgcaatatgatctccttctgcgccgacgctattggtatcgcgacgatatgt

SEQ ID NO: 13903 - DNA, 468 bp, Arabidopsis thaliana columbia
ttcgagtacatatcaacaagtgcactagctatgaatatgttactgccaaagccaccccttaatacatatccgtgaagttgtttcccaaggtgcaaggtggctaggtgagcacaagcaggaatcacacttgagaacgccacagcccctggcttaacctttgcggtcaccatttgcctgaacaatctcagagcctcattgtatctaccattctgtacatacccagctacaagcgagttccacgagataccatcccgacaatacaagcgagaaaacactctttcagagtcttcaatccgagcacttttcgcatacatatcaaccaaactactcccaatatatacatcactatcaatccctttcctaatcacatacccatgaatctctttccccttaataacattcacatactcagaaaatatcgggagcacactagacaaagtaaaaggatcaggcgtttaagtcagtagt

SEQ ID NO: 13904 - DNA, 536 bp, Arabidopsis thaliana
ggtgacataccagtcatgaatacatgatatcactattaataactaaagcatgttcgaagaattcaagaaagagatgagtatgagatacggatattggattgatgtcttactagtttggaattgaagtaaaagaaagaagataatggaatctccatctcaagaaggctatgctaaggaggtacttaaaaagtttaaaatggatgactcaaatccaggtgagcacaccaatagaatgcggaataaaattatccaagaacgaagaaggataatgcgtggatccaacaacctttaaaagcttggttggaagcttgagatacttaacatgtacgaggcccaatattttatatgaggacggattttttaaacgttacatggagccaacatgagctcatttcaaggcggcaaagaggattctttactatatcaaaagtaccataaacctttgcttgcactattgtacttctaatgattacaagcttgttgggtatacaggtacgagttggattggaggcgtcgatcaccataaaagtacaagt

SEQ ID NO: 13905 - DNA, 522 bp, Arabidopsis thaliana
cgtctttccaggtacgacgacgagctcggaagatcgcctctaaaactccttcgaactcgacgggaaaatccggactaggcctgtatcgatctgcaacaaaagaaaaagctatgagaatctaatcgggatcgacatatctttaccctatctatttaaaagaaatctaccaggaaactccgtccacatccttttcctccccgagaacggacgctcatacgactcgaggtcgaccctgacgtagaagtaatattcttcccagttcttgaagttactgactttaggaccgggaagaaagttatgctttgggcggttgttcacacccaatagccgggcgacctgatagctttcaacgtcgtcatttcctcaaaacaacgaacatttaccaggtaaccttcttcagcgccgaaggtcagagcggcaacaaaattgcagatcgccgccggtgtaagctgggagaacgccatatgacggcgattcagaaaggagatgatcagagacggaattggaaactagaggtgacat

SEQ ID NO: 13906 - DNA, 522 bp, Arabidopsis thaliana
gtaacgtccgccagtgtgctctaaagatagaatgagtgcataacaaactatagctgtacatccactacacagccacgaaggatgataatgaagcattgcctgtatgatcaatcgactttgtagagtttcggacgaaggtccgcagaatattcgcagtattaaataagtgttcattaatgcgggcaaaaactaatacaccgcatcaatgtaacatctctgcggtgtatgaagaataaccagaatggttaataggcgttagaccgcgcggaaggaaatctcgcctggaatgacttcaccctgccagtagagctgagctgcaacgcggtcagccagctggcggtagatagcggtaaattcgctctccggacggctgataaccgttggcgtacctttatcgagatcctcacgtaaggagatgtgtaacggcatctgccccagcagctgtgtatggtatttttcagccagtttctctgcaccaccggtaccgaaaatcggttcatggtgacacagttactgcaaata

SEQ ID NO: 13907 - DNA, 494 bp, Arabidopsis thaliana columbia
gagttatcttctcccaaacttccaatactgttttacatgtaaatcaacaaaatatcaataatattgagttaacacatatgcttgtgttataacgcctaacaccatttaaaaacattgcatttatctttttcgttaatattttaaatgacaaaatgatttttgggcatgcatgcatcttataatatccgtccctcattaaaaaatgatggatattatcacaaaatctccaattgaagttgataaaaattagttgatagtaatccatcaaagatatagaatgttgattgcacatagtatgttgcttaaaataagacatgaaccgaaagtttaggtgaaattagggagagagatggttagacctgattccatgaccagagccgcatgtaatgcctgtcgctctcacattctccgactcactcactatcgatatacaatcatcatcttcgatcccaacaatagaccctgcacattactagttattatccattattaat

SEQ ID NO: 13908 - DNA, 559 bp, Arabidopsis thaliana
tttaaggttttttttttgttgggtacccgctatctacacataaaatacccgttttcatttgtttggctattcttagggcctgaaattctttacccaagccgacccgaacccgaatgtacccgaactagaccgaaatcgaaaattttcattttaccctattgggtagtaaatccattacccatttaacccgaacccgaacgggttttacccgaatccgaacgggttacccatatgcgcagccatatgtatatatatgttcgggtaataaaaagtacccacgggtatcgggttcagttcgggtaatttccggtacccacggttatttgaaaacagaacccgatcaagtaattagccggaaccgaagtagaacgggtttggttatttcgagtcaagttcagttcggttcttcgggttccggtattatgtccgggcctaccccacaaacgaagtcaagataaacaatttttctagtgagcaatttgcacaaaagaaaggagcctaaggaggtattgaacactagtgattcacaatcaagaacaaaacttctttgatccttgtt

SEQ ID NO: 13909 - DNA, 571 bp, Arabidopsis thaliana columbia
ctgctctgacagaaccactttgaggatcaatcccttactgaatgaatgtcctcttgtatacaggttcttgaggtcgggtgtgtatcttgtcttggaaaagctagagctccaagtctaccagagactcatgaagaaaatgtaagcaaagacaagctatgataccatccaagattcttgagtttataactcttattattatcaatgtttcagttatataaaccagaagctgagtgatccagcgagagtcaccagctgaagcttgaagggattgccaaagcactaagatggctagatatggacatggatctggacgaggtttgttctacaataccatcccattcattgcttttgacttcttctaaaattgaaatcttctataaactcacagttgtcaaaataatactgtatttgcaggtggaatgtataatgacgatattgatatacaaaaaccttgtgaaaggttatttagctcacaagagcaaagtggtagttctaagcaagcaagatcctttccctaaactaaacgggaagcctgttagctcataagtcttcacgtgttattttttatgtt

SEQ ID NO: 13910 - DNA, 492 bp, Arabidopsis thaliana
tagtaacgtccgccagtgtgctttaaaggcgtgtgcatacctcttatcaccaggcagtaactgcaacgggacgtttatcgtcaaccgatcctaacctgcaaaacattccggtgcgtaacgaagaaggtcgtcgtatccgccaggcgtttattgcgccagaggattatgtgattgtctcagcggactactcgcagattgaactgcgcattatggcgcatctttcgcgtgacaaaggcttgctgaccgcattcgcggaaggaaaagatatccaccgggcaacggcggcagaagtgtttggtttgccactggaaaccgtcaccagcgagcaacgccgtagcgcgaaagcatcaactttggtctgatttatggcatgagtgctttcggtctggcgcggcaattgaacattccacgtaaagaagcgcagaagtacatggacctttacttcgaacgctaccctggcgtgctggagtatatggaacgcacccgtgctca

SEQ ID NO: 13911 - DNA, 593 bp, Arabidopsis thaliana columbia
catttatgctttaagaatataaaaagaaacaataaaatagattaaagtgatttttattttatttgatttttttaacgattctttagctttttatcacaaataatttaaaattaaaataaagtattatgcccccaacacccgatttgtttttataaaacaaacacaacctttggatcatcgcagggcttatatgaaagagtgagactcttttgtgtagtatacctgaataggagagccaagacgaatgtgatagaggggatggcgttggtggtggctgccgcgaaggtggcggtggtgttctcgatggccacatagtagagattaagactcagcgtgagtctagatttttagaacaatatttagttaataaattaactcaatgaatcagaatttccaatttttagaaacattagtcatatatacccgcataaggagataaagaatattttgagcagcaagataaacgatagaggagaggacttggagctgcaaaacaacgttaagaatttgagagcttatcgcagtttttttgtttatagagttatagaagagaagaacctttcaaggaagaatgcgaaaggggcaaggcaaga

SEQ ID NO: 13912 - DNA, 438 bp, Arabidopsis thaliana columbia
ctagaggacaggttcttcacatatgggaccgacgatcttcacttcaaaatagaaaacttgtaacctctaaagaataacaaatttcacatttattttttttactcttatctcaccatatctcctaaaagtcagtcaccttctgtattcacaagtctccttccttcttcttcacttccttctttttttaccattaacattactccacaaatcctgcatcatagatccaacttctaacatcaatctctgtctacacaaagtttcagatcaccacaagaacaattgatgctttaaagttttgattatttctcttaccggtggaaaagagagtcaagtcagccttggagaggcgagtctggctcagagctataaatcgatgtgtaggtagtagaacagtatcttccttttgcatggccacatagtttaagggagtagtagaga

SEQ ID NO: 13913 - DNA, 520 bp, Arabidopsis thaliana
agaactagaagcgcaacgtgataccaaaagctaaagtagtgtttcattataagatgatccaaaaacaaaaaatcatacagacttcgactacaccatcaacgtattgataagcaagaataagcttggttagtgttttggagtcacatatgactagatctaatgtgtatgattgagtataagaactagaaccgcaaccagatcttgaaagattaaaagattaagtagtgattccttgttagaaaataaaaacccaaagactcatatggacttcggctacaccatcaaagctttgagaagcaagaagaagttgttgacgagctaattggaagaagcggacctgaaaatgttaaaccactcgaccccctggtcgagtagatgcttcactacttcaacagaccacttgaccccgtggtcgagtaaaagacctcagcactccacgtcaccactcgaccacgtggtcgagtaccaccaggacaaccactcgatcacatcactagaccccctggtcgagtatcatcat

SEQ ID NO: 13914 - DNA, 367 bp, Arabidopsis thaliana
tgagataggtttatgttatgactgagttatgttatctatggctgagataggtttatgttatgactgagttatgttatctatggctgagttagatttatgttttgcctgagttatggtatctgtggatgagtttgttttatgttatgactgagttatggaatgcttacggctgatttatggttatacagatgtctgaagaccaagcaagggagtaccctccaagactttaccaagagggggattctaatctggagggtaaaggcattaatcataatatagagctgggagagttcctgcaattagagaatcaataggagaagaaatatgggcatgactgaaagagacagagcttggattaattgctaag

SEQ ID NO: 13915 - DNA, 442 bp, Arabidopsis thaliana
  unsure (1)..(442): unsure at all n locations
nnnnnnnnnnnnnnnnnnnnnctaaagctataaggtacgcgcacggacgacccagcttataaccgtcatgccttctagcagcagagagtcaaaggtacgaggaagcggaacgggcaaggtaacgtgggcaacgtgcatagcatcatcctgactagaaattcggtgggttagtatacacattgccgtagaagagtccggatcagtttgcatacgctggtgaatttctgtatgagttcgcgccttcgtacgacatgatcgtattgaagctatacgtgtaacatctcgtggtgtctggcgttagagctggaagagcgacgcgtccgttaaaccgaggtgttcccatgataaaagatattcacccgacatacgatgaaattacatgctagcatgctcttacggtatcgtgatgaaaatccgctccaccagtaggtgatgacctgaa

SEQ ID NO: 13916 - DNA, 537 bp, Arabidopsis thaliana columbia
tgttttagatttaggattttgagtctttatgttatttctcgagtcttttcagggaattctacgcagtaggacaacaatggagatgaggagacattttggagcaaaagctaaggaaaagaaagctaaggatgattttagttcatgattcagtgagagtgtcgatcgacacacttctggtgtcgatcgacaccagtataagcccagcaaagtccatgacgctttcaagtttcagaagtggaaatatgccccaaaagacttccctgcttgcattattagtcactaaacgttttatagggcatatagatagttttagaagtcattgtttagacctaagtacttttctaccaagttttcagagagacataggctattcatccaatgttttcagagattcattcaggtctcaatacagtgaagagatcctttcatactctattcttattttggcgagtatgtgatctattcatacaagaatcagtggactggggtgaggaaagagtcagctctgtttgctccctctctctggtttgatctgga

SEQ ID NO: 13917 - DNA, 472 bp, Arabidopsis thaliana columbia
tctcctctttttggaccaaactcatgaagatgacttttctgaggaacgagagagggacgagttgaaggccgtcctggaagagaagcaaaatcgtttagctgcccttccttcctcgtcgttcaacccttagtagttcgaggagttcttcaccgaatcgcctcctttgagcgaatccggtttagactgggctggtaaattccaactcttctccctttttcttaaaaaaaaaaaaattgatccacaacgaattactcttatgttaacccgaagtaattgcctcaggtgttagcggttccgtggaacccgaagtgcctatcgcgccggcgttagttctggagacggtaatcactccgcctaaaattcctccatccacaaactcggagacagtggttatcgaggatgatgatggctcagactccgtggttcctggcgagcagcatgctactgatgagccgggtgagactgagacagc

SEQ ID NO: 13918 - DNA, 663 bp, Arabidopsis thaliana columbia
tacatcctacatttgctatctttatccaaatagcagtaaactacaggtaaagctagacctagagcaatcagatcagtgtccaaaaagcagtatcctcttggtttcaacagatctaaagtccaaaatgtagctactctcagtacattctgatgcctgattgatagagttaaacaattgccttaacactaaaactacaaatccagaacaatgtcataaatcaagctctgagcagagattagtgaagtcactaatcctaaacactgcctaaagcctcagatcgagttaaattagacctagaagacaagacgagagaatcagtttctggtacatggcaataaaacctagaacaatccaagagagattaccgttcatttctaacggcgaggttaaggagagcgaggagagaggcgtgacgagcatcaacgttagaggagaagagcatgggaacaagcggcgggataacgccggcgtcggcgagttttgacctagcggaagacttaaccggagactttctaagcagctttcggatttccttagcggcttcaattcggaaatcgagatctccatggagaagcttcttggagagatgtagaatcagtaattcctttgtggtttccatgtgttggtggtggttcctcctctgcttcgtcttctccgatatat

SEQ ID NO: 13919 - DNA, 547 bp, Arabidopsis thaliana columbia
cacttacagctgtaccgcaaactttgaaaaaccgcttgctggaagaagcgttgcccatgacttctccaccgtcttaaccggtttccggttatcctcctctcttaaatctctgtataaataattttgtcctctctttagtttctcgaacttgtttttggttcatctctcaaaaccaaaatcactaaagaggagaagattgctaaagtttgataaaacattccaaaatcaatggctgataggatcaaaggtccatggagtcctgaagaagacgagcagcttcgtaggcttgttgttaaatacggtccaagaaactggacagtgattagcaaatctattcccggtagatcggggaaatcgtgtcgtttacggtggtgcaacagctttcgccgcaagttgagcatcggccgttttcggctgaggaagacgagacgatcgcacgtgctcacgctcagttcggtaataaatgggcgacgattgctcgtcttctcaacggtcgtacggacaacgccgtgaagaatcactggaactcgacgctcaagaggaaatg

SEQ ID NO: 13920 - DNA, 549 bp, Arabidopsis thaliana columbia
catcaaggcctcgtgcaaaatcaagcactcgaagcaccacttctttttaggttaacctcaattgaaagaaaggaccaaattactatcatgcccctctctctaactgcttctactacaacacgtcaataccacacgatcaatgagatgaattttcaccgaatcactcttcctaacgtagctgcgcacctgtgaaggtctggccgaaagaccagcctgcgttacgaacgttgttagagacaatggtttggccatcgcttgttgtaactttgaatgagagagattgtccgttaaggtaagagttactctgccagttctgtccccagtttcttgacatcgcttgccatccagttcttgaacctttaaccatcgctgagtgaacatctccggctcctccgacgttagtgatcagaactaggttgaagtaagagtgtccgtttatcgtaaaccttattcctcctcttctcacgcaccggcactctgttaaacacacaacaacaaaaagttgaaaacggagtaagattccaataatacactatactctgttttgga

SEQ ID NO: 13921 - DNA, 564 bp, Arabidopsis thaliana columbia
actctacctcaaatcttgttttatcccgtctaattgatgtttgattaatctgtctaagacatggtgatatgtcctgtgcagcttttcttctctacgccgcagcagtagtaggagcagccattatactcatagttcagtttgtaccacagtacggtcagtcacatgtcatggtatatatcggggtttgttctcttgttggatcattgtcggtaagtacccaaaacttatgatttaacatttttattcattagctttgttttgagtcctaataacttgaacgatttgagcaggtcatgagcgtcaaagcgctcgggatagcattaaagcttacgttttcaggaatgaatcagttaatttacctcagacatgggtcttcacgctgatagttctcacctgcgtgataaccaaatgaactatctaaacaaggtatagaggtagcatcagtttcatgttgatatctgttaacatatcatgaaatttcattcggcttctctttttgttttcttgattacaggcgcttgacactttcaacacggctgtagttcacgtatatactatgttatg

SEQ ID NO: 13922 - DNA, 479 bp, Arabidopsis thaliana columbia
agtgcatggttgatttgcaaagccggataaagatggtgaagaagtatccaggtggagtgaaaggctcttctgctgcacttaaaaggataataatgctgtggacttgcggctcagagacgtcaaacattttggccagctgatcaagactggaggactcataagagccggataaagattctctcagcaatcttcacatcactcatattgttagttattgtcactctctctctactctatgttgaatctgcacaattaatgttgatgatttaaatgtcctttttctttgcttacataccaaatagaatttctgaaccacaacttattgccagctgagataccatctccttctcccgtgcaaaagtatttgtcaactagaaaaatgattgcttaagtacgaagaacgataaatggagaaacaatcaatgtgagtttaagacaacaaatttatattgaaaccatcactatttgccaagcacatg

SEQ ID NO: 13923 - DNA, 1191 bp, Arabidopsis thaliana
catgagatcacacacccttttgaacatctaggacccattgaataacagtcggctcataactaaaacgagctcttgaccatcgacaagctagcttggttcatgatacgtttttaccataatattaggttccattgtttaagagcatggacgacaagctgctggatgcgatctgtatgcggctgaaaccatgcttgttcacagagagtacctacttagtgcgggaaggagatcctgtagacgagatgctattcataatacgtggtcgcctcgagagtgtgacaacagatggaggcaggagcggtttcttcaaccgcagtctcctgaaagaaggagaattctgcggggaagagcttctgacatgggcattggatccaaaatcaggtgtaaatctcccgtcttccacgaggaccgtgaaagctctgacagaagtagaggcgtttgcgctgacctcagaggagctgaagtttgtagcaagccagttccggcgcttacatagcaggcaagtgcagcacacattcaggttttactctcaccaatggaggacttgggctgcttgtttcatccaggctgcctggcgtagatactgcaagaggaagaaaatggaagaggcagaagccgaggccgcggctgtgtccagctcaaccgctggaccttcatactccattggggctgcatttcttgccactaagtttgcggctaatgcgcttcgcaccattcacaggaaccggaacacaaagattagggatttggtgaagctgcagaagcctcctgagcctgatttcactgctgactgatgattgagcagcttgtagacattattgtttataatttatgggaatcattacggttgagataaacaaatattgcttggctttaaagctgcttgtgctgtctgtaaaattaatatatgaagtgtagaaacaaagagattatagccgttggatttaataaatgtacggttaggatcatatgccggttaaagaatgggtctattgggccttttaatgaagcccacaatatattcacggtgacatgctccggtcccaaggtagagagaagttgcgattgatttcggtgaaagaattaagaatcgatcggacttggagaagagaagagaagatggttggcgcgaatctgaaagcggagacgatggctctaatggacaagagaacagccatggagacggagatg

SEQ ID NO: 13924 - DNA, 501 bp, Arabidopsis thaliana
ggattgaagagatggatatgttagctgacgaaatgctagaagagctaagagaaacagatcatcaacagagtgctctaacaaaggatagctaagaaggagatttacatttggagactctagggtaccagaagctgttagatgaacacaaagcagttgagaatccaggagaatatgaagatttgggtgaaagagctaggaaggaatatatacttgaccacatcactcgactaacagtccattcagtgtactcgaccgaactactcgaccacaacccctcctctgaagccaacttagtatccgatgactggtctgaactcaaggcacccaaagtagatttgaaaccgctaccaaaagggctaaggtacgtttttcttggactaaactctacttatcctgtcatagtgaatgatgagctaactgctgatcaagtagacctgctgataactgagctcaagacgtataggaaagctataggatattcgttagatgatattaagggga

SEQ ID NO: 13925 - DNA, 507 bp, Arabidopsis thaliana columbia
gatgaatcaatcaatacatgtaaaaatgtttccaaccgttacaaaatctttttagcggttcaataatggcagatacaatagaacaacaaaatgaaagataacagtacaaaagtactaaggaggatcatagtaaatgacccgagaagggtcgtttgtctgaaacaaagactagtaatggtggtcttgatatgtagctccaaactctgctctccaagcctgatcatcctcgtagtcatcgaaactgacagctccggtttcatgttctgatacttgttctatttcatcttcctcatctttgtaccatggctgcaacaatgcagatcctggtaatttactctctgctgagtattgcttcattgtccctatttctatcatgtgttagctcatgagttgctccatttgcttcttcagcctctctttctcttcttccaccacgctgaatcgttcctgcaatgatggtttgagtcaagtgtaccatttaatgaaccaagatttccacatgagagt

SEQ ID NO: 13926 - DNA, 491 bp, Arabidopsis thaliana
taagtgtgcaagacatagatgcaaatcaagtacaggcggagaatgcctgtaagtgcgaaatctatcatctccatgtctgtgttagacacagtgcctgtagactccctggagtaaagaacattggctattgagcgctgaaagtagcgaatcactggactccggatttggttgcttttggaccgcacagagtttagcggcacattgttcccaatagtagcccacaaatccttaagctcttccatgtcaaacttaggcttggttccctttccactagggaagccaaacagtctttccaaactgttgatcgacaactgatagcgctgttgatcaaccgaaaacgtcaagaaccctaatcctatactctccaactcatactttgtgagaccctgatacatctccacttgcattgtggacagaaactcgatcgtttcctccttgtaggcagcgtatgggtaggacatgagtgtcttcagatgacacttctcgaacag

SEQ ID NO: 13927 - DNA, 490 bp, Arabidopsis thaliana columbia
ggaaggatgtgttgatggtttctgaacagctgagcaattattcatcaatggaaggagtggtgtattgtaggcctcattttgagcagcttttcaaggagtctggtagtttcagcaagaactttcagtcacgtatgtaaaactcttttcttcaccttctggtccagcttttacatgtggtcactttaattttaatcttcaaactttttttttcctttcacagctgcaaagccattgactgataagccaaccccggagctggtaaacgcttcttaacaacgatgtttttatttagttacacgacttgagatacatgactctatttctcttcttggttgttctcagaataggacacctagtcgacttgctggtatgttctctggaacgcaagacaaatgcgctacttgcactaaaaccgtgtatcctatcgaaaaggttagtatacatttaagcttgtatatgtcattaccattgctttccaatacacttttgt

SEQ ID NO: 13928 - DNA, 1052 bp, Arabidopsis thaliana
tgattcactttgccctgcaataaaaataaaaacgctcaaataaagaaaaatactgacccataagtagcatattaaataatctttgcgtcaaattttccaattctagtaaagcataaaacacaaaaccatggtaacacgtacggtgcttttttgtaagacacttgagcttgtatttccttccacagtatgctgaggaataacaggtggaacaatctcatcactcttacttccgaggtgtttgcaactagaatttgcattgacacctgaaataaacatcagagtcaggtgatatcagatgtggtaaaaatcaaaacactgaattccataaccaagatagagtttaagtgaaacagccagtagcaaattcaatgtttgcctctagactcacctggcagtagacttttgcggatgtctggcgcattcattggtgcagccgcagatgctgccactctgtaatcaataacaggctgacttgtgtcaattccactaacttttaaacgtttcttgggaggttcgtttggttctagatgtctagtatcatcagaaataatactgaccctccttgctggagtgatttttgggttaacggcatccttctttggctgtgcagccttaagcttcagctcactttcccgaagcgcaatctgctgctttaaatcctgaagtttgttgctattggactccacaatctgttcaggacgctgtgcatctttgctaaccgtcctttcagaggaatgaatatatttattggatttcatttccttggcaaatgaaaggttggagactttggacgtcgcagcatgactaaaggtgctagtggacaatgccttctttgttatggctcttatatcaatctgtcttggtcctttcaattttgtttgtgaaaatgtagacgggtttctattcccagatatggttccctttggttgaatctttgatgtctgtgtacgtcctttacaatcagattcactaccactatcatcatctgagaagtttatcacgaggttgctgttgttgccccttacaggaaatttcttcccatgaatggcagc

SEQ ID NO: 13929 - DNA, 435 bp, Arabidopsis thaliana
gcaggaagaagaccatcaatggcaccagcaccagatagacggctatggtcagcaaaccgaccagcgaggcgagggaaattttcaccaccgaatcgcccatggtcagcatccgactgcgcatatttccggccattgcatcaataatgcccgcgtccattaacgccggacagcgggcggcaacgtggcggcacagtcagacagcttattgagcatccccggcatatcgcggattaagtagatgccctgttgccaggcgataggcagtaccacgaacgccatcagtagcaatataccgacgaaaaccaccaatacaatcgacgtcgcccagcggcgtggacgagccaatagattgcagacgcacggttggccattccagcaaatagtgcagcacaatagccaccagcaacggagcaagcaggccactaaagaaaaaga

SEQ ID NO: 13930 - DNA, 489 bp, Arabidopsis thaliana columbia
gaatgatgcattgtcgctttgaatgtatagataaattaacacctctagtttgtttattgtttaataatttttaataataaaaaatgtatagagatagatagatacccaagaacatgacgaccaccatcatgaacagcttgagaaatgagacccattagccccacgcttcctcctccatacaccaaatcgatgtttctctccacctttcacatttatgtgtgttactagtgaccaaacaagtacagtttatttttatttctgctaaataacaagtacaatttattctatagacttttattatatacatggttaattgttaattagaggagttcattgatttattcatattatttatcacaacattaagcatggtgggcttctgttacattgagaaagtgaattactaaatttcaaccttaataggtatgatatgatatgatacttaattataagtatatgctcgttaatactatggacatacgttttatg

SEQ ID NO: 13931 - DNA, 768 bp, Arabidopsis thaliana
ttctgtgttttgtacctggcaaccaaatctttaactaggaacactaactaaaactcgcattgagatgcaaatgcaaatcaagaaatcccaatataaattactagcacagaagcaaaaagaagaaaagagaatcgaaagatagatagacatacctctgcttgctggtgacgtaccccgaatgagatccaccagttcaccagtagaatgtaacccgccattaagtcgagccttaacaattctattttgaagtaaataccaattgctttcttcgccataatcccgtagaactcttcccagttcagattctggccacgaattcactatatcttctgctgttagagtcgcctgtcacatgtcagtggataggttataacaaaatttcagcagaaattccaagagattcaaaaaccctcaggttcattatactacaaggagatataagtaccctcacctgaggatccatacgcatatcaagaggtccctcttgaagaacactaaaccctctttcaggattgtttacctgtggggatacaagcataggtgagtgatgcaaacaatacaaggaaaaagaaacagttgcatgtgaaaatcacaaaatgtacctgcatagatgacattcccaggtccataagaataccatcaacacctacatctaacaactccggttgcgtatcagcaatcacagatttgatgtatttgaagttcttcaacactatagaagccttcaaagttggatgcatgagcgaatcaatatgaaagtgcccagtt

SEQ ID NO: 13932 - DNA, 538 bp, Arabidopsis thaliana
ccgagcttctaactttcaagtatgtatgtctttccctttgcttattcagtcttcactagtttatctactgtagtgtcgatgctgcgttttaggttattggttattctcttcaagcaatttctaatcaatggcttagtctgatgtcacacaatagattagtaggtagcttctggataatgtttagtttagtatactaacaacagttggtatcaatctcctaatctttcgataagcttgtaaatacagttgttgtcaatacattagatctgctgcactttgtgtattatgctaaaatcctagggactagtattgatgttttgtattgaacaatttttcctaggctgtcactagagtaaagccgtatatttgcacaatgccactgaagatggacgagggatggaatcaaatccagcttaacttagcggatcttactaggagagcttatgggactaattatgctgagacattgcgagttcagattcatgctaactgccgccttaggcgcatatattttgctgatcgtctctactctgaagag

SEQ ID NO: 13933 - DNA, 507 bp, Arabidopsis thaliana
  unsure (1)..(507): unsure at all n locations
tagtaacgtccgccagtgtgctctaaagcagtgaaatatctgtccgagaaaaaataattcaatgtaaattacataaagcccgtgaatattcacggctttttttattatttaataaatataaatacattctgataatgcatcctgccgctggacattatttcagcataagtggatattcaaagttttgctgttttatcagggaatatttatatgatacgtaagtcagctacaggtgttattgttgcgttagcggtaatctggggtggtggcacatggtacacaggcgttccggcacgttcaggcgggtgagaagacgcgcggctttagcggcgcaggcttcacgcggaaccctggtatcgagcagcggctgcatcaccacttccagtgctgagatacgcgggatgacgcgcagaaactggctcacccagccgacggtggtttctttagagnnnnnnnnnnnnnnnnnnnnnnnnnnnnnnnnnnnnnnnnnnnnnnnnnnnnnnnnnn

SEQ ID NO: 13934 - DNA, 537 bp, Arabidopsis thaliana columbia
cactcaatcaggcattaaatagttaaatcgagtttaccgaaagattcagatccttattcttctccaccggatctcgaaatcggagaattagccaaacgatggccgccgacggaatattccgcagcatcttcgagggttgtatctccggccttgattccgccatcgaacggcgtccttaccacaaaaactgcggatgtgctcttcacgataaatcaagtggcgctgggaaaaatcaaaatcagcgacggccgccgtcttgtcgccgccacggaagctcagagagcatctcgttcccgatccgaaggtcttggagcgaagcaacatcatggctatgaatctcttctcctcatcgtcgtcttcttctaatctccaatcgctttcttcgtcttcttcgctctcaaatctggcatcagatttactggtggataatgctgcgacggaggaaccgagcagatctaataaacagctacgatggacgattgatgaaggtgaagatgattgatgatgatgatgatcaattccaggttgttacttttg

SEQ ID NO: 13935 - DNA, 744 bp, Arabidopsis thaliana
cagtgtgctttaaaggaagagtcgttgttcctgtggatgcgcgcccatccgtatgatgatttagtggtgctggacgttaccgccagccagcagcttgctgatcagtatcttgatttcgccagccacggtttccacgttatcagcgccaacaaactggcgggacatgcgacacatataaatatcgccagatccacgacgccttcgaaaaaaccgggcgtcactggctgtacaatgccaccgtcggtgcgggcttgccgatcaaccacaccgtgcgcgatctgatcgacagcggcgatactattttgtcgatcagcgggatcttctccggcacgctctcctggctgttcctgcaattcgacggtagcgtgccgtttaccgagctggtggatcaggcgtggcagcagggcttaaccgaacctgacccgcgtgacgatctctctggcaaagacgtgatgcgcaagctggtgattctggcgcgtgaagcaggttacaacatcgaaccggatcaggtacgtgtggaatcgctggtgcctgctcattgcgaaggcggcagcatcgaccatttcttttgaaaatggcgatgaactgaacgagcagatggtgcaccggatgactgggccggaaatctggcagcaaacctgcgctcgcatcagtgattcgatgccaacggtaaagcgcgtgtaggcgtggaagcggtgcgtgacgctttatgcgcgaacaatccactttagagcgccgttacta

SEQ ID NO: 13936 - DNA, 559 bp, Arabidopsis thaliana
tgctccagctctgattttgatgagaagcaccgccgggaaatgaaagttatgaatgacaagttggacaacctactccttgtgcaacataagcatgttcattttcagggagatgatgagacgttccaagtccaggatggggagacttggcaatcagaagaggtcagctatgtgcaaaaccaaggaggttacaacaaaggtttcaacaacttcaagcagaaccatcccaatatgtcttacagaagtacaattgttgcaaacccgcaggaccaagtctacccttcatagcagcagaatcaatccaaaccctttgttccatacaaccagggtctggggtatgttcctaagcagcagtactagggcaactatcagcagcaacttccaccacctgggtttgcacagcagcaaaaccaacaaccttcaccaactctagattcagatttgaagaatatgttataccagattctccaaggacaagcagcaggagcaatggatctcgccaaaaagatggcagaaatcacaacaaggttgattgcctttcacgatctgaacataaaattga

SEQ ID NO: 13937 - DNA, 569 bp, Arabidopsis thaliana
tagaggttctctaatggtggacaaaactcaatgttgccaccatctctaatcgaagtggaagcgggatttgggaggagaaaaatatattgtcctgctgtggggtgatcgaacctatacttatataggtcattcttctgctgcgaccaaaaactcttggaattgataaggtgttgcatatcaatccatctcgggggaatcggctttaaatgtagaggtacattgcaagctctcagaattagtgtcacaactcctcccacaaccattcttcctggtttcttaagtcccttagcccatcctctgtaacttagcaggtgcttgattaggtagaatgagaccgaagcgttagtctgatctccagctagaactataccatatgatgctaaaccaagcagctcttgtagagctgtctccatcaactctagttctccattgacaaaggtttcattcctctctcttgcaaatagcgtactagctaaggacctatgaacatatctaaccaccagactccttattccgttgctcttggtctaaaggatgaaaaccatgtttagaccaagtgtggccagaat

SEQ ID NO: 13938 - DNA, 100 bp, Arabidopsis thaliana
tctctactaaaaatacaaaaaattagccgggccatggctcctgtagtcccagctactcgggaggctgaggcaggagaatggcatgaacccggaaggcgga

SEQ ID NO: 13939 - DNA, 494 bp, Arabidopsis thaliana columbia
ctagaataaatgggtggtcggcaaagttcttatcgaaaggagggaaagaagtgatgattaaatcggttgccgcggcattaccaacctatgtgatgtcttgttttaggtttccgaaaacaattacttccaagttaacaagtgcggtcgcaagattctggtggagcttgaatggggaatctagaggtatgcattggatggcttggaataaactgtgtaatagtaaaatggagggtggctcaggttttcgggatgtagatgattttaattcggctttactagcgaaacagttatggcgtctaatttcgtttccagactctctttttgcaaaggtttttaaagggagatattttaggaaatccaatccttcggaaaatataaagtcatactccccgtctgatggctggagaagtatttgtttagctagatctctggtttgcaaaggaattattaaaagtcggttcatgggcttccatctctgtatgggaggaccatgg

SEQ ID NO: 13940 - DNA, 559 bp, Arabidopsis thaliana
tagtaacgtccgccagtgtgctctaaagtgcaaacgttcgcggatgatggtcgccgagatgttaaaccacggcgtttcagccagataaattttaccggcagctgaaggtgaagatcttccgggttatgtgtcaaatgatcttccagccattgctggtattgcggttgcgccatttcaagtgggtaacctggacgccgacagacgatcaaatgtgcattgtcgagtatcgtttcgtattcgtaccaggtcggaaaggtcagcagtgaatcctgaccaataataaacgccagcggcacgtccggtccttgttcctgtcgccactctttcagtgtttgcgcagtgtaagagggggcattgcgctttagctcgcgttcatcaagagtaaataatggcttgtcggcaatcgccagttcaagcatgtgtttacgctgcacgctgttcgcttccggctggggacgatgcggaggaacattattagggatgattgtgaccgcgtcagccaatcaaattcgccagcgttccacgggttttagatgacatagtgcacggataaaggtgc

SEQ ID NO: 13941 - DNA, 483 bp, Arabidopsis thaliana columbia
aaaccgcgttcattggcctcgatagcttattttcttagtacatacagaagaaaccggacatgtattctcctgcaagagacgaagacgataaactcggttcaactatatgcgatgagactgaggtagtttgtcttgtttcactactcacatctaagattgcagaggcgttataggacaagtatcttcttatgtcaccgtgtgttaggattccagctagaaaatcatcgtcatcgaccaccataatgcagttttggtggctctctgtaaggatgtttcttgcttctcttagagttgtacctgaagagactttcacatagttctatgacataacccgcataaccgttcagtcttccagaatagtctcttcatccaaacagcaattatggtcagggttctctatgacggtaagctcaagggagtcagcattagccgaatgtctccagactccttcggttttacgttccgaaggtgaaatagaagagt

SEQ ID NO: 13942 - DNA, 432 bp, Arabidopsis thaliana
caggacgactcttgcatcattcgtgggactggctatcgcttccactcactttgacacatagtctactgctaccagtacgtacttgtttccataggaagatggaaacggtcccataaaatctattccccacacatcaaagatctcaacatccaagattgggttctaaggcatctcatttcttctgttgatgttaccccttctctaacacgaatcacactttgatatgaactcctaagcatccttagaattgttggccaccaagaaaacctgcttgcaagattttagacactgtcttaaaggtagcaaagtgacatccatagttggaaccatgtagtgtagcaagattccctcttcttcatcatctgagacacatctcatgtagatcttatccttgcaaagagtatagacgtaagactcatcctagtagaagtg

SEQ ID NO: 13943 - DNA, 522 bp, Arabidopsis thaliana columbia
gagagactgaagctgtaagactgtattcattccatcagtgacccgagaaggataatctgcaaaaagatcctcaaagctgcgagggtccgaagatgtgaacagttctttaaaataagcttcagcaataatcccttttgtcgcctcatctttgtggagattgccattaacatcacatagctgattaatattctgcttccctctgttgtcttttacagaagcgtggaagaaagaggtattcttgtcaccactatgcatccactttgctctgcttttttgactccaaaaggtttcttcatcttgatttgctttacagagatcatttttgagagtccaaaccacctcagtactcgggaaagcagaggactgttccaccttaagcgcagtcctagcctgagtaattcttgtcaaagagttggagttgttctccttttccactactcaaggctgaccgacaattcttcagtttctccagcactaaaggcctattctgactatgaatccattccaagcttgagaaatgac

SEQ ID NO: 13944 - DNA, 520 bp, Arabidopsis thaliana
aagaagaagaagaagaagaagaagaagtgaggtttatgaagaagagaaggtgatgaatcattacagcgaatgaaaagacgacacgtaacgatgataatgagacatatacgccgcgttttggatactgttaagataaattgagtaatgacgttgactgaattaggcagaagatctccgggtaatgaagcgcttgcagcatgagcctctgtgcactgacctgcagaggataactcacactctgaacgtcaatgctaagattcaggcaagttttcatcttttgttgttcttgatcaactttccttaaaccctttgggctttgaggatgaattttggttgaagaatcgattttggggtttgttagaaaaaagaggacagatttttgaattggtgaagcacctaaatggttcttatccacacaagtgttggattcttcaaacgattctcgacttcagcgactccatcaacatcctctgcttccgaatggaaacccaacagactctgttccgagtagccacagaat

SEQ ID NO: 13945 - DNA, 528 bp, Arabidopsis thaliana columbia
cagcaagaagtcttcaagtacatcaggtggctctttggttaggttaagtttgtcaactagttcgtcagcgggttcttcagaaagtccttttaggaagtttgtcagaaagcccttttaggaagtttgtcagagagtccttcagccagttcatcagcaagtctatgaggtggtccgtcagtgagtccatgagctacaatgtcagctcccattcttatatcatccccttctccttgaaagggtttcttcctcgaaactatctgacctacaccaagagtaagcaagtttgctttcatgcggttttgtgactctaacgtcataccttgatgttgtttaggattgctgcgctatggtgcgtcaggttattcagcttggatcagcatggagtggtagactcctctagctgcatgtagctccagagtagggacatggcttttcatgagtgatgcggcatgtggtgttttgcttcttggtcaaaaccttaaaatgagtcttttggcgaaacaagtgcattataccgtcttttgggaa

SEQ ID NO: 13946 - DNA, 685 bp, Arabidopsis thaliana
taagatcatcaagagcagaatttggggaggatagctatacatgaatgtgtataagattatataggactatgaagaggagaaaaggaaaagaaaacggagcagtcatgatacctgcgataaaggaacagtgaccacaacaggctcaccacgttccttaattggcacagccttaactttctttttgccaacgccatctttgctaaccatacatctagtcaacacatctacggtgtagtttgcatcctctggtcttctactatcatcatctgaatgaattagtcatgccaagacaataaacggattacattgtgtgaacggattaatagcgctatacgaaaaaataattctcagagttccaaccttcagataaacttttgactttgttaaatttcatgatcactccccatgtatcctggtcttcaatgctgaatgattgtggctcttcatcatcatttgtgcaatcgagacaaacagctctgtttggcagcaaaaagggtaagcagtactttggagtgaacacaatttcacgtatatccttcttcagactcttatattgcaaaatcaggttatagtaattttttaagctttcttcttcttcaatcaccaaagagtctctctcttcttccagagattttatttgcttctgcgaagatcagaccacaatcaaatcatatacataaagtga

SEQ ID NO: 13947 - DNA, 499 bp, Arabidopsis thaliana columbia
ggttgagatcccctcaataaatcacggtcgagcaaacttagtagaagagattagtgacatccgccggtttgaaagagaaaacgctagagcaagaagagaacgagaacgacttgaacaccttgctcggttaggcgtcatgaatgaacccggaattgagggccataatggaaatggccaagctaatggggatggtcatatgccacaacatcaaccaagagctcatcaaccaattggagcctttgatgagccaaacatccgtggaaatagaaacggtattcaagctcctccggttgagaacaacaactttgagattaaatcaagcctcatcaacatggttcaaagctctaagtttcatggtttatcaatggagggaccatttgatcatctagaccaatttgatatgttgtgtagcacggtgaaaatcaatgggatctcggaagatgcattcaaacttagactcttcccgttttctcttggagatcgagctcgtatttgggag

SEQ ID NO: 13948 - DNA, 539 bp, Arabidopsis thaliana columbia
tatgaattcattaaaatctccgccttctttgtttccattttttttatgaccatcgtagtttttaattaccattttcgtctctgtgaacgcagatcaaatgacctccagcttaagggctactggtaaatgaagtttgattctcaatattttggtctctaggatttccttccttttttcgactgttccgtttatgggataagtaggggctgatataactatagacattaaggaaattggcaatgggagagacgggagatgatgctgggccatcagagcaaggaccttctaatcaaacctggtggccttcagaatttgtggagaaatttggttctgtttatctgggatcgcaagaagagacatctagtactaaagactcacctagaaatcttgggcaagatgggctgccatctagtactgcttcgaatattctttggagtactggttcactttctgagcccatcccaaatggcttctactctgtgatcccggtaagctacttttattttgatattagatctgttcaatgattttttgagtga

SEQ ID NO: 13949 - DNA, 1456 bp, Arabidopsis thaliana
gtcaagcccgtaaaatggatgcagacaagtgtaaatccgagccaaacccgaatacaaagtagaagaagtgtataaactcttggataactaatgattgaataataacatcaaattaaggccatttcttgtattgaacatcgtaagatgttttgtaaattacaaatacaacaaagctcacttacctcagcacctctctataagcgaatggtcagaaagtttttcactttcaaaaccacagaaacaattataacaacaactttatatgatgtaatctgaccattccgagatgaatgaagtatgatccatcgattctccaggacattcctcatcatgaatcgttggcttctctttccctccgacaagtctcgccggattcccaaccgcagtacctcgacaaggcacgtcaatcagcacaacagaaccagctcctactttagcacctgcaccaatcttcacatttccaagaatagtcgctccagctccaatcaaacaaccgtcaccgatcttcggatgtctatctccacaagctttacctgttccacctagtgtcacatggtgaaggattgaaacattgttcccaatcaccgctgtttctccgactacaactccggttgcgtggtctagaagtatcccttttccgatcttcgctgctggatggatatcaacagcgaatacatcggagattcttgagtgtagagctaatgctaatggcttccgtgattgtgtccatagcttgtgtgatacacgatgcgcctaattcaaattcaacaaagccaaatcatgatccgaaattcgcataactgaagaatcaacctaacctaacctaaaacaatattcataaatcaaatcgcaagatatagaaattgtggattcatcagatcaaatgatgaagatttcacctgaatagctaagaagcctttgtaattgaggagacaatgagagaacgagatactagcaggatcacgaacacgagcagcgcgtagatctgcgacggtggcgttacgaagagaaggatcggaggaaaaagtgtttaagaacagatcgtataaaagtgtggataaaagcgttgaggaacaaagcttgtttcctagatgaaacgagatagatcgttcaagagacgaatgagaaagaatcgtcgaatatagatagctagctaaagctcgtccgcctcagcatcacggcgagttccgccttgatctgtgtccataatccggcagttccgcatctgcagtgccgcagatatcgctcgtgacgctgcttctgcttcatcggattgggtaacggaagatagtttctcctttgatggagattgatgtcggagttctccggccggtggcatattaacgcggcgataagattcgatttctatctcctcctacctataaaagttaattttcgagacgctctttaatcgtgcggaaatttttaaatccatagattaaagacaatgatagtc

SEQ ID NO: 13950 - DNA, 789 bp, Arabidopsis thaliana
accttcaaggtttagcattcaacaggaactcaaatattccattcagaaagttgaaaaaagatctaaacaacatctcatcaacaacaccaaaagctgaaaatggtaaacatagaaaacaagggcagagttgacaaggaagaacagaaacttgttcattgtataacttcaatggtggtaaaagtttgttgattgtataataacatccatgtttactataactcaacaagaacagcactagcctgacacaaattagctgcaaagaaactcgagtttgcttcattgatgaaatctatatatgatttaaggggtagtccaaaggaactgtgaataacaagaacactgaaagaagaaaagcaaacaaagtcgcataaagatgattgaattatacaagtctaaactatcgttaaccattcttctacctacaaaccctaacttcacttcttaaccctagaagaagccctctttgctggagacttaaccgtctttggcttcacaaccttcttaaccggagtcttcttctttgtggccaccgtagcaactttcttcgtggcagcaacagctttcttagccggagatgtaaccttggccgttttggctgccttggctggtctagccttagccttgggcttcgcatcaacagctttcctcttagttgcagcagcagtggcacgaggaacgggcttagcttagccttcgcggtcactttcttagcagcagcagtcttaggtttaacggcgattgttttcttagccttggaagccgcagcgacctttctcttcgccttggtaa

SEQ ID NO: 13951 - DNA, 595 bp, Arabidopsis thaliana columbia
  unsure (1)..(595): unsure at all n locations
nnnnnnnnnnnnnnnnnnnnnnctaaagggccaattgccgcacatagcagccctaaagaaaaaatgctgcctttatgcgtgtttaccccgcagtgcgcggaacatatcaccttcgcaagccataccaattgggcgtaatccgtggagtaccgcttctggtgccatttccgcactacaggcaccaaattcaatgaaacggggtagccagccctgaatcgccagcgcgctgcggtggaaatcttccagcgccatatctttgtgcgcaccgcagttaatgcgatccacgaggcctggtttcggtgacagattgacttcagtcagcatggcgcgccacctcagcagggcgtactcatcgattaatgacgtcgcaagctttgtggttttagttgacgttgcaggcatcgacatcgttcagcagtgcctccatgcggttgagtaaatcggtcagttgatgggttttccacgcgcgcagacggctgccgtttgttcgcacaacaggcagcggcgaggcggcagtgaatagtcgcggcgggagagaatttcgcgttcggcgtcaggacatcgatatccataacgcccgagagatgactatgtc

SEQ ID NO: 13952 - DNA, 484 bp, Arabidopsis thaliana columbia
gttgcgcaccatctaatggctcagggttggcaagttcgctggctggggactgccgaccgtatggaagcggacttagtgccaaaacatggcatcgaaattgatttcattcgtatctctggtctgcgtggaaaaggtataaaagcactgatagctgccccgctgcgtatcttcaacgcctggcgtcaggcgcgggcgattatgaaagcgtacaaacctgacgtggtgctcggtatgggaggctacgtgtcaggtccaggtggtctggccgcgttgtcgttaggcattccggttgtacttcatgaacaaaacggtattgcgggcttaaccaataaatggctggcgaagattgccaccaaagtgatgcaggcgtttccaggtgctttcctaatgcggaagtagtgggtacccggtgcgtccgatgtgttggcgctgacgttgcgcacaacgtttggctggacgtgaaggtcggttcgtgtgctggtag

SEQ ID NO: 13953 - DNA, 749 bp, Arabidopsis thaliana
cactatcaggcactgttgaagttctttcatatccatctcttaaaccacttgacactctcacagcccacacagccgggtgttattgtattgcaattgatcctaaagggaggtaatatatatttacatttgtgggctggccgtctgttatactcatgataatctttttgcttttgcatctaattcttcctctttaccttaacagatattttgctgtcgggagtgcggattccttagtaagcctttgggatatctcagacatgctttgtttgagaacatttaccaaacttgagtgagtatcaacatgaattttccatagagtagaaaaaggtttaatttctgttacatgttagtaatttataactatttctcacaggtggccagtcagaacaataagcttcaactattcgggagagtatattgcttcagccagtgaagatttattcattgatattgtaagtgattgcccagacttaaacactgctaatttcaatgtagtttcctcaatatgagattagttcctcgtatctgaccactaactaccaaacaggctaatgtccaaaccgggcggacggtgcatcagattccatgtcgggcagccatgaacagtgttgagtggaatccaaatacaatttacttgcatatgcaggtgatgacaagaatcccaagtataatactgatgaaggtactaccgcgtattagtacttcattgttacaacaactcaaaactctaatattggtagcagaaaatg

SEQ ID NO: 13954 - DNA, 180 bp, Arabidopsis thaliana columbia
tactgcaggttgtccactcattttcttccctcggggcttatctttcctccgccgtcgtcgttgccttgcagaataagaaaccactccatccctcctcatgaaacatccactctttatcgccgcgatcgtcgttggtttgcacgtgggatttcacaattacctctactcttacgggttagc

SEQ ID NO: 13955 - DNA, 590 bp, Arabidopsis thaliana
aataattctttactcaccctttattttttcctttttgccaggttacggtgagaacatgagtagtcgcgcaaatccgtctcgcttatggtgtagtttaggaacctcgagtttaatttattttattgttattttcttatacatttattcaatggttttcaataaatttgccaaaccataagtttattcaacaacaaaaagtttgtaaaatattgtgactttaaaagttgaaaattttgaaatgacatatagaaagtgtaattgagaactaagactgatcgagtgctaaaccattagcaaagtccctcttcgtctcggtttttcctgacaattgaatgtagccgaagcggtttctcacgttcttatcggtaagtcgtgttagcttggcagataggatatgagtctcactgtgacgcctcccactgcgttctcgccacagactatcaatcgtaatttgaaatacattttgtagcgtgaacgtatgaagttttggctgagaagtgtcaagtaagatgtgaggagtttaagctcctacattccgtgtatcgattttgaagaatgcctctagcgagatgacaccaacttgagaatag

SEQ ID NO: 13956 - DNA, 592 bp, Arabidopsis thaliana columbia
taactcgtttcagaaaagtcgaaaagtaaaaccaatcccaacaaacagaaatagagatcacgacatacaacattcaagctaaataacaaacacctacaaaagagtaacaagaggcctacttttgcctgatggtcttcattacatttgcatactgttttacggcagctgggtcctctggatcaagggtgatcttttccttacggagaatatcaacagcagcctggaatttgttcttgatatcaaaaaagacacccttcaacatctctgtcaaaaagtgtaaaacttgagtcaataatagtaaacagcaatgcttcttcactctaaacacatagtacagatttcagcaacatattaaacataatccatcataaactggatacatataaaactcaacaaaagaagtaagcagaacaacagtcctagcaatcatggcctgggtttcacaagattatattacattgaccaatatagtttttctacacattcgacataaaacccgtgacttgacatattcttaagtagtcacgatgttaaactcaaaagcacgaagggctaaagacaggaaagcaactgttttcaactaggtgtgtta

SEQ ID NO: 13957 - DNA, 622 bp, Arabidopsis thaliana
ccaaatggatagaaatatctaactagtgattctgtataaggtcattagttgtttacttgattttctctgaatgttctcttctgttggttttaccataaagggcttctgaaagtagtcgaagatgttttgaggcaggagcaggctacacgtcctaataagccgatatatctcgtgggcgattcctttggaggatgcctggctcttgctgttgctgctagaaaccgttcgttagacttggtgttgatactagtcaacccaggtcagcaaacatttatttaattttgtagctttgtatctaaacgcatacttgcatataagcttttatgaatgaccaaacacgttttctccttttttagctacatcatttgataggtcaccgctacagccgttgctgcctatattagagatggtgccagaggagcttcattttactgttccatatgctctaagctttattatgggtacatgaactgatgtttattgtataagttaattaagtccccttttgtcttcttaaattgtctttacttaagctttcttggatttataggtgatccgataaagatggcgacacttggtatcgacaaccaacttccaacaggagtaaaaattgaaaagttga

SEQ ID NO: 13958 - DNA, 580 bp, Arabidopsis thaliana columbia
gtccttaggtgacacaacgtcaggaggttcatcgtctgttatcggctcggtgatcatgcacacgaaaagtcccttctggatgctcggcttgtcaatgcactcaactggaataactcgcctgaggtccggatcagatgttgaagctaatattgcaagtgcgtcggctggagcgttcgcacttcgaggaattttatcgagtgcaaaaacgtcgaaggttttcgccagtccttggacaatttgtagataggcgtccatccgttcgttttttgcttcatactctccgttgtactggcttgcgacgagctgggaatcacagtaagcttgaaactggtttatgtcgaggcttttggccaaacgaaggccggcgatcagggcttcatactcagcctcattatttgatgcttcgaaaccgagccggaaagattgttcgaggatttccttgttggagaggttagacgtataccgacgcctgaaccgagctgggaagacgctccatccacgtgaagactccatttctcgctaaccgggagccgttcgctaagctcggcgggactcgacgatgaaactggtacacttggga

SEQ ID NO: 13959 - DNA, 514 bp, Arabidopsis thaliana columbia
acattaatttaaaagcagcttccacgaaagaaaaattcgcaatcacaacatgatctaaattttgtggaaagataacgttctgccgagaataacaataaaaaactttagaccaaaacaaaaataaacaataaaaaactgaaatttatctagtttaacccaaatatagagaaaaataacttaaaaaaaaaacaccctaacattgtggtttactagaataaaggaccaaatacctattttatatttaattctatttaagtaaaataattaacagaagaaaattaaatttaatagaatattagataaaaaatacaaacgaaaataaaaaattcaaaaacgaaaacaattactgatctttggtgaagatagacatcaactcatcgacaagttcttgatcatcatgcttactcacatacctttcaagaaacacctcatcgggacatatcaagacagaaaacattgaagagacttcagttttgagcaatcttttggacgtaagagctttgataacattgca

SEQ ID NO: 13960 - DNA, 627 bp, Arabidopsis thaliana
tagtaactcccgccagtgtgctctaaaggtgtgccgtgggcctacgatgatgagtcctgtgatgtggtgcgcttcttcacgcaactgaaatgccgcatgatgccgtatctgtatcgtgaagctgcgcgtgcgaacgcggggtgtacgccgatgatgcgggccatgatgatggagttcccggacgatccggcttgtgattaccttgaccgtcaatacatgttaggcgacaacgtgatggttgcgccggtgttcactgaagcgggcgatgtgcagttctacctgccggaaggtcgctggacacacctgtggcacaacgatgaactcgacggtagtcgctggcataaacagcagcacggcttcctgagtctgcccgtttatgtgcgtgataacactctactggcgctgggcaacaacgatcaacgtcccgattacgtgtggcacgaaggcacggcattccacctcttcaatctgcaagacgggcatgaagccgtctgtgaagtgcccgctgctgacggatcggtgatctttactttaaaagcagcacgtactggcaacacgattactgtgactggtgcgggcgaggcgaagaactggacactgtgcctgcgcaatgttgtgaaagtaaat

SEQ ID NO: 13961 - DNA, 450 bp, Arabidopsis thaliana columbia
tgaattcacacaggtttgtctgtggataccgcttattgatttgaaagggcaagctgccaacaggctgtttgcaaaactcaggaggtaagcaatgaggacactactttcggtgaagtgggggagttaaagtcacctgctatgcagtgactcttatccaggcgaacgcgttatcagaacgcgtagttaaagttagtaccgaacagccaggctttaccttcagactcgaactggtatgggccttcgttaattttcacgctctgaccgtgcatataagaaacaccaacgtcgactgaagcatctttattaaatgcgtaagtcgtacctgcactcagccagaaacggtcctggtccggaatggagatagaacgattctgtgcaggaactgggctgtcatcaaaggcgataccggtatcggaggtccagttatcatcgtagtaataagtggtacca

SEQ ID NO: 13962 - DNA, 551 bp, Arabidopsis thaliana
ttgtagcattcggtaataccgcccgcgtgggagagatccggttgcagaatcgaaataccacctgcctccagcacgcgtttaaaatcgaagcgtgagaacatgcgttcacccgccgccagtggaatatgcgtttgtgccgccagtttcgggtagtattcggcttgttccgccagcaccggctcctcaataaacagcgggcgatacggctccagttctttaatcagcactttcgccatcggcgcgctgacgcgaccgtggaaatcaagaccaaactcaatctgattgccaaaagcttcacgaatttgtgccacggtgttaaccgccgcatctaccgcgcgggagttatcaattagccccagttcttcacaaccgttcagtttgaaggtatcgaagcccgatttcgcgtagcgttttaatgccgtcgataacatccgccggacgatcgccgccaacccaactgtaggctttaattttgtcgcgaaccaggccgcccatcagttgccagaccggcgcattcagcactttacctttgatatcccataacgctttag

SEQ ID NO: 13963 - DNA, 547 bp, Arabidopsis thaliana columbia
atttccccttgggttgttctttcaaaccgacgcaaccgaaatggaaccactcaatcttgcactgcattgaattttattttcagtcttaaagagtgtctcacaatgtgaaaagagacattagtttcaagaagccataccgcattgttgtcacacgcaaccatctcgccaaagctaacttggttgcagatgcagtaagttggttcgtttggatccacaggcagatccagatccatattacttgaagtcatcccagttgatgctgctgctgttgacgctgctgttgctagccttgtcctgtcacaacattaaatggatggtttcattggacctaagcttgctgaggtttaggcgatgtaatttattgagcaacatatgctatgatataaaagatgaggctgaaagcacgctacttctttcgccctcctcttccaccttcaccagcattcccggctttcccgttgttctcagttctaatgtcgcagcggcactttctttctctgatagaaaacacacagttttatgtttattactgaataagataagagag

SEQ ID NO: 13964 - DNA, 625 bp, Arabidopsis thaliana columbia
taaaatttaaatatgatgttaaaaaatttctagatatattttccatattctaagtattttattaaaaccaattagaaatataatataaggatgtctaagctaaaaaaacaatagttgaatttataggtttctaagcggccgatagaaaggtgataagaattaaccattgttccattgaaaaaacaacgaagaaaggtgataatgtgagtgaaaattaagaacgtaccgaagtaagacttgagagctgttcaacggaagggacaccatcttggccacaaacttgccggacctcatcgcggacattgtcctgccaagtgggattatgagcaaggagcatgagagtccacgtgaggagaagagaggttgtctcatgaccggtaaagaagaaagtcttgcactcatccattatcatttgaacattaaggttgttcttgttgctatccatctggttcaaaagaagccctaagaggtcatccccgtatgagctactccgaccgatctctacactgtcttttcggctgtctataatctccatcaaaagactgttccacttccgttttcagagactttattctctaatgtatttgctaggtagaacctttgagacacaaagattatatagttc

SEQ ID NO: 13965 - DNA, 1099 bp, Arabidopsis thaliana columbia
tgaggcaaggactttttgctttccctcttggcaccttcctcttcacataatcagattactaattatcaggttttccattttctagcaggatattatggaccaaacaatggatcacatcctagtctgtacagatgaactatttcaggcaggtgacattggaacgccaggcaccacatctccagaggctaaccttagcaagaaaccgactacaagtaacggcaaccaaccaaaacgaagaaatagaaatgctcgtgatgatggtgagtggagaggttgagttcattacaaatgtcaacccaacatattgaaatcttcatgtgtagctctgcttgtggtaacagtgcccaatgaagcattcaagttttctgacattgttttaatgcttcatgcagcttctgaaggatcaaaggaaggaggtgtactgaacaaggtcgatatgctaactgcgattataaagttttttgttgagtctacagagatgggtctagcttccaactttcaagcaagtatgtttaagttttcatctgcgtatctaaagtatgtcatctccattttcaacgaccattcaaccggtaagttagaatttgaggacgctgatatgaaggaaatgattctgtgtacaaaaagctccaccagttatgccggaaagttcataaacctagtgatgagacatgcaaccgaagcttcacgccctttgtttgaatcatttgaccttgcaaatgacctgcttgatctcttcaccatggttgagaaatcgttaggctcggcttatgcatcaagaattgtgtcagctttaaacccttggattccagatttggttcttgcactaggaccttgtttcatcaacaacgacagcgaagaaagttcatacaccagctcattcaaccacatcaaactctgctttccttcatggcttcttacatgtgcgaagatcgaactacatgaaattaacaaagaagatgtgactgagacctcgggtttcctggcattaaaaaaactgagacacactatatttacattggtgaaaggtaacaccaaggtgttagatgcaattggttatgtctattgatatgtttggcagtctgtatagagaagaggg

SEQ ID NO: 13966 - DNA, 749 bp, Arabidopsis thaliana
acccaacaacaacagccaaacatgcatatcttaacctaatttccagatcggttacaaccttcatcatgagcatcgtaataactctttccaccattacatcttcatcgagaccaaacaaggaactaaaataagggatccgcattccagtagatcctttcttcacctttcacgaaacctacgggcaatacccacaaggaagcccggtgacgatcttgaactctctcagcgagaatctaaccggagtactagcgtacactatccaaatttcatgtggtttagcaacttccaattgcctactcagtaaaaatagactataactcgccgaaaacgccggtttattcggaaaatccatcaacccaccaagcgaactgttaatgatgaatgcccgctcttcgtcatcaagtgcgtttatgatgctgcaaagagttttgattttgttgtagacattaaccctcttgcctaagggtttttctccaaaggcaatcaatcgattaggtagttcaacttcttccatctgcaaaataagatggggatttgtcataaatcggcaaaaaccacagaaattcatcaatcaaaaacccaaaaaatcaaatccataccatacgatcgagactcagcggagtataccgggtaaacaataaaaatccgattgaacaccaaatttccttctatgaacggcagtttagactttcgctctctctttgggactctaataaatgaatatgtgaacagatgagtgtagaagaaag

SEQ ID NO: 13967 - DNA, 593 bp, Arabidopsis thaliana columbia
gccagtgtgctctaaagatttcttcgggttggtatcgatagcgataatccgacccgctttcgcctgacgcgcgccctgaaccactgccagaccaatcgcgccaagaccaaacacggcaacagaatcacctggctggactttagctgtgttgtgtaccgcgccaataccggtggtcacgccacagcccagcaggcagacgtgttcatggtttgcttctggattaatttttgccagagacacttccgcgactacggtgtattcactgaatgtagagcaccccatgtagtgataaagcggctgcccgttgtaagaaaaacgggtggtgccgtctggcatcaggcctttaccctgggtttcgcgaaccgcaacacagaggttagttttgccagaacgacagaactcacactcgccgcactccgcggtgtaaagcgggatcacatggtcgccaggtttgacgctggttacgccttcaccgacttcaaccacaacgccggccccttcgtgaccgagaacaccgggaatacaccttccgggtcatcgccggagagggtaaatgcgtcggtatggcaaacgctggtatgggtgactttaat

SEQ ID NO: 13968 - DNA, 463 bp, Arabidopsis thaliana columbia
tgcacagatgactcttcagccagtaaacaaagtaactttcctttcactgaataactcatttataggtgtatttgaggagtagggactaattgttctgagcattttgttgaacagtatgacagagatgcattgcttgcttctgacatgggtcttaagctaaacagacaacctaatgaatttttctgcaaaactctcacggcgagtgacacaagtactcacggtggattttctgtaccccgacgagcagctgagaaaatctttcctgctctggtgtatatacaatactttcttatacatctgatagttagtacctctgtattgccttagtttcttacattgttggcaatattttactaggatttctcgatgcaaccaccttgtcaggaacttgttgctaaggatattcatgacaacacatggactttcagacatatttatcgaggttcaccttgtttttggtaga

SEQ ID NO: 13969 - DNA, 876 bp, Arabidopsis thaliana
tgaaactccaaagtgacttcatttcaaatgaattaatatacaaagattttttacaagttttgaataacacataatttttatgaagaatttaaaatcttagttgaataacaccaaactttaaaatctattaaacatgatttacaaatataagatccaatttagaatcattaactgaataacagtagattagtgctagattttagttctactaagatctatgattgaatatcaccccctaaactacaaaaaaactgatactccatatatagtgtttgtacttacaagttacaaatatagaggtttaagcaatttttatttaatcataatccacaaaggtcgaacttacgccttggatttaaaaggtgtttttttttttgattaattcttctcttaaaatcatctgagtacggaccattattcttgaaaccatcacaaatagatatttatggaaaagagctatgtggaatgttgtggagagctttacattagcaaaatggatagaagttaagtcattgggagacaatgcgtttgtgattgctaccgatacttgtttctcggttttggctcatgagttttacggatgccttcaaaactctatttacttcacagacaacaaggatatatttaagctagacaatggaccaatggtaatggtagtattgagataatgtcagaactttcgcagagttgtttccaaatgtttgttcctagctttctctgaatcttgtttaggtcaaagctaccttttctttttctattaagaataccagtcatcttcaataaataaaccttaattttcatcttcattttcggtaaggatttagttatgtattcttgcctccaaacttaatctatgacatgtataacatttgtaaa

SEQ ID NO: 13970 - DNA, 1316 bp, Arabidopsis thaliana
ggaacctaggcacccagagacgaggaagggcgtaatctttccaatgcctaaaaatggtccgacataacttgcaaaggcatcgcaacacaataaaaacatgtcaacatcacacacaatgtaggtagatgttttaatctttattttaaacataaaataacaataagcaagagacacaaccgcgggaaaacaacaactcaataacgaaccacttcctattccacaaccacaaattattcttctcgtattgatttttctcaatccagaggaagtttattgagcttgcggtaactgtaatccttgaaagcaaacggtttaaactttggaggattatcatctccggttagttccggtaaaggtccaacaatcttttcacggggaggctccaagaaaaccggccacgacatcgtcgtcttctctttatccaccgtcgtcgtatgcaacacatttttatacgtcccattactcaacatctgcaaaattcacaaaaccaatgcattaaaaacattttataaattaatctacatttttatacaagaatcataataaagttcgagaccagaatatgatcgccgatgtgaacaatgacggcggagggaatatactctgcatcgaaccagtgatcatctttgaaaacttgaagtccaggaacttcgttaggaacaagaagagtgattccactgagatctgtatgagccggtacacctaaagctaaatccggccgaggacacggcggataatagttaatcttcatcatatactccgccatctctccgccgagaccttctttcaacgcatcacgctttaaccctaatccatccgagagaatccctaataacgtctccgatagcttcttcacatgcactgcatactcttcattcacctccctaatacattaaaccaacggttaacttcggtttacaaaatttgaatttttgatgattctgttttggtttacctgtattcaggtggattcttaggccagaatctgtaattgacgcatgacggtggccagattcgatggaagagatgatcgacccaagcttttttaccttctggatctttctgaagctttgttccgtatccttcaatgtctttcgaatcttcgggtttagcgacggattctttctccgacgaaggaagctcgaagaattttcttccgacgtcttgtaaacgtcgtatcagctccgtcggaatcccgtggttaaccacttggaatagcccccattcttcactcgctttcaccaccgcgcgcctcacgctttcttcgtcgggatcgcttagatcgacgacgggaatcgccggcgttgggtcagggg

SEQ ID NO: 13971 - DNA, 968 bp, Arabidopsis thaliana
gttctcattgatttctaattgcaggcattttggtatggattgggcatttgttgatcctgcaacacctgttgaaaccggtaagaagttttgcatttgcgtgaaagaagttcttccatgggtgatgcttcctctacaagtggtttatgttgacgaaagccggaaatcaagaaaaggccctgcgcatttcggttacggaagcggtactcttcagggacatttactcgctggagaagaaaagttttcgatagagcttgatggaaatggtgaggtatggtatgagataacgtctttctcaaagcctgctcatttcttgtcgttcctcgggtatccttatgtgaagctaaggcagaagcactttgctcgtcattcttctgaagctgtgctgaaacatgtcaatgcttcgtgatgacatcgaaaatgaagatatttgaataaacactttgtctataccaaaaatgaagatgaaagggaaggatttttattcagatggttaatactcttaatacataaaatatagctttgacctaaaacaagatttagagaaagctagggacaaacatttggaaacaactctgctcagattccgacattgttgtgatactaccatcatctagcttgaacaccttaacctcttcttcctttttgtcggtgaagtaaatagaatttggcaggcatccgtagaactcatgagccgaaaccgagaaacaggcatcggtagctatcacaatcgccttatctcccaaggacttgacttctacccattttaacagttcttcatcattcttgtaaaccttgaaacctatcgttttgggagggtcacgttcaaatggtttacaacttacattcccaagattgtcgtgtagcacatggataaagcgatgaccctgagcagcgaagaaatcatcattgccattaccatcttcgcagagatcagcattggtataatcagcattccggaaatgaacaat

SEQ ID NO: 13972 - DNA, 435 bp, Arabidopsis thaliana
cgccagtgtgcatgctcaacctttgaatgtgaattgatccattcctatctccttgtactattcaccgcactgttgacggtgtttttctcggtagtcgcggtgattatcgaccaacaactgttttcgccaattattcagtttgtgttgcaggcatcggaacatgctcagctgtcgctgttctatattttcaacggtctgctgtcatccatttcggataacgtcttcgtggggacgatttatatcaacgaagcgatacgacgaatggaaagtggcgctatcacgttgaagcaatacgagctgctggcggtcgcattaataccggtaccaatcatgcctccgtcgctacgccgaacggtcaggctgcgttcctgttcctgctgacctctgcactcgcgccattgattcgcctctcttatggccgcatggtgtggatgg

SEQ ID NO: 13973 - DNA, 1890 bp, Arabidopsis thaliana
cccgttgataaatgacgttttatttatgaattctaataattataacactatggtaagaaataggggaatcacattttcaaaatcgtaaaaacatgaaacttttattattaacaacattttgaacatttgatgaatacactaaatggtaaacaaaaaaaaaatcatgtttttaaaacatggaaaagtgaggtgtcatttcatcacaattaaaaatcatgacatacatgaatgacataaaatggaatagaatatgaaagaataaatgtaattattacttatgtttttcaacaatgagtggataatttttagatttatttctttaaaatgttaaaacacataccatgcatgttaaattgttaccaatttcgaatctaacaaaatattatgcattcatagcaccaataaacatggaaaccattaatgatataataggatatgtatgaataaaatttagtaattattgatgaaataagtcaaagttttaattatattttatttcttttaaaacatttactataaacacaaccatttggattttggagccttaattgctgggatacgaaatcctttcacgtctcttttcaaattccaaacgttcactatatattatgtggctcacacacaactaaagtaacgaaacaaagtgagacagagcaatggctgattggtctaccttaccagtggatctcctcaacatgatcgccggtcgcttgttctctaacattgaactcaaacgtttccgtagcatctgccgttcatggcgctcctccgttcccggcgccggcaagaaaaaccctttcaggacccgtcctctaatcctcctcaatcctaacccaaacaaacctctcaccgaccatcgccgacgcggcgagtttctctcacgctctgccttcttccgtgtaactctctcctcctctcctagccagggctggcttatcaaatccgacgtggacgtcagctccgggaaactccatctcctcgacccgctctctcgccttccgatggagcattcgcgcaagtagtcgatctttcagagttcactatcaccgagattcgagaagcttatcaggttcatgactggcgtacgagaaaagaaacaaggcctatattcaaaagagtggctcttgttaaagacaaggaaggagataatcaggttcttggaattcgcagtaccgggaagatgatgtaccgggacataaaaacatggaaagccaaagaagagggttatgaattctctgacattatagttcacaaagggcaaacatacgccttggattcaattggcattgtttactggattcgttctgatcttaaattcattaggtttggacctctagttggtgactggaccggagataggagacttgtggaatgttgtggagagttttacattgtggaaagacttgttggagagagtacttggaagagaaaagctgacgacaccgggtatgagtatgcgaaaacggtcggtttcaaggtttataagtttgatgatgaacaaggaaaaatgatggaggttaagtccttgggagataaggcatttgtgatagctaccgatacttgtttctcggttttggctcatgagttttacggatgtcttgaaaacgctatttacttcaccgacgataccatgattaaggtgttcaagctagataatggtaatggaagtagtatcgagacaacgatatatccttatgctcagagttgtttccaaatgtttgttcctagctttctctgaatgtttatttaggtcaaagctaccttctttaattataatgtaaggataccaatcattttaataaaaaccttatctttctcttcattttcggtatgaaaaattatacagaagatgcaacatatctatgataaaatacaactgataaatatatc

SEQ ID NO: 13974 - DNA, 397 bp, Arabidopsis thaliana columbia
tactcgacccaatgatcgagtagggcttataaagttctcattttcgttgtttgaatcctgacctagaattgttactagaaaccaaccatctttataatctggcttgacttagttgcttctgtacacatcttgattgctagcaataacagtggactggattgacaacccctatacctgcatcgacatgttagtgtttaaggggaattgaactgaacctcacttcaacatataagtaggcgtaaaaatctacttatcaagctgcactacgagtccctagtcctaggcaagattttaagatcaaacctcaaatcattggccttgtgaagcaaaacaaattccctggtttgaacacggagcaccctatggatcatatcgacctcttcgaagaaatctgtag

SEQ ID NO: 13975 - DNA, 519 bp, Arabidopsis thaliana
aacttggcataggatgtgtattgattatagaaagctaaatgttgcatctaggaaagatcattttcctttaccattcattgatcaaatgcttgaacgcttagctaatcacccatattattgcttttttgatgaatatagtggtttcttccaaataccaattcaccctaatgatcaagagaaaaccactttcacatgtccttatggaacttttgcctataagagatggcatttggtttatgcaatgctcctgcaacgtttcagaggtgtatgacctctatattttcggatttaatcgaggagatagtggaggtcttcatggacgatttctcggctatagcccttccttctcctcatgtttgttgaatcttggcagagtattgaccaggtgcaaagagactaatcgtgttctcaattgggaaaagtgtcatttcatggtgaaggaaggcatagtgttggggcacaagatatcaaagaagggtatagaggttgacaagggaaaaattaaagtgattatgcaat

SEQ ID NO: 13976 - DNA, 587 bp, Arabidopsis thaliana
aactcttgcttgaaactctttctaggaaaacttaaatccagatggtctggccccttctgtatcactgaggtccgtccttatggagcagtcactttagctggtaagagtgaagacttcacagtaaatggtcaaagtctcaagaaatacttagcaaatcaaatccttccaaaggtgacatcagttcatctcaaggaacttcttgatgattaaaggagtaaaggagtcaagctaatgactttaaacaagctcacttgggaggaagtcccatgactatctatgtaaataaaattttattttcttgttatttttgatttgtcttggttgtgtttgtggttctcaggaacaaacgaacaacgtggagatagagtaaaaattcaaaacttttactctacagaaaacctggagatcgagtgtaaagcccgttggagtacaaaattttgaaaatcttctgttgcacctggagaccttgcactcgagttcattggtcgagtatgtgtgatatttaaacccaaaaacttttaaatcatcattttactcgaccaacagaagctacagagttttatagggagtttacaagtttcagtaga

SEQ ID NO: 13977 - DNA, 479 bp, Arabidopsis thaliana
  unsure (1)..(479): unsure at all n locations
ggtctagtgccatggcccgaaaaatgtgtatatatataaaaatatgtatatatatatatatatatatataaaaaaacccgtgattgacggtttgtggtcggggcgtgtggtgctctcgttgcgcgcgctctcgcgtgctgcgcgcgtngtcgtttggcntctggcgcgtcagagcctggtggttgggactgtgtggcgtgataggttgggcctccgccgcgccctgtgcttcctcctcgtccgtggggtggtgttgttttggttccgggttcgttgcgggcggcggcggcgttttcttgggctttgtggagttcccgtgctgcggtggcgcgtcccgcgtcttttcctgggtctgtgtgtcggccgtcgcctgcgggtggcgttgttgcgcgttcttggggcctcccttcggggttcgcgtgtttgggttcgcgtgtggcgtgcctcttggtggccgttgtggttcttttgggtgtgtt

SEQ ID NO: 13978 - DNA, 497 bp, Arabidopsis thaliana columbia
ctcgggaccttctccttagggaatcttttacatcctaatgcgttatgccctggttcaccacaactcttgcaatgtatgatcttaccttttctgctaagcttttcaacttcatttttcttcctttttttcttttttggcgactcattcttccctttgatccttgcaaacttcccttttttaggtttttctttctttcgtccaggcaaaacaggttctggtggtgcggttaccaagctgtaacctgcattcatccaatacttaggtccccttaatggcatggtggctgtctcatagttgtgtctccacatatctgtcgagaagaaccggatatgtagttctcagcatccaaaccagcatttatcagagcagcataagcatgctcacaaggtatcccacttatttgccattccacatgaacactgagatttttgcagttcactctatgactatttccatctatatacacgtcagaaacacgatgtgtgcaacgatatact

SEQ ID NO: 13979 - DNA, 540 bp, Arabidopsis thaliana
ctccctttgatgtggcgacagggttcgccaacccagcctcgtcgtcaacgatcggatgatcacggtcgtgagtgttagaccagtggcaaggcccgcttcccgcggaacctccaccagagttggacgtctgcctcactttctgagtccggtttgaagacctgcccccacctctggagcctcgtcctccgccatgggacctgcccgaggaccgcctatccgcggacgcagctgcgtccgggatagcagccgcagattctatcctctcctctctgggagaggcgaccccctagtcactcacgaccaactcagccgccggatgcacctccggctgggtccaagctctcttcggagaggacggtgcacaatcagaacgacctgctacagcggaggccccggtattgatctcaggaattgagggatgagatgctgaggcagatgcgctggagacagctagagtgtgtcgagccgcagtcatcgcggtcgatagatcatcaccacgagcaggaccccggcgttggctcgttgaacacgaagacttgg

SEQ ID NO: 13980 - DNA, 579 bp, Arabidopsis thaliana columbia
  unsure (1)..(579): unsure at all n locations
tcccctaaatactatttaatttattaatactgttaattaatgattacaaaactgaaattgagttttgatgattttaatttaatttttgcaatttttttttaggttggagatggcaacaccgaccattactgttggcagagaccggaagaaatgacgacggaccggaaagcttacaggatagagtcgagtaatcncgggtcggatcttgccggagaaacagcagccgccatggccgccgcatcaattgttttccgccgatctaaccctgtttactctaggctactactcactcacgcctatcaggtaaaaaactttttatttccggcgcctttttactactattgaggaagcttacgttagcataaagtgtgggtatatttaattactacaggcagttacgtttaagaagtcgcagacacgttattattgcactgcagaactcagtagaaactcacttaaatgtcattttccgtgcacgttaggcgtttatttttttgaaggcgtcatttagtattaacgtgataatgacaaatctgataattatgtttactgaaattgttcttttgttttcatctgatt

SEQ ID NO: 13981 - DNA, 915 bp, Arabidopsis thaliana
taaatgcggaactccgtacttcaccttcccttcaatacttatatcaccagcatcagagacagcaccagcgaaatttgactccacattcaaaatctgaacttggatggaatcaacagggtactctggtgatgaatcaacaaccattcgttcctcactaatacgaagacccctttgtttagctatgaaatcagcattcaccaagttgacatatgaatctgagatcggttcaatgattccctttgtgatcattgcacgaagtagtctagtatccaaatcatctcggtcacgagctgaccgatagaccaccctaatggactgtactcctttacctccagatgctaactgcacagctaacctcccaagcttctcagctaagacaatataaggagtcaactcagacaagacctcaggagccaccattggagcattgacggcagtagctgataactctcctttcaatgcccctgctacagcctctgctatctcaatggctacaccttcctaaaatatcacattggaattatataaactcgaaaagaagtgtagagagatgaaacaagtaacataaacaagatcaagagagtgatgatacctgagcttcttttgtgctagctccaagatgaggtgtcacagtaacattttcatgctgaattagtctgctatctttcgatggtggttcctcacagaacacatctaatgctgcctgagcaacgattccggcatcgagagctctaacgagtgcatcctcgtcgatgacgccacctctagcgacattaatgagacgcacacctttcttcatcttagagaaagtttcgtcgttgaagacctttttggtggccggagttaaaggcatgtgcagggagacgaaatcggcggtggagatagcttgatcgaatgaaacaagatcgacaccga

SEQ ID NO: 13982 - DNA, 1073 bp, Arabidopsis thaliana columbia
  unsure (1)..(1073): unsure at all n locations
gctccaattagcagagatgatgaagctcaagtaaggattctttccacacctcctgtaatggcacctctggggattccattttgttcggctagtgtcggtggggaccgcagaacagttccagtttcgaccagcgcactgctatcagttgctatgacagtggtggattatcagatacagagatgctgaggaagaggatggagaatattgcagtaacacagggtcttggaggggtttcagcggagtgttctattgttttaaataacatgttggacttgtacctgaagaaactaatgaaatcatgcgttgatttggctggagctcggtccatgaatggaacgcctggaaaacacagtttagaaaaacagcagagccgagacgagcttgtaaatggggtgcgaacgaataatagttttcacatacaaactagcaaccaaccatctgacataacgcgagaacaacattcagtgtctttgcttgattttagagttgcaatggagctanatccacatcaacttggtgaagactggcgattgctacgggaaagaattcgatatctttattcgaggacgagaaggggttaaaagaaaatgcttggcatgttggatgctgcaaattgtctgagtaagctctctggtccaaaaaaactggccactgattttggtagcagaacgattcttgagctctgcatcccatgtggacatgatggctgattgacacaactatgtcctgcagccgcaaactcggggcaggttagtagatatgaatgaatacgtgttgttgtaagatcaaaagaaatttggccattcctgcgagtatcaagctttgtgtgtaaacccaggccgataaggaaatcaagagaaagttttggctgagatactgtgggttttaggcaagagcaaggtataaacaatcatgtaatagttgcagtattgctctgtatgtaacatagtcttagaattgttttagaattcatatcttgaagacacattgacatcacttttacatttacatttacatttttgttacctcatttcaatgaaaaagttattttcaaaatcagtaaaattgcctca

SEQ ID NO: 13983 - DNA, 551 bp, Arabidopsis thaliana
accaatcatacacttcatcgcccatagtagagcttcgacttcggtatgtaatggagatagacttcttcgtagattagcagctcccatggttggtggctctccggttgctgatgtacaaaaccatcatgtacctgaaaacttattgctttctttccatgatccatccacaaaacaacgatatcctgaataagtattatcatttgagatatctcgcacccgagttgttttgtccgatccgaaactaccttgaatttcagtatgaagctcagcttgagctaactaccacaattgtgcctctttctctgcgagacgtaatatctctagaggatctttatccacattttcaaatatcttctcattccttgctttccaaatataccaaattaaccacggataaaaagatgaatccacttctttaggtattcttgagaataaatgatccaaattcgcaagaatagagttgaaaggaaaaaatcttgggaccgtcgggatcgatgaaagagccatatctgccgggttgggtggcattgaaatagggtatgattaattgt

SEQ ID NO: 13984 - DNA, 599 bp, Arabidopsis thaliana
tagtaacgtgccgccagtgtgctctaaagagggttatcaggccgataaccaaccacaggctgcggttgtcagcggtgaccatcatgttatcgccgatcatcccccagaccatcaccgggatacccaccgccagtgcgacaattgcctgccagcggaacgcattcatcgtagcgacggcggtttcttgctggcgctcgcggcgtttagcgtcatcttcaatcgcttccgcgccgtagcccgctttttccaccgcctgcactaaatcttgtggggaggcactgcccatcaccagcgcagtacgctccgccaggtttacccgtgcctgagtgacgcccggtacgctttgcagcgcattttgtacgcgggtgacacagctggcgcacgtcatgccgctcagcagcaactgctggctgtcatcgtcatcggcggtcgctgccggaagcgcctcagaaaccgctgtcagtgcttccgacgggattgatgactccgcagcggtttagcctttgggtggcttacagatgcgtcataacccgcttgtttgatggtttcgatcagctgttctgcactggcagtcccggtaacgtgcgcttcagtgatag

SEQ ID NO: 13985 - DNA, 600 bp, Arabidopsis thaliana columbia
atgaaagcaaaaacaactcaaacttcagtgcatcgacaaaactttaagctatgaatcttatcggtgtcgagatgcaatgataacgattttgaaaaaccgggaaactggaaaaaccgtgatatacatagcccataaaggaaaagcaacatgaatgtcttggttatataacttcgctaaacggaagctctttcacaagctgcctgagggattcaaaaccttcactccaaatgatattcaatgccctacgcattgcctagcattcgtggctcatccaactaaaccgagatcaagcacaacttctcgatttaaacattggtgaatggcggacaatgccgagtccgcctccttactatgtcgaagccagacatcattcggtctttgtgaatggttccatctactggttcgaagtacttaatggttacaagattctatctttggatcttcacactgaacagttccatgatgtgtccaagaccgcgcgcattacctacacctggccgctagtcaaccttgaagatcttctagccatggttagtggcagtgctgaactttctgattggaaattagccatatggacattgataccaagaagagcatgga

SEQ ID NO: 13986 - DNA, 222 bp, Arabidopsis thaliana
gttacagccatcatacttccagatgtcgtagcctcagggcgcagttggcagcgaaattcctagccagaaaaatcggtggaggcttaaccatcgatgacttagtagcagacaaggccagaaccgagtaggtcaatgctgtggccaatcccgagcatgcggactccgtggcaaacctcgtcggatttcaacgaggccgaggcattcgcgaaacagatggctatg

SEQ ID NO: 13987 - DNA, 483 bp, Arabidopsis thaliana columbia
gatttgttaggctgcgacaaagagaccgtgacatgagaacacttaatcttagctgtacgatgtgatgacttccatatccccactttaaacctaaccctagccttaacaaaaacttcaaacccaatctttcccaacgaattttgagacctcaaatccttaccattggattttgaaacggcaacgttttccgcaatcaacgtttcatcaatctgcttaacgttcatccgcggttggtgaaacggctccactgtgtcgaacgcaagcgtctggtctttgaatttaacgaatatctcgacggaactgtagtaaaccagagattctgtggttagggttgtgcgattggatggtgaattggaatgtagctgacatgtgattgtcgttggtaaggttaaagttttgaaccgaggcgttttcaacagtgtaacgaagtttcttgggtttggttcaagccatgtaatgagaaaactacagctgccatgaaga

SEQ ID NO: 13988 - DNA, 574 bp, Arabidopsis thaliana columbia
gttatggcattattatgacataagtgacatatgattattaaatactattgatgttttaaacatagtttctgataccctatcatcctaatgctaaataaacataacagagataattatggatactaaaattctaaaatataaatcataggtattttttcatataatcatagtggggagattcttaagtttctgtactctctattaataccgtacatcccgaagaatcctatatgcagaagttgagatcatggcttacacaaacaaagtagcggttgcggttggagcagcggtggtgtttctcgcggttgtgatgaatccgcggtggacagaggcacaaacgtatccaaaattggatcggttatgtgtgatgataatccctgacattctggaagaatgtgtcacccacgatagactaaaacctacggcagactgctgcaacgatgtcataaatgcgactatgacgcaggttgactgtctttgtgacaactcctcgaaagtctcagtttctctgacctttcgagaactgtctccgctggagttttgaagaagtgtgacgtgtctcacaaatacatgt

SEQ ID NO: 13989 - DNA, 437 bp, Arabidopsis thaliana
ttctttttttttttttttttttttttgagacggagtctcactctattggcgaggctggagtgcagtggtgccatctcggctcactgcaacctccgcctcctgggttcaagtgattctcctgcctcagcctcctgagtagctgggactacaggtgtgtgctaccatgcccggctaacttttgtatttttagtagagacggggttttatcatgttagccaggctggtctcgaactcctgacctcagatgatccgcctgccttggcctcccaaagtgctgggattacaggtgtgagccaccgtgcctggactcctaactattttcattcgggtcttagctttttgctacttaaaagtctagtccattcctgtatttctttaataaaatacagagagaacctgaggcacagtagaatccatcttttagcccaatcatgacc

SEQ ID NO: 13990 - DNA, 534 bp, Arabidopsis thaliana columbia
gatttggccaaagcgacaagtcctttaccagaaacaagcaagcatttgttcagagagacatgcttcagatcagggcaaccatttccaacagcttcgagcccaacatcggtcatacctctgcacgacattactgagagggacttcagtttcttcaacccttttgcatttcccataacccagaagcctttctcattcacaccttgaagtccatgaagcacaagatcagtaacagctgctccgtagtgaccaataacagcaagagacaaaccagatacgttcagcatctggagtttcactttcgtcaagtaagaaccagcttgagccaagaggaaggcaacaccttgatcaccaatacgtgggcagctcctgatagagatagatctcagattgacacaacgtcttgcaatagcccttaaaccctcattcccaacaccagagcaagaatcaatcgtcagatcactcagattcacacagttctcagcaatagaaccaatccactgtcagttattcaggacaccgtgaaaggtcaagttt

SEQ ID NO: 13991 - DNA, 531 bp, Arabidopsis thaliana columbia
cataagacaacaattattctggatatcgttgttttgtgaatggatcttagaaagatagcgacaatttttctggcttaggatggtactgtacatcatcaaattgagagacgccaaccatgggagctgccaatctcagaagaagtctatctccattacatgcagaagttggaagctctcctctgggcgatgaagtgtatgattggtgctgacaactaagatgtaatttttcttacaaactgttcagatctggtgcagagggtgtctttcccaaccgaatggccggctttctctgcgtatttggaagagttgaagagcgacaaggatgagttcacaagtttttctctatctttaatctaccgtagtgctaatgttaaagcggatactttcgcacaaaaaattcgtacccaaccgcttcatattacatatgtaaacagcattcttcaggaatggctcgtttgaccataatttattttcggatgacaaaataaaataaaataaaagtctcatcaccaatatttctatttatgaagt

SEQ ID NO: 13992 - DNA, 609 bp, Arabidopsis thaliana
agaattagctaggaaacatagattcttatcttatgtctttcgtttgcagttgctaagctcggtgattgctagtctcacaaacttttggaaaataaaaaatatttgtacgatatttctttagtcggactctgacctaaattcaaagaaaaataaggtagcttggagtggtgtatgtaagcctagaagtgaaggtgggctaggtttgaaatcaatcgttgagatgaacaaagtttgttgtttcaagttgatttggtggatagtctcaaataacacctctcttttggttaactagatacgaagatgactaattcgctcagcttcgttttggtcggtcaaggcgaccacaaataaaggctcttggatgtggagggagggggttcatagaagtggtttgcacaccttttggtatgatgcttggagcccgcttggtcgtttcaacgagagccttggagggagggggttcatagatttgggaatcttatctgatgcaattgttacgttagtggttgctaaccagagatgcaagagtaaggcccttatctcttatcttaccaatttccacctcgattgatcttagaagagaagcttaagcaccaaatttaagccgtg

SEQ ID NO: 13993 - DNA, 1712 bp, Arabidopsis thaliana
tcatccttcttggcgacaaactaagctacaagaattctgcaaatccaaaggggttcacctaagtgtaagcattactcgtctcaccaatccatttactttctactttatacattcattgaatgattttatttttccaggcatactcgccattaggttctccagggacaacatggctgaagagcgatgttttgaagaacccgatactgaatatggttgcggaaaaactcggaaagagtcctgcgcaagtcgcccttcgttggggactccaaatgggtcacagtgtgcttcccaagagtacaaatgaaggaaggatcaaagagaactttaatgttttcgactggtcaatacccgattacatgttcgctaagtttgctgagattgaacaggtacgttcttaacatttcattgcataaacttagttgatctgcctctgctcttcctcgtcttgatcgtgtattgatagtaatttatttggattaaatgcaggctaggttagtcactggttccttccttggacatgagacactaagcccttacaagtctattgaagaattatgggatggcgagagatgatttgtagctgatcttaataatgggagctaggtttctctctctgatgaactagtcagtatctttttttttttaatgaatgttaaatttattcaaccagaaaaaaccttctttacattatatgcaactttgagtagaacatgaaactgtattgtgcttgtcagtttcttatggatgttatttatttacaaagtttttttttatagaaaaaggatctatttatacaattgcaatgtattatagtcatttcaaatcgaaaatgtgttgtttgcatatgtctgtgaacataccaatattcacattgcattagagctaaaaagtccgaacgagtattcaaatcctaaataatgtataaaatcaatataataaggatttaaccgaaattgaatgtgtcattaagtttttcttttggtgaaatatttcctgaaaaaaaagaaagaatatatttcctgaatttgtcagtaagttgtaacatattctaaatctcacattggggaaaagaaggtattttcaaaaaggatcataattaatctctttgtctaaccgagtttgagatggaacgatgatcagataagcatatcaatttataaacacttttggtgggtttaaatcaacatttacatcaatgagtaagcaattaacttgaagttatgcgattatatatatgagaatgagacacatacataacaaatcatgtatgcatgtaacatgaaacaacatcaaaaaaaaaaaaaaaaaaaacaccataagccatcaacaagtaaaaaaaccatctcaaagaaattattattcatacgttgtctcgccatcggtcattgctgcaacggccacctgggccgctatcgtaacagttgcagttgctgcagccttcatggctccaaagaaacctggctttttctttttcgttttagtcgtagttgaaactgcactggactccgattttggagaaccggagttcatgtatggatgatgattttgttgttgatgttgatgaccatcaccttgaggagtgtatggcccaggctgatgattctgatgttgatgttgatgttgatgaccaccaccttgaggagggtatgtctcagggtgacctatagactctgtttttggagaaccgcgaattcatgtatggataataattc

SEQ ID NO: 13994 - DNA, 341 bp, Arabidopsis thaliana columbia
  unsure (1)..(341): unsure at all n locations
atgaataaacgatgttctgcatgactttcatgggtgaacactcaggaactaaaatgcagttaacatctacctgaaattgtttgccaccttccgaacatccgtcttttttgcatctgtacttcaaaccacttgaatatcgaaaacaaactgaacaacctaagttcatatgcatgcgatcgtatattggatacgggtccatgtanagagggtggttgtgcgagcatgatccagtttccgaggaagattggcacatacctcgtggataaaaaattcacattcgatacaactgtagaaatcatgagggttgacaagacgcatacacggctgacattgcttttttg

SEQ ID NO: 13995 - DNA, 588 bp, Arabidopsis thaliana columbia
ataatttgccactttgataagctcaacaaagctaattagtaaagactttctggggtgtattgagttcataagttaaataaaatttgagttaattactcatattaatcttaacacactttcatacccaagatactatggctccaacgattagtatgacagtaatgttccactaaaatcaacacctacctgaagtgtacattttcaaactcaatgtttccacctttcagtacaagaggctttgcgtcacttgtatttgtgatgtcagatttctcctgaaacagtaagagaataccacataatcaattcaacatgccaggagtgcatactaaaaagcatgcatttaaagcattatcataaaaaaaaaagtgtttaagaaacttaaccaaatgcagagtttaaagaaacaattataacatcctcacatacctctagcaactggaacattgatttcatgtccacaaggctctgaattgtttcacggtaaacactacccaaaaaatttagaggaagagacagctgaaagagaagtccattcaccataacctgcatccccaaatatgcaaaagcttattagaaaacaatttggat

SEQ ID NO: 13996 - DNA, 452 bp, Arabidopsis thaliana columbia
cgacctcctcgagcctcccttggactcttacctcatacctatcgatttgttggagtcattatcaaatctatatcggatattcgagtccagttcggaatccgaggcatcgatgctctaccttgagcagtacgctgttctccgcagtctcggtgatgccaagctcttgcgtaggtgccttctcaacgctaggaggcacgccattgatgtcccttgtaaggttgttttgtctgcttggttgagattttttaggagagaacatgaacttgtgggagttgaatctatggattgtaatgggcttgcttctgaatgtccgaagactagtttgactcatggttgtgatttgaatggagacgacgagggttgtgaatgttctacggtatgtgaggatgaatttggtagtgatgacgttaaaatctctaaggctgatgagttttcgggtctagatgaggtta

SEQ ID NO: 13997 - DNA, 588 bp, Arabidopsis thaliana columbia
gaacatacccatcatgcgaaaaccgtatctttaacttgcacttttcacatttttacctttgcgtaacagttaggttcaggagaatggttggcgaatttcagtttatctcctttcctgtaagcatctagcacaaactgcagcacaatccaaaaacattttaaaatttgaagacaacctagagactagagagaaagagagttgggacatttcaaagctgctgagacgtgcctgatcgtttagattgaagagaaaagagcagttctcgcgatcgtatatcttcccgcgtttatctgcctctttatgtgagatcagctctcctgtgtattccccaaggtattcatgcttacttacactgttctgtaagaaggaaaaataattgttcttaaggcaagttcatactctaaacatagattaatctttgaaggacttatcagtttaacaaattttgaacctaagatacctttaagaaagctcccaaccagaaacatcagatattcaagtaaacctgaaattacataaaaagaggaggaaatttagccatttcatgtttatcaattgattgcagatcatgatatttagttacaaggg

SEQ ID NO: 13998 - DNA, 579 bp, Arabidopsis thaliana columbia
taatcaaatatccaagaacatatgtctattgctatagtaactgaaaaagtagaatagaatcttggggaggtgtttatttcttttcccctgtttaatcgtttgtaggtgataaagtggatcctaagtaagggacaagggaacacgatggggacgtacggacagttgatacgggcgttagatatggatcgtagagcagaagaggctcatgttatctggcgaaagaaagttgggaacgatctgcattctgtgccttggcaattatgcttacaaatgatgcgcatatatttccggaacaacatgttacaggaacttgttaaggttctttttcccccttgtcttcactgaccgaaaactaaataagaaaacattgcacattgatacttaactgaactagtaagttactttatttcgtggtgacctcaaacttgtgtttattttgttatgtgggttatgaagctattcaaggatctggagagttatgaccgtaagcctccggacaagcacattgtcagaccgtggctgatgcttatgagcttttgggaatgcctgatgagaaagaccgggtagtgacgaagtata

SEQ ID NO: 13999 - DNA, 478 bp, Arabidopsis thaliana
cagatagcattatatgtccatcttcacgaactaaaacattctcaggcttaaggtctctgtatatgatcccaagcatatgtagatactccatagcaagaagaacttcagcaacataaaatctacaaacaagacagcaaaaagatcaaaactttcagctaataacgaaaacattaaccgtaaagtctcgaatttttacctagcagcttgctcagggaagtactttccacgctgtttttgtctaagagaatgtaaatcaccaccaggacaaaactccataaccaaacaagaattcatctctgtttcgaaatgtgagtaaagcgtaggcaagaaaggatgatctaacgattgaagtatctctttctcagtctgagctctaacaagcttcttcctcgctgcaatagcagctttctccataactttcacagcaaaactcactccagttccaatcaactcagctaagtaaacattaccaatatca

SEQ ID NO: 14000 - DNA, 840 bp, Arabidopsis thaliana
tccgccggttttcaaaatttgtgaaatcgtctttatcatttgttatgtttccttattaatgttctgccaaagagacttgccacttgttgccacaagaaccctccgtttcattctagttcatgggcttcttactaatggacttatatctggaaaacattcaaaatctaagaagaaagcccatcacttaactaaacgtcgatccaatgtttacaagtcgatccaaacttgtggacggagaagataaaactctgcatagattagccatgttaacactaaaccatatgctaattaaagccacactctctcagctagctaacgtgtgcttactcacattgggctaattaatcttaaaatagagaatttttgcagctgaaggagggaataaataatactctgtcttccgactacccagacagcatacttgagtgattacataaacacagttacaaagatcaatcgaaccaaacacaaacactctaaataagatgcaagacttatactaaccatcaaagaagacactgttgtggtttggataatgagatcatttggatccgatagcagattctattgctacttcaaagccatggagttgtagatcatgtagtgggcagaatcaagatttgaggacaaatggcatgataaccaaagcaattgatggctccaacattctcataaccaggccgcttctatctccgcacaaagactagcctgatgtcaacgtctgttagatcatcaatcactgctatttctgttccatttaaaggagccaatgtcatcataatgtccatcatgaattgtttcttgagaattggtttaagaatctttcatctcaattttttt

SEQ ID NO: 14001 - DNA, 490 bp, Arabidopsis thaliana columbia
caacagttctttctccaccatcatcagcaaccacaaagaaaccttgatcaagatcacgagcagcaaggagggtcaatattgaatagatctatcaagatggatcgcgaagagacaagcgataacatggacaacatcgctaataccaacagcggtacgatatggtaaagagatgagtttacacggaggagaaggaggaagcggtggtggaggaagtggagaacagatgacaagaaggccaagaggaagaccagcaggatccaagaacaaacctaaagctccaataatcataacaagagacagcgcaaacgcgcttcgaactcacgtcatggagataggagacggatgtgacatagttgactgtatggctacgttcgctagacgccgccaaagaggcgtttgcgttatgagcggtacaggaagcgttactaacgtcactatacgtcagcctggatcgccacctggctcggtggttaccttcacggctggtttg

SEQ ID NO: 14002 - DNA, 1197 bp, Arabidopsis thaliana
gtactcaacatttcatacaaattccaagcttttttaatcctaatggaaacttggtagtctaataagggtgcatagttcgaaatctagggctgatttgaaaacattgtaaatctcaccgcaggcgctgcctctagggctccatctgcagttgagaaagtcacatgctttataccgttgtctttcataaatttggggcctagctgcaaacacaagttggataaacttcaaaacaattaaattgcattccggaaaaagattaaaagacaataatgagccaaaggaacacttgtaactcatcatacataagtgaatcctgtagcaactcgtaaaggtctttcctcggtccattgaggcatttgtgctagctccttcagagattttatattctcaaatattccataattgggtatctgaaatcatatgaaaagagcaatcaagaagtcatctgtattgatgataagccacaactacaatagatttgaacgtacggcaagggagagatgacaatctccaaagttgagagcttcgtggacaatgataagatcttcatttccctgaaaatagaactcgaaatctctaaattttgatgccaaatggccttcggaagacaagtctaagtcatataagctaacgcaaacagtatggtttagcaatgtcaaggaaaaccgcagaagaacaaataacaagattagactcgtttctttgtctctaccatgaaaatcagtataatcattaagcaccaggcaccagcactaagataccctagaatctcaacaggtgtctgctaatcaagatatatgattatgatgtcatttacctgaccaaattcaccaactatgtcaagaccaacgatgcctagatccagatctcctgatagcaactttctgacaatgtcttttggtcgttgaaaccaaacttcagtatttggtaactggaggacaagaagattgagattaccattacaaattgcgttacaccaaacaaacaatgatagattagtaagtcaatacgcgtttgccttctctctaaatgcatacctgaggaatttgagcaacatattgtcgtggattgacttgtttgacaaacaattggcaatccttcatgagaaaggggaaagtaaaagagttgtaaggatctatgagattgaaaatcatgcgttgctaagagatactgagagtgaaaaatcatttaggggat

SEQ ID NO: 14003 - DNA, 527 bp, Arabidopsis thaliana columbia
ctttgctcttccacttctccttcgtctctcggccatggtgaaccgtctaaaccagcacagctcacggaatcaagcgacggcggagaagcggtggagttttttcgtttctgttggaaatgaggttctgacgggtgaccaacgggagtactctctagcttgtgcgcagtggcgcgtggagatttcggcggtacaagcggttgctcttctaaactcggtcggggagtatcgtctacgatttcttccgccgccgttttagggtttgcaacatcatccataccctgaaacacaagcaatcaccaaaaacttaaacaaagttgatttctttgtgtattttagaacatttttctttattttcaacatggtctaaaattgaaaacaagagaaaagacacaattattacttcagggtctctcggatagatagctggatcggctccatcgttaccggcatggatctctggatcagctgtgcgaccagacgtggatgatcaaacgctaaacgcctttgagcgattggtcgaacacgtg

SEQ ID NO: 14004 - DNA, 484 bp, Arabidopsis thaliana columbia
cgaagtcaaattgaagagagagttaagactctgaaatcaaaattatagtttgcactaaggttgtgtatattgtcacttaccccagacaacctttccagctggtgtaacaagaccaagctcactcacattgacctgaaaaatccattcgcatattgagttatttgcaactttagcataaatgacaacttaatacgtaaagatcttggggactaacctcgatgattgttcccctggtcatcacaccgagtgatgtatacatgggaccgttaggattcttcttaatcccgatgatctcgagacagaaagtgcattttagttcagggtgagtgacgtgggccttggtgaaacgaagaccagatggacggatgaaacgctcgtactttggaggcttccttgtgaaagcacggtccacaaatgtagcttttgtaacatccgcttccattgtttagctgtaataagggaaagcattttcagtatttgtaag

SEQ ID NO: 14005 - DNA, 522 bp, Arabidopsis thaliana columbia
tcagatagctctctcttagataacggcctggtctttgaggcatctcattgggatactggtgcatggttatgagaccgaaaccgaggttacgtttgccaatctgaggaattatctggagatccggcgagtctcgaagtccgtggtggaccgatattatatttctcctgctaaaggtaggaaaattatcgaaggcttcctgagcaaagatgacgcctacaccgatcacttcttctttgtggccttagaggatgtcattcttgatgatctcctcgggaaagttctgacgaaatggagactttgggtagtttagattttatggtttattcattcgtgcctgaggtgattgttacgaccctttgcttacacaattttctttatcgcagatcgcccaattcgattcctcgagctgtgtcccgtagatctcgtctcgtgtcatcaagagttgttggcccggaagtgccattggacaaagcacttctcttgagagcgagttgaacgggcgcttcgattatttcatggtgt

SEQ ID NO: 14006 - DNA, 592 bp, Arabidopsis thaliana columbia
gtattgtatgggcaaaagacctgctctttgcaaagttgtttggcgacaagaatcaagataatgatcttaatgtgcgatccaacaattctgcaagctcatccaaagaaacagaagatgtatttgaacgttcagaagatgaagatattgagcagtatggtaggaagatatatgatcatgtgtttggttctaacattgaagcggctttgtccaatgaagagacatggaaaaatcgcagacgaccaaggcctatatacagtaaggatgtcttgcctgaaagtctgactcaacaaaatggaagcactcagaattgttctgttactgatggtgatttaatggtctctgccatgccatcgcttggcctgaagaatccacaggaattgtggggtctaacgcagaattctcttgtgttcatagaagcattgaagttgttcttcgccaagagaaagaaggtctgtgtggtcctttttgtaactctccttgtctatagataagtttcggtgcactgattaattcatggttttatcgatatgctgccacaggaaataggcgcgttacttttgacaaagatgatcagttagctgtagaatttgtt

SEQ ID NO: 14007 - DNA, 593 bp, Arabidopsis thaliana
  unsure (1)..(593): unsure at all n locations
cggtactattactatgagcataaccgcatccacctgaataatctgatggtttctcaacagcagcatcagaggaaggtgtttcttgaacaagatcagatgatgtatcatcaggtgagtatttgttgctggccgtaaaagctgcttcatcggacttgacaccattaacccgatcatcaggcttgtggaagaggcgacaaagaacgtaagggctttggccaggggaagtgccatcaagatccttaagagtgggacgatactcgtgcataatccaattagtccgctcacctttaggagctcgtccacgatagaagacaagagtcttcttcataccgattaaagtcttcttagacttgatgctacgatctttaccagtagctttccaatagccagagtcagttgctctgttagagcgatgaccattagggtatttccgatcacgagggcagaaaaagaaccactctggatcatccgtcttaatcaccgagagagctgccgacaatcagatttgttccaattgagtaaagnaaaaaaggtggaatctttgagagggaaacagaactgagaataaaggaacaaattttgagagaataaga

SEQ ID NO: 14008 - DNA, 571 bp, Arabidopsis thaliana columbia
ttgtcttacgagaaccaaaccaagaatcaatcttaagctgacgttttccagtgacttggtctttaatcaactggaaatcgagattcagatgcttgaagtcacgagtgagtttacctcgtggaccttcgacctcaatcaccttggcgtttaccttaatggcgacgcgtcggggatgtccatagtctccgaggacaaaatggtcttcattttttcgtctctgagggggaactttggagacgacggcttgaggtttagggtaacggagtttaagggtacagagagaagaaaaccctaaagcttatatataggtcgtctctaggttttgtttttggttttaatcttaaaaacaactcttttaaaaatcatttcattttgtcttttaattttaattttataaatttttgtattcattaaaatagtaaaggataacttattttattaaattttcaaattgaaaatacaaattcattataccaaaattgaaaatgccaatgtattcaaaacaaaaggagaaaatccctaaaaaagactttttaagtgtcaacatttgcattttaacttttaaggattt

SEQ ID NO: 14009 - DNA, 730 bp, Arabidopsis thaliana columbia
agatagggttgtcttgccacgtcatcaccggagacgctgaaaacgatgccgtattgatcatgtggccgtgtgttgtcctgatctcttggcctttgaggagaatgctgatgctgtgccattgctttgttttgtttttattcgaggcttcggagcttctttggtttgttattaatgggattttggatcttgaaagtaggagcttctctgtttattttcgatgtctgtttgacacgtggatgtttaactccacacttgtctttgccgcatgttgatgacatggatcgacctttttggatttgaattaacaaaaaaggtatttttgattttgctaatttttcttttgattggttagttaaattgatgtggaccttaaaaaattatatgagccctacttaaattttattttgagattttttttttttaattaaacacaaaagtcatcaaattgtactagtacatgcttgaataaataaaaattttgaaatagtaacagagaaattataacggtaacataatgatcaagatacaacgagagagtcacagaaaaacagaagataataagcctaaaaaaaaaacaatttggcaaaatgcaatcatcgtgtggttttcttatcatttctggttctttttctgaactctctcttctcttcagagtattgcttcttcatcaaaaggctggacattgccgctctcacagcttctgccgcagcactcattacactctcttcta

SEQ ID NO: 14010 - DNA, 419 bp, Arabidopsis thaliana columbia
ttgtctactcggtgtcttgctaggttgctctgtgtctcatggataatttcgttctgtacctgactggtgaccggcaatcttagagtctaggttctgtgttagtgactgctttctttgttgctaagcttgtggaatgcgctacacagaggcagtggttctttagggggcatgaagctgggcttgggatgagatcggtcctggtttcgatgatctatgtatacggggttgacccttccatgtcattcgaagcacaggacacactagtggcgagattgtattcctcatggcagttgatgctgacaggatctgtgcttttagttggtttatgcatgatccatgggtacttgttttacaagttagtttggccttatggatcttgtatcccagcctcggcttaggatcaattgcagcttttcctg

SEQ ID NO: 14011 - DNA, 484 bp, Arabidopsis thaliana columbia
tagtagaggatcccccttacttggtcgaaaggataaatctgatagtagttatgagatcagatgatttctcttcattctatagatgttcttgctgagatttgaatattaaatcttgcaaaagtgatctttttgtctgtgtttgtaagttaaggcacagaactttagtgcgtctgatattaatacgctcagtgatgatgttttatcatcagctatcatcaacatgggaagctattgagaaagcaatggggaagaaatcagttgaagatatgttgcgtgacgagatacaaaagaaagacactggcggcattcctccacgaggacgaggaggagggggtggcggtagaaatggtgggaataatgggtctggaggctcatcaggggaagatggtggtcttgctagttttggggatgaaactctgcaagtggtattagcaaccttaggcttcatctttctggtaaggacaagatcacaagcccgcacaag

SEQ ID NO: 14012 - DNA, 1237 bp, Arabidopsis thaliana
gtgttctcgtggtcgtaatgctgtttctcggagtgtctaaccagcagtccacccattctctcgcttcttgctctgccttgatgatatcttcctgccagttcccatccttgtgttgataaactaggaggtttctgctcttccaaattctccacagtagccaaagaggtaattgtcggtctatctcagagaggtaatgattgttgtaacactcaatgatggctctgaatttttccgtgaacgtgtccaaatgggttaaagttactcctttgtagtccaacattgtgcctccatatgtcacgaacatagttacagtcgaagaatagatgttcaattgactcttccgctatgccacatcgtttacattgtgaattggtgatgatattccttctcgcaagaatggtacctgctgccaacgcattagacaagattctccacatgaagtgttggatttttggagctgtcttcattttccatatggccgctttgaactcgtgtagtcccggaggtggaatgatattcgtttcgtttcctggaaggtgagttgcgagccaatatccagatttcacagtataaaatcccgaatcgttgtagtgccatcctagtaagtccggtgaatttgtagggctaagtttgatgttgaggattgtgtgaatgtcttcaggtatcactgtttctctcaaccgatcaagattccatccgttcctttgttcgttcatcaagtcgcacacaaggtagtgattttccggtgttcccgccaatcgatttggtggtctcggtggatgcaacggtagccatgggtctagccaagcacttgtgttttgaccatttccaattagatacttcaaaccattcttcagtagttctcttccttccagcaatgatttccaaataaaagaagccttgtatcctggtccagcgttcaaaatattggtgttgggaaaataccttgcctttagtagctttgagaggagactgtttggtgattgaagtatcctccatacttgtttccctaacagtgctaaattgaacttctcaatatctttaaatccaagacccccttcattttttggtaagctcatcctcttccaggaaatccaatgcattgctcttctatcacggcttttactccaccaatattgtgccaatataccatttatttcatcgcacgttccttttggtaacttgaaaacgttcatcgtgtagaccggtaaggcaattgctatagttttgagcagta

SEQ ID NO: 14013 - DNA, 556 bp, Arabidopsis thaliana columbia
aaacgattgggcaaaagtatatgttaaagaaaaattcaagcttgtgaaaagtgacgttatacccctactactactatgttaaaagactagtagttgaaccacacacaaaacttttccactttttttggtgaaaattcatacaaagatgggaaatgacattgaaagtgggtataaacctaacccacgatttttagcaacagaggtccctcgtgaaccccttacgaaatttaaagatctgacacatatgtcaaagattcgtgttccatcatcatcatcaccatccaaacaaaaaaagaatgaacagtttttaaccaagaaacttttgtctactatttactttttttgggggcatttacattttactggtattggttaggtctaagaggaaagattaacatgtagactagcggtctttggagatttacatataggacaagtgttgagtgaagagcccacacagaacatagacacatgtgtctgcacggtaacagtaacacacttgcatctcctttcccacagcttctacacatactcatccctaccctacacatctttt

SEQ ID NO: 14014 - DNA, 591 bp, Arabidopsis thaliana columbia
tgcagcaaaaatggcaagactgaagcaagctaaggaagaggcagagaaagagattgccgaatacaaagctcaaacagagcaagacttccagaggaaacttgaggaggtaaatgattttttaaaaagagaaaattgttcttagacaacctaaaatgtagtgtcctcactctaattatcatattgttgaaaacagacaagcggagactctggtgcgaatgtgaagaggctggagcaagagactgataccaaaatcgagcagttgaagaacgaagcatcgaggatttccaaagatgttgtcgaaatgcttctgaaacatgtgaccacagtgaagaactgagagatatttttataagaaagtaaaaaaaaagtttatgaaaaaagtgggagtcatttttgagtgatctgctctctttctcttttgtgagtatttctggatttgagagactcatcttatattattgttgctacttattctctgcttttttgtaatttatctctgtactcttctttttttttttttttgaaaaccatctctgcactcttctttgtattcatatatttggaacgttgtaaaataatttgagcgcagag

SEQ ID NO: 14015 - DNA, 597 bp, Arabidopsis thaliana columbia
ggagatccaagacccacaagcaaatagctctctgcaggtaacaaatatatttatcttttgtggattattgaaatagagtagagtagagcacatggaggagatatatgaaatctaaacctcaaaattgccagagagctcagatttgagctggtgaatgagatcctcatggtaaatctcctggtaagcttgtcttatgagcttcctctggaacaaattccggtgtcctaagatcgagatgatggcattttcattggttccccatcctaaaacgccaaatagaaataaagaagaggagtaaaggagatagcaagaaacttgatgaaccacataagttttgaaacactaatccaaagaaaagtagaaccttgacaagccgccttgatgttttcagcgtcttcgacaggggagaaatgtggaggagaaacaatggtggccattttgttttgtgtgtttctgcgtaagatatctttgactcagattaatcacttgttggatattgctccattgctttgacactcttaatttataagagttggtaatgatgttacaatggtttgaagagccagaaaatgtttcaaacggctcattgattgtttt

SEQ ID NO: 14016 - DNA, 572 bp, Arabidopsis thaliana columbia
gatatgttaataaacctttgttcccatatttataattttagaatgtgcttactttgttagcaatgttgttggagagccagtccaggccttcgtacagtccctcaccggtggtggcgcacgtgatctgtatgtacctgaagagatcaatcggagagtgttggttctctggtttgtgagctagactaatagcaaaggaaagcaacaaaggtcgatagatcatgatgcttaccagtgacgctgccggagagagtggagtccaagcttatcagttatttcagcagcattcattgcgtttggaagatcctgtttgttggcaaacacaagcagtactgcatcacgaagctcatcctgcaaggtagaaacattgataaggccagccaagtatataggagccttagatgatcatgctaatcagactcagacaagtctgtttagaacagcggtaacagcggtcaacatggtctgctactaggaaacagaaagtactcagtagaggttattattactagtacatgctaccataagcaatcatgcaactgatgaatgatgatagagcagaggatatgagatgg

SEQ ID NO: 14017 - DNA, 472 bp, Arabidopsis thaliana columbia
caaaaattgtatgtgttcagtgaacaagaacaaaacaaccatttagaaggtaaaacacttcaggagacagatactctagagacctcagaaaaaaagtaatgaaatctagaaaacaagctcatggggcttcattccttgtttcaatgaaaaccttgcgccaaggtaagtcttcaactctggaactgcttcaatggctttgatcaaagctgcatccacagctttctggtcatctttcttcacctgtgggatctccttcttctcctgtgaaatataaaagagagatgttatgtcaagcatatgttttggtttggaaaataacaagtgatataaagatattttcaatgtctattcttccggaacaaactgtgataaccaaatttaaaggagagaaacacaagatgaattgcgtcctttccatgttttgcgatatcaggttatactctttctcagcctcaaagaactctccttctgt

SEQ ID NO: 14018 - DNA, 541 bp, Arabidopsis thaliana columbia
cacaaagtcctttgctccatacctatgttccattagcttcattgtctccacaaacttctcaggtgcatactgcaacaaaacaaagccccaagtcagagatcaatgatacacgattcatttcttccatattgaaactaaaatcacttcttgtgttatgttacctcatgtctagctttcaatttaccgccaacatccattacagatgcaatgtttgaaatgctgaaaggaggcttattgtcgttgaggcgtaatgagaacattgttgcggttgagccacttccataagagaacataaccacccgctttcccgcctaaatcaaccatacacatgtgtaacaaacttcaaaccaaatgtaaatggagttcaatatagccagaagaagtaaagtttgttttgttttattaccaaatcattgtgtttcttgtggatgagggaagcaaatgcagcgtagagagaagcagtgtacatgttaccgacttcctttggtattaaagtcgttggttgcactttagcatcataaaacggtttcgcaatttgttg

SEQ ID NO: 14019 - DNA, 533 bp, Arabidopsis thaliana columbia
cgcccagacattgctttcggtggtgaatcgtctctcccagttcatgcataaaccaaccgatgaacattggcaggccgcaaaacgagttttgcgatatcttgcgggaacgaaatcacatggtattttccttcgatctgatgctccactcacagttcattcgttttcagatgcggattgggcaggagatctcggagacggcctctcgaccaatgcatatattgtttactttggtggcagtcccatttcttggtcatcaaagaaacaacgaagattctcgcggtcatctacggaggccgaataccgtgcagtagccaacactgcctccgaacttcagtggatatgttctctcctctcagaaatggggatctccttacctgtggcaccagttgtttactgtgacaacatgggtgctacttatctttgcgccaatccggtgttccattcaaaaatgaaacatgtagctcttgattatcactttgttagaggtaacattcagactggagctcttcgcgtttctcatctctcaacaaaag

SEQ ID NO: 14020 - DNA, 660 bp, Arabidopsis thaliana
aaaggcatcatcgccacagacatagatacgaccccttggacagttttttctgggactgttattggactgtgagttttcttaacaactgttgttgctaccacaagacaactatccttcaagtgatcccatttaccacacccaatacacctcggtggcagccatggataggaaaaatgtactaccgcatctagttcaccctcttcttctcccgtaaagacgtactcttttggcaactcttttgttagatccgcttcaactaagacttgtgcttcatcgaaacttacacaagcttccgtttttggatgcagtcttattggtttccccactacactagctaggaattccaaccctttatctgtgaacattgatagagggacgtcctttagagtgatccaaagtttgattgacttcatagctggttgcgcttcttcagcatatggagtccattttgagacaaccatagggatatccataatgttccacatgcctctgtttaagatccttcttctcataccttcattctgaatcctgaatttcattgttgtttcattcacttcaaatttgttttagcgccaatctcaaattttgtcacaatcatgtgaacttcccacatgtgtggctttgtatcaagaaatttcgattcaaaatcgcgaaagtgtt

SEQ ID NO: 14021 - DNA, 499 bp, Arabidopsis thaliana
cctcagaagcatcctcaaactcttcatccacttccatacggaaaagttgtgttttcctgtgaaccaagtaatgctctggagtgtacttctcatcacagaaataacataaccctttagctcttcgctcgctcatttcttgctgagacatcttcttgggctgctgactcacaggcttgaaaccaccccgcgacgaagattgatcaaactttccctccttatccttagagttctgagaataaccaccagcttgagtgggacgagacgaccgatttgacactattggcttcttaggatgggctctctcatatgtttttcccaagaacaagcaatgcctaatggattgtggctgaaacatgcgaacatgcatttgggtgtctgttcttaaacctgccaaatacacactcaccaagtactcttcagaaagattgactctagtcttaatgagttcaaacttctagtgataatcaacaataccatccgtttcatgtaaatgtttcaa

SEQ ID NO: 14022 - DNA, 472 bp, Arabidopsis thaliana columbia
tacaaaattgtgattgtcccatatatagtttagattattttggatgtataggatttctctaacactaaaatgtgattgcagatgggaacatcaatgaggccgacaatattcaacgacagggtagccaatgcattgaagaaatggcaccacacagccaagaaacagacgaaacatggacactcaggatctaacacacctcactcgagccgtcctactacgccaacacatggcatgtcaccggtgcatctcctccacaactacaataaccgcagcctcgaccaacaaaccagcttcactgcttctccttctcctcctagattctctgattatagcggccaaggccatggccatcagcatttcttcgaccctgaatctcagaatcactcttaccaacgtgagatcacagattctgaattcagcaatagtcatcatccccaagttgacatggcaagtcctgttagagaagagaagg

SEQ ID NO: 14023 - DNA, 689 bp, Arabidopsis thaliana
cattcttaccgcacaccaaattctgtccaaacaaaatccctctatccatcaatttccaagccaaccaaatcataatgacagcacaaagtttctttgattttttcacctcaccttgcttgtagcatattttggatcctttggaaaacctttcacagagtttgaatcgattgaccggaaaatctgatttacaaaaccagacaattattagcttcagaaatttgggacaatatttgtggaccaaagtataaaatttgcatggttcaactgagagatgggcatctttccatggactttgtgaattaatcagaaccaaactttaatacaatggtgcgtacctgaacatgccaagcctcggggtcgtttgcactaacagtaggagcatccaaaactcttaatatatctggaatcctgtcgatccttagtagtgcatcatcatatgacgtcttcaatttattgagtctgtgaggcttagcagccttcagccacctctcctcaaaatttgtcagcacatcatacgcagctgggccatcaatcttactgtgcaagtcatgccaaggttctcttggacaaccggacacgttacccttaattacattttagtaaccaagtcaaggctttccattcagacaaaagaactagcactaagaattcttaggtaacacaagaagacttgagaagcagccaagatg

SEQ ID NO: 14024 - DNA, 425 bp, Arabidopsis thaliana
cgtttagaatgcatgtctaggtataagatctctcggcttctcgagttactctttttgttttttgaaataaagttaaattagtttcaaaaaagaaaagtatatgtgtttacaacttgtgcaacgttgttgaagaacataaaaaccaagaagaagcaactttttaccccaactctcttgtttgaaaccaaaaatggagagctcgatcatagcttttgtctccactaatattaatagctgatatatgattccgaatgtgcttatcaatccacttaactagtcgggctacaggatttgggagactgccgtgtttacgctcatttcgttcccgccatatggtgtgtaccgttgcctgcaaaacactacgagctaagaatccttcgacacgattctcgaccaatagttagcgatgtcgtgtataatctcct

SEQ ID NO: 14025 - DNA, 604 bp, Arabidopsis thaliana columbia
cagttcctatctgggtcagaattttagaagcttttccagagcctttaggtatttgatctttccatttatttgctaccaccaaagatcttgctatgtttctctgtttcttaaggtttattcttcttgatttagctcgaagcctgctggaaacgatgtcattggtattgatttgggtactactaattcatgtgttgccgtcatggaggggaaggtaagctgctgatttctaaatgagttataatttttttttcctgaggttttgatgtttgagctaactttgtgtgtgttttatctgatcttgtagaatccgaaagtcattgaaaatgctgaaggtgctcgaaccactccatcagttgtagcattcaacacgaaaggagaacttcttgtgggtacaccagccaagcgacaagctgtcactaatcctacaaacacagtatctggaacgaaacgtttgattgggagaaagttcgacgatccacaaactcagaaagaaatgaagatggtgccttacaagattgtgcgtgacctaatggcgatgcgtgggttgaagccaatggtcagcagtattctcctagtcagattggagcgtttacttgacgaagat

SEQ ID NO: 14026 - DNA, 794 bp, Arabidopsis thaliana
taaaacagtgccttgatgcgctacaaagtagcgtctcttctagagtgaccccaactaacagaatcatgcatccatttaagtatattgagcttgacagtagcgtcaactcttacaaccagttttctttttctcctcaattcgtcattgataaaggagtaagcaggacgagaggcatgattactattaatgttagagatgatttgctaagacgcgggtctgattgcaaaagcagctggatactatcaaccagacttttgtgaacgtgaaataaagtaatggagagcaacgggagctggtcactcttgacaatgcttcgggtacatgattttcttttccttgcttgtactgtatctcataagtgtagtccatgagtttagacaaccacatatgttggaaatgagtagttaccttttgatccaacaggtacttaaggcttttttgatctgttttgataatgaatggcatatgagtaaggtaagcactccaagcttgtactacatgaaccacatctatcaactttttctcgtaaactgatagggcctagtggcgtggaccaagtgcccggctgatatagcagattgggtgactctcttgcatcaaaactgcaccaatccttgtgttagcggcatcagtttctattacaaaatccttaccaaaatctgatagagccagaactggggatgatgtcagggcagattacaatgcatcaaaggctgtagcagcttccgaacaccagtggaacccatctttctttagtaggttagtcaatagcctagcaatgatgatgtaacctt

SEQ ID NO: 14027 - DNA, 445 bp, Arabidopsis thaliana
tagtaacgtccgccagtgtgctctaaagaaagacattaaccgtagccggataagatgcgccatgcatccgcgatgctgcggttgaattttacatcccgtacgtttccctcaccctatccctctccccaaaggtgcgaggggaccgttcagtacggaatttagcttgacggtgctatccagcattaaatactggcaatactctcacgcaaaatccgcagcaccgtctcttcaccgctgcgattcgggttaatgcgaatcggtcaatgttctgattgtggattcgcctggcgaaacgttccggaaaggcgataaaagagcggcgggatttcatatttcgactctgcacccaccgggtaaggcaaggcaccgcgcttttgcgcatcttccagcactctggcggcaatcggctgatgaaactcgacaatcaacaccttcgactgcgcat

SEQ ID NO: 14028 - DNA, 402 bp, Arabidopsis thaliana
ccagtgtgctctaaagaggatttacgctggcaaattaataccgaacgccagggaatggtggcgcgcggcgttgacgatgctgaccagcttcgcgcctttgtggtcagtgaggatcggatgaaagaggcatttggattgttgaaaacattgccgatgtaggtgggctactgtgcctataatgtcggatgcgacgcaggcgcgtcttatccgacctacggggacgcatgtgtaggccggataaggcgtttacgcgcgatccggcaatggtgtccatatgcaacacgttttatccgtactggacttcacacgctaaccaacgcgccgcagctataaccccctgccccagagacaaaccgccatcagccgccggtaaactctgtggaaatagcaatgtgaaatcag

SEQ ID NO: 14029 - DNA, 527 bp, Arabidopsis thaliana columbia
ctcctctccagcgtaccttctgatgttgaatcgcaagcacctatatgaacgccatcaagatttcttggtctctatccgaaagatccttgatcagagcacacggagctcgaatttgggacctgaagaagccgcaagatggagaaggccgcctactcggcacaatcagaatttcaccgtccatcatttcgaccctcgagaaatctggcatggattccgagcaccgaagttgaattccatatctgccaaggaaaaaaatagaatggtgaggaataaagaaaattacagtgccaatttataaagaaaccttatcccttgaggttggcgatttccatcctggagcggagtgattcgcggaaaaattcatgccttccaatcagccctgcatttaaagagtatctccaaaatgaatatttcgagattgggaaaatagcaaaagtttccataaattataaatgggccggagcatataataagttcaaattaaaataaaagcaaagtgaaacgagttcaggaacatttattggtga

SEQ ID NO: 14030 - DNA, 318 bp, Arabidopsis thaliana
gtatttccctttcaaaaatatctcgtccaccacaattacttttctaataaatgggaatccatcaatgcttgcaccaaatgcaatgaaaacatacttgaatctatctaacacatctacttcaagcctacttaaatgcaatgcttttcttatcatatataagtaagatggtagttggtcatattcagattcatctcttcccctaactaaatgcctcgcaaacttaagtgtacgatgtgacatccaataattaacctatatatatataaataataaggcatgagacataagagaaatctatataagtgctagtatgtaata

SEQ ID NO: 14031 - DNA, 635 bp, Arabidopsis thaliana
  unsure (1)..(635): unsure at all n locations
nnnnnnnnnnnnnnnnnnnnnnntaaagaatgacagagctccgggccaacacgtatctcccgcaatcgtcttaagcaagtttccgttatacctcttcgcattctccggcgtactccgacctcatcgtcgtcacctttcgatggccacccagtctccgatatctcaactctcaacgatttaaaccccgccgccgctaaagcagagtagacagcgtcgatctgagcgaacaacatgttatcgtagtgaaaaccggtggccggatctacgattccttgattaggttgaaacagaacgaaatctaaaggaacttctttagggtttcctttgtaagcgaagaaaggatacgcgttgattaagaacggagaatcagttttccggtgaaattctaagatcggagttagcgaatcgagtagatccggttgaaactcgccggcggaaggtgggaatgaggatttgaggatcgagagagaatgcgcggtggtgacggagatttgatcggagagaccggcggtgattaaagcagagtgaactccttgcatcgctgggaggagattggtagtgagtgaagagtcgttgagagcgaggatttcgttaccgatagttatgcatgtgatgttagtcgcaggtaaaaatgg

SEQ ID NO: 14032 - DNA, 491 bp, Arabidopsis thaliana columbia
ctaaagtggtcgtataattagaggcaaaccgtaacccggtctaagagaaagcatatacgtcggagaatggcgataaccgggcgaaaccgagatttcgaaccgggacaaaaccaacgacaagacaatcttgtactccatggtggtcaaattccgaccgatacacattctgccctccgaatccgaactggcatggtaccccgttttaatgcttcagacgaccgtgcaaattaccggcgaagctctcaggcttaaactcgttaacgtcatctccccacaactcaacgtcgtggtgcatcgccaccacatcaatccaaatgtttgttccgtttgggaacactcgtccgttcacttcaatgtcatttcgagcttgtcgttgtgcgttcggtgccggtggatataaccggagaacctcgttcattacccaactcgtctgcataaaatgatcggaagttatattcattagtatcaaagttaccattcaggaggttaag

SEQ ID NO: 14033 - DNA, 578 bp, Arabidopsis thaliana columbia
tttaacaaggaagttccaaaagacaacacatgcttatgaaaccaaagggggtatcacattgtctacctcattaatttgcaaagttcctggccccaagacatagtgacaacaccttatctcaaactagtactggcaaatggtgcttctcaacaccctttcgtgaccagaccttccacgagggtctcaaactagtattggcgaatggggcttctcgacacccttctgtgaccagaccttccatgaggagatcgtgacctgcttcgatctcggtcctctctcccactcctcgatctcctgtcataaggctttctataatctctaccacggtctctgtgtctgtcaccatctctgtttcggtctcgatcacgatatctttctctatcactagaaccactcctcttactctcgctttccttctcccttggtttcctcttatcatctgcttcttttcctcttactagtctttcttcttcctttccgttatctttagcagcctagaatagaaaaagtaaacaaagcatcactatctcgattttataaggaatgacagctcaaatgaactaagattcaagtattag

SEQ ID NO: 14034 - DNA, 563 bp, Arabidopsis thaliana columbia
cgagctaagcttagaacctcttcaagtcaagttttggttccaaaacaaacgcactcaaatgaaggtatttttactatatagtatatatatacttcggccaattttgattattaattctattattttcatttaccggtctcgaatcttcaagagagttatatatatatttttcagaataatcaaatgaatttgatgtgtatttccaaccacattttgatttagatactacgaagccttatttaaacacatgtacttagctagttccaagattaagttcattttgtcaaaagatctatccatttgttttggtatatactcttgatgagaccaaacataagaagatatataacattgggacttgtataggcacaacatgagaggcacgagaaccagatactgaagtcagaaaatgacaagctccgagcagagaacaataggtacaaggatgctctaagcaacgcaacatgcccaaactgtggtggtccggcagctataggagaaatgtccttcgacgaacagcatttaaggatcgaaaatgctcgtttacgcgaagagattgacag

SEQ ID NO: 14035 - DNA, 543 bp, Arabidopsis thaliana columbia
taataaattcaaacgtattatatcaataattaaacaaatttatgttatattttataactacatctatttctatatatatgaaattcaaattcaatttttgtaagctttggtttattcagttcaagtttaattcaatcacactaaaatctgtaattattttataaatttttttttgtattagtttagtaattactgtttaggtttagtaattattgtttaggcttctaagcatgaatgttgtactagtttagtaattactgtttaggtttcagttctgttcgggttggtccatttggtttgcatacaactctcaagtataactgggtctaaaaaattttgggccctaattttggactggtttggtcatgtgagaattatagttggaaccttttaatcattggttttggcccgctttttaataaatagcaataaacaaaaattcctaatctaagtggttatggtctatggtacgcacctcttgaatacgtttgttgaggtagtagaagcttgagttagcaaaagctctgaaagtaccaccgagga

SEQ ID NO: 14036 - DNA, 487 bp, Arabidopsis thaliana columbia
  unsure (1)..(487): unsure at all n locations
nnnnnnnnnnnnnnnnnnnnnnnctaaagagtagtccgtttatcggccagtttgcaccaaatagacaaaaacagacgaggaaaacgatcatagagattgaaagatgtggttttctgaagacagacaaaaatgttgatttatccttatatttatcttcaatccactcctgactgtctggagcactttttctgatccatagaactagtataactggtaacaggcctataaaaaaagagtttctccatccatatacttcagcaaactgagggattatttgtgccgcaataatatttccaacagaaaaaccacttaccaagagtgcactagctttagattgaagatttttaggccaactttctaccgcataagttgaagcacatgcatattcagcagacatcctctaagccaacaatatcacggcaaactgcgagcatatataagtatgtagcaataccgctaaggtctgttccgactgagtaaatgaaaa

SEQ ID NO: 14037 - DNA, 560 bp, Arabidopsis thaliana columbia
cttatataagcaacttgttctcttcccgcctttctttcaaaaccaactgacataaactgttttcttttgcgcaagattcaggaggtggaggagcaatcaccggaagggattacctcgcattactccagaaacacaagccaactttccgttgggataaagagagcggcgaacatcttttcatgtatagagatgataagaacatcaagcatgctgttttctatcctacattgatgtcaatccttctacggcttgagaatgctcgtctctggggaatcggcatttcaatctgggaaatcggacaaggtttagattatttctttgatctattgtaagttccatacattgcatcatgttatgttttcttaatgttatacttgatcctctttgttcacttaaatcaaatgctgaggaaccttttgtatctagtctagtctctgttctttgtgttctagataaaggacattttggtaaatatgcagaggcttctcttgaagcatcttcaatattctctggccacacatttgacatgcaatttcggactaagtaagcactatgcttta

SEQ ID NO: 14038 - DNA, 570 bp, Arabidopsis thaliana
tgcttttcattgttttggagaaggtagttcacgcccatggctgtttctaagctagggaatcttttcttatgtgagagtgagaaaaggttgttcaaatattacccagagacagactacctttgttgcctctccagacttttgtgttataacttctttcgtcgaaaatttagtctcacttcgttccaggcccgactcaatattattttgggttctgtgctaaaaaaaaaaatatcccctttaaacctttaaatccaaaaaattttagtttacgtggcagtgtttactgtctcttgtaaacgtaatacacttgtagttctattcaaccattgtaattttatctagaaaaataaaaattcctataaattaggaccctaaaatttaagagagaaaataaggactctgtgccttggcactgctggcacaccctgcttcgttcacaaccaggatctgttcggaaaatcagcacttgtgggtaccaatatggacttagctatgtacaacctgaatgtcttccgaaaatcatcagcacatctccgcacacggtctcgaatatctaatatcgtgatggaa

SEQ ID NO: 14039 - DNA, 1027 bp, Arabidopsis thaliana
ttccttggaagacttttccaaccttcatctctgctctaagttggtctctttctctgagccaatcgaaggatcgctgtgaaatgaagtcccttgcttcatcataggttataccaaacagtctatagttgaaatcgccaaaaaatgcgaccatgtctgctgctgcaagatcagacttgatttcttcagcgccggtgcttggaatctggaaaacagagaaacatgttaaatacaaatttaaggagcaaacaacataaactcaggagtaaaggtgatatgataagaacatacagtgttactctttgttgtataagctgaagttgagacaccagctgcaagagagagggcccatggcaaaccagaagaataaagcagccaaaataaatatgtggaaaagccaagtgagcaagacaaaaacaggtacggcaccataccagctgcagcgttacttagattttgtcctcgggaaaagaccatcaatcgaaaaatgtgattgaaatctgcgtttctgcgattaaccgcctccaagtgtgcagccaagtggcaattcacaaagcacattattcggtcataaactctgattctcagacctacacctccctatttgacaagtaggacattaatgcgtgtaaacggaacaagtacctcatagagaactaaatttgaattaacatctatatcgcattgtcatctacatcttagccagatagaagagattacacattgtggcaaaaggctaagttttttcctgtaattgtgttatcattcagtgggtcataaacattgtaagtaagcaacacatttcatatataactttctcatttgcaacttcacaagaacaaataaaaactgaagtactgaatcctaaaggcctgaatgtatgtagtatcataatcagatttgaagaagtgggaattgaagtaagacataccttgttgccaatggcacggccaaaaccacatggaactgctgcaacatcaagatctccaacatgagttctaatatccttcctcgccctaaagcagaaaat

SEQ ID NO: 14040 - DNA, 722 bp, Arabidopsis thaliana
ataataaaaccctacatcaaaactgatcttctaactcaaatgtgttggtaatttaaagtttcgttcccgaagaggttctaatctaaaaaataggataatcttctgacataattaacaaggtaagcgcagaccagccggtgaagagacgcgtgcctttgcctgttcccttaacttgatcatattgttcccagatgtaccccgtctcgtaatagtttctaaccacgttcctgtatttttatgacatgtttcaagttaatatcaaaccagacctctctatcgcagataccatataataatataccttatcaaattgctccttagttccgtgtaaattgctttcgacttttctctatacggtccatccactgcaggaattttgacacatggtaaaccgaatgcatatgatagtaagaaaacgtagaggtcttgtagtatgatgtggcgcttttgaccaagtggagggtagaaaattacctatagagtaatggtaaagagaagaaagaatcatgtagttcatgttcatccatataggacctctccagtatggtgcatcatgctcagtgttacgtttcatatacatagaactgcatcaaaacaatgttctttcttatcattgaagaagataatttcgactatgtatgctccttcttgtgggcttacctggttttggcaagcgaaactagtccatagtcactccataagatgctcctatttgaaatgag

SEQ ID NO: 14041 - DNA, 1229 bp, Arabidopsis thaliana
agtttgacatctaagagtgagatcagatacgaagggatcctttacaatattaatacagatgaatccagtatcggacttcaaaacggtacgatccgtttccacttccgtttcgggattaccagatttgttaagtgttaattttggtggtgttttctctcggatttggtagaaactaatggtttcttccgttaatcgttaagaaagttttctccaatctgaactgtttagctcgatttgaaaggaatgttgttttagtgctcatgtctattacttgagttctcaaattgtaattgatgtcttgaaactattggttgagcataaaagatcagtgtttaagtggtcgatgaggtagattttggttctgatccctgaacttttgttgtgtgtagttcgatcatttggaactgaaggaaggaaaaaagatggtccacaagttcctccaagtgacaaagtttacgagtacatattgttccgtggaactgatatcaaggtattcagcaggattatgctaatacttctatgtaagtagcctgccgattttgtactctgattgttcttgttgttggtaggatttgcaagtcaaagcttctccaccagttcagcctcctgcatctactataaataatgaccctgctataattcaggtgaatgttagaaaagttgtaagattacattgtctgggattttggagtcaattgatgtaaccccatcctccacttgtcttggttttgcagtctcactaccctagcccgatgccaacatctggtagcttgccttctactgcgagcgggtcactacctgacattagttctcataatggacaacctggacaacatggaatgggatttcaaaacgcaatgcctttgtatcagcctggtggaaatcttggttcatggggagcgtcaccacaaccaccaatgtattggcaaggtttctacaccccacctcccaatggccttccccaattgcatcagcagtctctgattcgaccccctcatgggctgccaatgcccaactctcttcagcaacccctgcaatatcctaactttaatacccctcctccacctactgggtcatcatctttgcaggggtcaagcttgccagaagcaccctcttcattgtttccttttagtaccagttctcaaatgttagctcctagttcattgcctttccctggtctaccacctgtgacgctctcgtctagccatctgctgaagtttgagatttta

SEQ ID NO: 14042 - DNA, 663 bp, Arabidopsis thaliana columbia
  unsure (1)..(663): unsure at all n locations
ccccaaaaaaaacaatctcgttattttcattatgcatgaggagcatgacaaacatgacgagaaaaattaaaattctcaaatatgtatagtttgtcaatatcaaaccttggaaccaaagattccttgtatcgggaaagcatttgaaccattgcgtcaacactcaaatgactagaaaacatttgatgaaaatatgcgtttgcctctgcctcaacatcatctccatatgcattgggagctgatgaatctttagcctcaccattctgcagcttaggattacaatccaaaatagctgcattgactttttcaatctcctcgaccagttgagatgaagtaatcgcattatcatgagctttcaaaacctttaatacattatcaaacaaaataattcagtagatatgaagttaaggacgagccgaaaaccaaaccaaaaagggaaactaactaacttttaaaagggaagttgttgcttccaaatgaagatctgataatggatcagaaggatgaaaaattttggccctgaaatcgtctgattcgctaaaatgcacatttttgacaaatttgaggcactcctgaaatatgaaaaagacaaagancaaaaaatgttagattagcatcttatcaactcctagaaattagaaatagacctatgattgtgaacgatat

SEQ ID NO: 14043 - DNA, 847 bp, Arabidopsis thaliana
acatcctacatattgttagcctcaattttgacactgaaacttgagagagttcaaccattattaaaactaaaatttggcacacaatgagataaaaagagaaaatggaaagtggcaagatatctaacaaagatttaaaatcataatttattaattataaatatccaccaacaaggaaaaatactgtaatgaaagcctatatgacagacacagcatagattaataagcaatttgagctcaaaagagttccaaatcacaaaaataaatcactcaagtaattaaaataacaaaacctaattaatttgctgaaaactcgttgaatcaaccacggaaaaagatggtaaacaaaacaacaaataagtatctcgtaataaaaaaatagcagctaattttgttttttgtatatgcacgccgattaagagaaaaaacaaaaattattaatgattatataactcgtaacttctccgagatcttcaccttgtgagctacatttggagatacgcattgtacgattcgaattgcgatgcgttcagaaaactctgctcctgaagttttgccatgtagggcgtcgaagcattccaagtagcgtttctgaaaacgcgttttgattataaaacgcagctgctgtttcatcgtatagtgtttgaccttccactccgatgtctcccgctggtttcccctacggaaggtggcgagcaaggtgcgtttgcggttgcgttatccgcggctgcagcgtcaggagagtcggggatgttgacggttgtgatatcatggatgcttgaacggcgtttgtctttgccacattgacttgcagtatgaaatacttttgagcgtgacttgcgacttgcgt

SEQ ID NO: 14044 - DNA, 503 bp, Arabidopsis thaliana columbia
tccttcgactaattttttgttcaagacttctggcttctggcagtccgacggattgtatttcataccagaagaaccaagcagaacatcatttgcagaaaccatcttgtatgaacgatgaggtcgagtagaagctgcacaaacgcataatgattcatcaaaaaaccaatagagagactcagaataaactaacagtctcttcttaaataaattactattgtgtggatctacatatctagatcagagaaaggagaaacttacgagataatcctattccggcaagcattttaccatttccaagagtcagatgatttttgtatctgcgatcatcaattgcagcagccacagtagttatccaagggctgtatgaaaccagagttttcggaaagggacctccgtttccagcagcttgagcaacaaaaacaccagcttttacagccccaagaagtgtagcatcaaatggattcaagaatgttgtctttgtagtagctggaggactgtttgga

SEQ ID NO: 14045 - DNA, 452 bp, Arabidopsis thaliana
gacgaagatggatacagcttcgatgctcgatgaagcaattcattatgtgaagtttttaaagaaacaggtgcagtctctggaggagcaggcggtggttactggcggagggggaggaggaggaggaagggttttgatcggtggaggtggaatgacagcggcgagtggtggtagtggcagcgggggagtggtgatggtagggtgtggaacagtggggactcatcagaatggtgggcaatgcacagattcttagactatgatgattttgaattttattattatgagcttaatgttggagatacagagaaacatgagtctggagagggaagccaagtaatttatgtgagagtcttgaatttaactttattttcttgtttagataatgtgtaatgatggttgttaaagccaaagactctccatgggttggttggagcgatgtttgtaaattaggaact

SEQ ID NO: 14046 - DNA, 582 bp, Arabidopsis thaliana columbia
tgattatcgtggtcgcttgttcaccagagacagataaacttgggttcaaaagagtttcagaactaaccagaaataaccacagacgttcttgatcttgacaaacataaaatctcaaaacagtatcagttataaactctctcgactcctattctcttagcttcaagctatatgacttttaagaagaagcaacgaacgtggttaggatatttctcttgagagtgagttcatcagctttcactggacttatcgacttcccaagcacccgtccaagcctctccgtttctttgctagcatagtctgaacctttttctatgtagctctttgcgagtttcaagtaaagctttccatacctatagagacatcatgaaagcccaataattaaagaggcaactttcaacactcacactccatgtatcgattaagagttactactaacatacctcgtggtggagcccttaagggtacttgcttcctcttctatgcgagacaacactgccttcttctcatcttcactagctgcaactaactcttttaccaaagcatctaagctttcgactataccagcctattgagagtgtgata

SEQ ID NO: 14047 - DNA, 1783 bp, Arabidopsis thaliana
gtacttatatggttacagaataaaagagaaaatatcaagaacctaaaccctaatccataccttataaacccaatatgatatttgtctaaaaatataacaccacaccatagttcttacaaaaataaaccccaacagattgaaaaaaaatagagctcactcaaattaaagagaaaaaattagaagtagagatgacaacgaacatgatctcctaagttgttctaagtatttagcacttaaatcgtcaggagccacaagtgttgaagtagttaattaactaacatgagaagaaatcacaactattaacatttaccatctttttattcttgtcgatgtaaaccacaccaaaattagtatttttttattcgtctccacatctgaaaagcttacagtttgggacatgaactataaaatctaaacaaatatttcctctactatgaagctttaaaaaatgcatggccttctcaaactcttctttgtcatcttgacgttgaagtaacttatcataccaccgaacaatgtcctgaagaaaaatgatatgaaaatgacatatgtacaatggaacaaaaggacttaaccacctcttttttttttcttttttttttgttgtcaaaaaccttgaatttcattaatggtaaaccggtacaggagtaattgaacttaaagctgccttggataaagcatcggtttcacgcttactgaaattgaagctaatttccgaaaaattaagagagagattgaggatatcgtgaagaattcctcgaagctcctttggttggggcttcccttgaagagctttgactaactgttgagagtctgaagcttttgagaggtttgtgaatacatgatccagcgcgttttaaatcgtaaggaggagaacaacagcttccgccatttgaggagatgtgatggtcctcgccgaggatctgtttgaagtttcagtctgagcattgtgatctacaaagatccagccgaatcctgcatctcttgaatcagctcgccacgccgcatctgtaaaacattggatggtgttgagccggataacctgtcccaattgtaacgatggtaatctctgcacttttggttgctacgattgagcatctatccattcttttgcattgccaattgcttgggatagaatctccgagcttgattgttgtttttgctcaaagagtttcttgtttctattggtccagatcgcccatagaatccaaggaaacagctcgccatgtccaattccaaccggtgggagacaagtcaggagattagaggcttcaaactcagttcttaaggttaagatccgggttggtgaggaagaggatttgaaaggtgcttgatcctacacctgctgggcaaaagggcaatggaacaaagtgtgtaaacaggtttcctctccatcacaatgagggcagactgcatcaggtttgatttctcttgcttttaggttttcgcccacaggagcggcgtttttcatcgctttccatagaaagaatttgatcttaggggaacattgtttattccagatatctttattccaattgaagcctgctaacaatcctggaggaactttagtctggttgtgtctggaattggcagcaaggtaccctgttttagcactatactcgccggtcttggtcaagagccggacatgttgatctggagcacctagcttgcttgttctgagcgcgaggatgtcttgttcataagcaggtaagatctagccttgtttttctctattccacgaatttgtattaggacatattagctctgaaaccttcatgaattg

SEQ ID NO: 14048 - DNA, 424 bp, Arabidopsis thaliana columbia
gatcattatatctggacataccaggagatcacatagaagttttgtgcaaccctgctgcaccaagtatctgaatcacaccaatatatggagattgttacttgatgatcaatcaaaacgcatgaaaaaagtaataaagagagaagacagggatgtacttgatttgattaggcgaaccacctacggtggcccttaaaattacccgtacagcttctctctttatgtccaattcagcatttagagccagattgaccgacgatggaatcaaatttgcatcaataagcaactgttatcatcattgcaagaaatacaaatagaaaacaataagtgataccacaattgattacagcctaaagaatatgttcaaaaaggtttattcagagtctacgtactttgttgtttggttactgaactaatcataacattg

SEQ ID NO: 14049 - DNA, 578 bp, Arabidopsis thaliana columbia
tgcaggatgagacattgagacaagcagttgacacgtttaaaggcaagagctggaagaacataggtaagtctcttcttctttttagattctagttctcatattaacaagagtaatgtcagtgctacaacatactccatagatttgtggttcgaatattaaagttggagcctacttgcttacagtaactattagttccatactcttgtctctgtagttttatgagttactcttgtatgttaacttgatcatctgaggctgagcatctagtagaaagactttcttttacgtttgtttccgttttgttccgtgaagcatttagtattgtttgaattggtgtattcatttttgcagcgaaatctttccctgatagaactgaagttcaatgcctgcatcggtggcagaaagttctaaatccagaccttattaagggaccttggacacatgaggttgattctgtttctgattttatttattatttggcttcattttttatgtgaaatacgaaggcttaaagtttgttgtcttgcaggaggatgagaaaatcgttgaactggttgaaaaatacgggcctgcgaaat

SEQ ID NO: 14050 - DNA, 854 bp, Arabidopsis thaliana
tcttctcccccgccccgtatagtgccggtttgtggtatcttttaagttttattcttttcagtgatagctatacgtgatatattgtcgaagagagtatcccacttcagtatgaaagaaaatggatcatctcccacattcttcgcgttggacatacagaaactatcaccgtaattgagctgccctacattatcgatcgaagaaatctcgagaagacattggtcgaaccatattattccccctttatatctcggacatctcctacgaagctgtcatatacatgttgcatatcgacgccacaatcaatatcaacactgcatgaactaatttacatataagatatagttttctagtctgttatattttatttatcgctaagaataagatgtaaccaaaactgagatatgtgtacgcattatcatgtaactatttggcagctaaaaaaataatattaaagtgacattaccccggccatggctgaggcaaagcaggagcggcacttggacccgtaggagtcaccacggcactggaggacaacgcagactagatctggaccgtcaccaaatgacatcatgtcgtaaccgctattaacattttcaccaaccgagatggaatggatgatagcttctaggcttttctcatgtgcacttcctggcttgtatttccttgactgacaaagcatttgtggttcagataggaattggtcatgttcaaagacgaaacgctacgtatgcgaagcagttgtgtggccccagggcaatatatggccaaaataaggtgttttgatcagaagataagagtcattgttttggtgttttggtttacaggggtgttatttgtgataagtgtgagctgtg

SEQ ID NO: 14051 - DNA, 669 bp, Arabidopsis thaliana
cagtcaaaataattagagtgattcttgttgttgttgcagcttcttccaaatttgcaaacaaaattgagcttacttatagaagattaccactagtcatacctgaatctgggatgaatgtgtgtccactggagttcaatgagtatataccttgtcacaatgtcacctatgtgcatcagctgctaccaagcttgaatctttctagaagagaagacctcgaaaggcattgcccgccactcgagcaccgccttttttgcttggtacctccgccaaatgattataagatacctattagatggccaaccagtagagactatgtatggagaagtaatgtgaaccatacacatcttgctcaagttaaaggtggccaaaattgggtccatgagcaaggtcagttttggtggttccctggtggtggtactcattttaagcatggagctgcagaatacatccagaggtaatttatttataatgtctgaagatgtttgtctaatgcattgcattaaaattttgtatatgttatctcaggttggggaatatgatgactaatgaaacaggtgacttgcgttcagctggggtggtacaagttcttgatgttggctgtggagttgcgagctttgcggcttatcttcttcccttaggtatacagacaatttcatttggggatcctgt

SEQ ID NO: 14052 - DNA, 585 bp, Arabidopsis thaliana columbia
tgttacacacgaaacatcttctctcattgttccccacttgttgcgaaagaacacctttgttcttcttcatccagcaatcactctcattgtgatttttacgttcgcaaacgtcacaccatttcccagcctgcgtttgacgcttgtcttcacgtttgttttctccatagaacgctccttcccgttgatcattcgtctcgcatctctacccgcttctcgtgtgctttcaatgtgcctatcaactatgttacggacaacgaagtcagatccttcgtttgcttcatcatagccactatgatgtcaaatcttttcggaagagaaattaggattttttgcactatttgatagtctgatttctcttctccatgaactctcagttgatttccatctcaatcaacttggtcatgaaagtgttgatattgtcactttctttcatcttcaaattctcatactcccttctaagagattgaagctttatcatcctgacttgtggtgatccttgaaattccaataccaaggctttccaagtgcgcttgatgcaggggcgattctcggaaatatggaatctgagacggcagtttgaagaat

SEQ ID NO: 14053 - DNA, 580 bp, Arabidopsis thaliana columbia
gaagaaattgaaaaagaagattgttttactcacgaaaccaaaaaacgattaattatatgaaaaactaagttgatacatgaacataagaacctttgttgattttggataaattgggtagcacgttcatagatttgaagatattgctgagattgcctctgtgtcatctcccgcatcatttttatttctgtcaaaggattggaggtgcataattatgaataaacggatataaacttcactatgcattatgttgaaaatctaaatattccttatgcaaagttacacgacaaacatatttattaaaatttaatttaaaatgtaagatagttattttacctttactagattcttctttctttttgttcctatacatctattgaaagtaaaaaaataaaaaataattcagtacttgccatcttagatagtatatgttttgtagataagttttatacactatataattataaagacctggagatgacttttgacatgtgatattgtgaggtctctcccccataagactcaaaattctcttaggagttgccctgcaaatttaaggagacaataatatcgactatagtga

SEQ ID NO: 14054 - DNA, 529 bp, Arabidopsis thaliana columbia
gcctttttcaaattgaagtttcttttgtctgaagtaacaaattgatgctttccttcacacacctaaaagtctaaaactctcaaattgtctatggggaaactaaaaatttaagaaccaatccctaacacaaagatcaaccaatgcaataaaaatccaattttattaactcataggaagaaaaatggcttctacatttcttcaaggccatactcaaaaactcacccttcctttatctcatttcacttccacacataaaccaactcttagattccaaaacatatatattggtttccctccaatggaggtcaaagccgccgtttgatcatcagatcaccaatcacggtcgccaaatcaaacagcaagaatgattctcacgatgataaaaagcaattaaggccattgaaaatggcggcgggagatccctagcactagcttgcgccataagtatctttggctttaagataaataatatgagctacactgccgcggcagtgcctatccaagctctgccgacatgatcatatccggg

SEQ ID NO: 14055 - DNA, 440 bp, Arabidopsis thaliana columbia
cctaatgtgtttgatatgttaggtatactcaaggacgccaaatccaggacctgagttcatcgcaaagtacaagaactacttggcacaatttggctatgacccggaaaaaataaaggatacaccacaggactgtgaagtgactgatgctgagctagcagccatgatgtccatgccaggtatggagcaaacactgaccaaccagtttccagatcttggattaagaaagtcagtccagtttgatcccttcacaagtgtgtttgaaaccttgaagaaacttgtaccgctctatttcaaatagagcaagcttctttgctcaaattcttatgtagactataatcactgtccatatatacatatcttccagaatcaaaacactcttctgatcataacaccattgattagagaagttgcatacactccacagagaaaccaaaagtact

SEQ ID NO: 14056 - DNA, 499 bp, Arabidopsis thaliana columbia
gagatgcaaggagacccctcaacatttgcgttcacactccaaagagatggtcgatgagcactgccatcgtaatcccctgaagtctccggatctgatgaccatggaaatgaagcaagctggtatgaatctttgtaaaaccatggatgatcttgcgttgatccactcttatgctgaatctctgaatatgaaaacgaaggaagagaaagatgtccttggagtagcgtctctagcggaggaacttaacagtttgaagtttaaaccagcaggtcctgatcaagtagagagattcaataccgagaatttaccagtgaatccacaatgtgaacagattaagatggtagttgaaacctatgatacagctttccataaacagagcaaaaccgtgccgagaactgcagatatgagattggttgctgcaagaaaaatggaagaggcagcaagagcagcggaacacttgcgcttgctgaaatgaccatattatcagcagaagaaacaagac

SEQ ID NO: 14057 - DNA, 559 bp, Arabidopsis thaliana
gaggatcaggatcccccaaacactccttacacttctccaattagacccaacagtatttgctcagtcccaacaaagttatggccaagtctccgagcttcctcttgagacagcattatgaccttaattgctttctcggtaaaacgctcaaacattgctttgggtacacatcggctagctttttctctcccagatgattttgcaagtttatacttaacaaggcaacatggagtacgggttgtgcatataaaaattgttatcgtaattcacctccatgacctcgattgcagtaatctcgacaaaacactggtcgaaccatattattccacctttgtttctcggacatctcctacgaagcttacataaatacatatcaacacaacaatctagaacaatattttacatattgtctcaattaagaaaccaaagcagagtatcaagagttatcggaattattgccattttaagaacaaaactgaacgacactgatttttttcaatcgaagttatgtttgttttttctccaagcgttaaatctgagaaattaattaataagtagatga

SEQ ID NO: 14058 - DNA, 529 bp, Arabidopsis thaliana columbia
ccttctgctcccattctgcctaaacccaatagacgacgatgatttcatagaatcttctgtgcttgattttgaccctaccccattctcttcttcagttatgttgctctctttagactccactggtttcttcctcttcctcccattctctgtcacattttctttacttgttactgaaccatttgtatcatcatccttgtcttcttcctcatctgtcttcttcactagctcttcttcttcttcttcttcatctttcaccggcttctgtggcctccctcttttcctaaaagctggaatcttttcttcctcgccgctccctcgatcttctctagcagtagcattctgcctcttgccttttcctctacctcttctcataactctattcaaaccaataaccaaaaacctcaagcaactagacaagaaacctgcaagttgaaaaggttgctttttaattaccagtagtaactcatacctcacaacaacacaatgaaggcgaactaaactcaaacactatagaaatttgttgaagaat

SEQ ID NO: 14059 - DNA, 387 bp, Arabidopsis thaliana columbia
cctcgtgataaccaactacatacaattgtaatttcatacgaacatagagtaatagagataattgttattacctgcatcaaaacctttgttacgtagataagccataaagtgacgtttctccccggcgaagacccgactagcatttaccgcctcatccattattctctgccgctcttcgcctccgtggttttcaagaatctcccgtaacctctccttcacatcttcgtaatcctcatccgatttatcatctacttcttcctgagaagcatcctcaggtaaagtttccacttctctgtcgataaaagattcgaccagatcccaaagatcttctgtgtcatccggagagtgatcgcttccgcatgctgcatagcgcacggagggcgtgct

SEQ ID NO: 14060 - DNA, 440 bp, Arabidopsis thaliana
aggtcgactcctatttaccttcaagacatgagcaactgtgccttctggcttagaagcatcagggacttggaacactgcgttatgtctgtttggatcaaatggctcgtttataggatcatacttctccataccaaatttcttaaatacctgcagcggcacacatgtttaaccggtctcatctgcattgcttacttaaggtcttataattacatttctcgatatttacctcagcaagctgtttctcagtcatctccactccttctaaaagggtctttaatagtggagctgctccagcagaatcttctgaggtgtcaagctttgagaagctttctttgacaaccgaagaagctcttccaagattatccgccacatccaataggctctttgcaaaatctgcatacatatatagtgaatatatatatttcagaaactactatatg

SEQ ID NO: 14061 - DNA, 573 bp, Arabidopsis thaliana columbia
tgtgacttataccggaccaacaatggtggcgaatacgcttcacgcatgtgcgattcttcttaaaagaaccccggattgggattggtttatcaatcttagtgcttcggattatcccctcgtgactcaagatggtaaatgcttcaatcttttccttgtgttcttgatattccccttgttaagactatcaaaaactgttctatgtttatagatctgattcatacattttcgacattggaccggaaccttaactttatcgagcacacaagttccttaggctggaaatagtaagttttttttctctcattttctgaattcttttagtgtttcattagttctaaagtttcttgtgtctcacggtgaagcaagaagcgggcaatgccattaataattgatcttggactctatatgttaaacaaatcaaacgttttattggttagacctaatcgaagtttaccttctgctttcaagttatttaccggtaagtactgttcttctaatcctggtttaaaaacatattttactctgttcttgttagcttgaaacttttttgttttgtgtaggatcagcttggat

SEQ ID NO: 14062 - DNA, 510 bp, Arabidopsis thaliana columbia
aataaaattgtatactttaattatactgaataaagtcttcgttagatagcagtgacaccaaatccctaaaaatgggagaatctatcaggaaaggttcctggtttaaacttagaggcttcatgtctcgcaagttcaggtggcaccaaactattacactcattaagcttctgcttcaaaccataaaacacatctttatcctcaagagtcaagaacgttgtcgcaacacctgtcttccctgctcgccctgttcgtccaatcctatgcgtataaagatccattgtgttaggcatatcgtagttgatgacttgtgccaagtcaagaatatctaacccacggcctaaaacatctgttgtaacaagaacgttaaatctctttttcttgaattcttctaagctataatctctctgttcttgcgactttcctgcgtgcaatgtagtcacacgacaccttcctaccttttcaagattcttaacaatgtaatcaaccttgttcctggtatcacaaacacta

SEQ ID NO: 14063 - DNA, 607 bp, Arabidopsis thaliana columbia
ccgtgcaaagcacatacggttcaagtcataagcggtaaagactcagtactaagaacttgtttttgtaccatgcccatacattctaaaaatccatcgcccaacaacatcttcaacctcttgctctttgaatcggggaccggctgttaaaaaatagaaaagaaaaatcagacaattagagtagcacataacactatatataaggatattgaccattcagaagccaagtactgttaccttctgtcatagcccggactcctagctcttgctctaccatagtctgaactgcgacgcccataatctggactcttacgtctttcataaggagcaggacccttgtacctgtcatattcaggactgcgacgacgggtataatcaggactaggacgcctccgatacactgggctaggagatctccttcttcgactgccagcatatctatcttctctttcaccagcctccctcaaggcatactcaacagaaacaaccttatccagtaatttgctgccaagagaggataatcaatgtaagggattccactcgatcaatcactacatgtcagataaataggtactaactaagcaggtttgttgttacatgttgtgtgtag

SEQ ID NO: 14064 - DNA, 534 bp, Arabidopsis thaliana columbia
gtttatagaaggactctaaagccgcagcaaaaaatttccacttctttcgagcaacatgctcttctctgaaaagagaatctgaggctgtaagcaacagctgagactgaatgtcttccacgaaagccaaactctcactagtgctcggttgaatattgctaaacctcttcctattaagctccatgcacgccttcttagctgcttttaagtgttcacccaaggaaaacatagaagaaccaaccgctatcttagactcccaagcagctaacatagaagaaagaaactccggatgcgatgaacggaaggaaaaatacttgaagcttttcttttttgatggggaaggctgagagttcatcattaccatacaaggagcatgatcggaatcccatgaggataaaaaattgcagaagtattaggaaaaagcgacaaccaattattatcaacgatggccctgtcaagcttcctaacaatagggttgaattgctgatgattagaccaagtgaatacacacctctgcttggtaaatcgccagattac

SEQ ID NO: 14065 - DNA, 854 bp, Arabidopsis thaliana
gggtacgtacagagtcggttatagtataaagagattttcaaatttaccttgtaactgtaatatccagctgcatatccccctggaaattcatgaacaagttagtaggtgaatggtcagatcaaaacgcaccaacgatgtatagtctctcaggcttaagagggttgttaccggcaaagatgtgactgaagctacagagaaatctatcctcaggaagtggagggataacttgggtttttactgataccctttgatctacgtcatagatggactctggtcctcctggtacgtattttgtgtgcagctcaagatcaacactggcaaatttcaactgaaaattcaaaacatgaaatcatcattaataccacccctgaaaacaaaacattagcagctagttgtcttatattcacctgacgaagactaaaggaccctgcacggaatgttcttgcggccaggagtttcttgtatacttcctctgggagtgtttctcctgtttcgtaatgcttagcaatgctcattaaagtgtccctgaaaccagcaattcataacgctcatttcacattactttgtaaatcacaacgaggtaacatcgattctgcctggaaatgaactccaaattacctgtggtagcaccaattctccataaactgtgatggtaattcaaccgcgtcccactcgatatttcggataccagcaactagcccctcatcctgcttcgtaagcatgtgctgaagagcatgtccaaattcatgaaatactgtctctacctgtaaatcagagtgatgttatagtcaacaagaaaggatttttgagatttcatgttacgcttagatatgtgcaagtgcaatggatgtttt

SEQ ID NO: 14066 - DNA, 887 bp, Arabidopsis thaliana
tagtaacgtccgccagtgtgcttgtgaatgtcttaaaatggtaaatccgtaaatggtacgtactcccacatttattttttctttactcccacagttattcttattcggttaattatattcagacagaacttgatacttttttttaccacattaatactccatactgaaagtattcatctgaccagtttgtactttcgataccatctgaaagaatactttattgtagtaaatttttggaaaattccaacggagaaatcaatgagattggtctcaaacgattatcttaaaatggaatatattttcaattattaccattaaccaaaatcaaaattattttaaatgataaaactccaattatcaaaagaagttttcagttttgtgtgctcgaatcacaggcgtgagatgaaaccgtcccctgttataacacaacacaaccaaacctctcactcatctttcataatatcctcttattggttacatagagattacaaaccataatagttacgctaatcactccctttattcgcagtattcgattgaatccaatacaaacatgacatgattgattttgattctaagatgaagaacataaaaaaaaagggaaactaacccatagagtaagaaggtgtaggcaagttaatgacagtggtcttcactttagtcatcaaattgatgctatttgtcacaccttgtgaccctattccactgtccttaagtccctgtttattccaatccaaaaccgagttaatcaaaccggtcataacggaggcaaaaaagggtctagacatcgatggtttactggaaagggaagtggtctggtcacgagctggccagagttgatctgaacggtcctgtctcattgcacactgatcagtatgcttgttgat

SEQ ID NO: 14067 - DNA, 450 bp, Arabidopsis thaliana columbia
caaaaactaatcgtttaatattcaatgtacatgtatctagggtaacaacattatgagattcacttgcccgtgatgaatgggtgagctaatgcctgtgacactgtaattctcttctgaggatcaagtatgaaaattctgtctagaagatccctgaaatgaaccaacaacttgctatcttcatccttataacgttgtttaattactgaaccaaattcttttggctttatgtttaccatcattctctttgttgtctttctagtaacactatcctcctctgtagcatagaagcataagtccttatcaaagtgctgatcgataaatgctcccttgcgaacgatctttttagggaaggcacctttcagttccatatgcaggcgtaacatttcattgtttgtggagccagggaacataattttcccgctaaaaagctcatacagacagcaaccaact

SEQ ID NO: 14068 - DNA, 412 bp, Arabidopsis thaliana columbia
gattgtcttgaatcatcttggtccctgttagactgatcagtagaaatatcttggtgtctatttccagaacacatgtggtggatgcggagaaagggcagtcagtaatgaggcagaaaggagcattatccaagatattgttacagcagtgattgtgactcgaagagaagatatatatttgacaggtatccatattttgttctagcctaagaaggattcataatctggaaatcatactattagtaaattattttggagagatgctcccacgagttaggagatttcaatagattagattagatccctccaaaggtcttgatgttaaactcctgagagacaactgtcgcaacgactgtcacttgggcttaagatcccattgcattctgtatcgatctacttacacctgtacttgaga

SEQ ID NO: 14069 - DNA, 1275 bp, Arabidopsis thaliana
cttcaaccagacaagatcacttttttagaggttctgtctgcttgtagccatggaggattagttcaagaagggctccgttgcttcaaacgaatgactgagttttacaagatagcagcagaggatgaacactacacgtgtctgatcgatcttcttggtcgagcaggtttcatcgacgaggcttctgatgttttaaattcaatgcccacagaaccaagcacacatgctttggcagctttcacaggaggatgtaacatccatgagaaaagagaatccatgaaatggggtgcaaagaagcttcttgaaattgaacctaccaaacctgtgaactactccatcctgtcaaacgcttatgtctctgaaggccattggaatcaagcggctctactgcgtaaaagagagaggagaaactgctacaatcccaaaactccaggttgcagttggctaggggactactcaatctagcaattataaccatgaacacatcaatctttagtcagcttaaaaagccatggaagtaaagattgttcaagaacgccaaagcctcccattgtaccaaaacattacatagcctaggcctaagataaatgatgcaactggacaactccagtgatcttttcatgtcactatgagtgtataaacatacaagattacagatacaagttgaaagtgaggttcagattctatatcgaaagaatctaagtaagggagagaatatttacccatcaccatgtcttgttacaagatacaaaaaaaatcagtaaaggcctctctttatgcttatcttagtttcttgatagcgagtcttgccttgttaactcgtagttgtcagctccgttgtgggctaggttctcgtgatttacaattgcaatcttcgaacagaggaagaagaaagaagatgtgtagattgtgaaatgccaaatactgcacacaattttcataagccaaccttcagaaaagtgatacaatcgatattattcatatttgataaactttacatacacacacacctgtgccacatccagtagctcgaactggtttctactttgaaacttatggctgccatggtgaaggctacaagaccagccgccacaaagccccaacgaaaccgtttcttgagcgtcttgatcaaattactaaaccattctttgactgcccgtggcctatgacaagaatatgacagacctcagataaataatgattttgtcacagtaggtaatcggcgtaagtcaggaaacagaatggcttccttattttacctgtcgagcatgtcaatga

SEQ ID NO: 14070 - DNA, 576 bp, Arabidopsis thaliana columbia
cgataagacttgtgaagagaggctttggaagatgaaacaccgtggcgagacaaacttttatttatgtgagataaccagagatatggttattgatgctactcataagggaaacaaatcaagatatattaatcatagctgcaaccctaatacgcagatgcagaaatgggttgttggtaactgtcaacccttagtgcttgtttcctagtttagaatacttgagagagaaaagtcatcatttggtttacttttgcttgcaattaggataattgacggcgagaccagaatcggcattttcgccacccgtggtatcaaaaagggagagcatttgacctatgattatcagtaagtttatatcctccttctccagtttactttgtaacatatctgtttttatgttgagttgtgacactaagaaatagagcaggtttgttcagtttggtgcagatcaagactgccattgtggggctgtaggttgcagaaggaagcttggtgtaaacctagcaaacctaagatagcctcggatgaagcttttaatctagtggcacatgaattggccgagacactgcccaaggtatt

SEQ ID NO: 14071 - DNA, 560 bp, Arabidopsis thaliana columbia
aagagctcgactttgtcgacttcttcacttataaacagagagaagacatcatcagccacagcttgagcttctttagccgtaggtaaagttccggcttctaggtatttgtcgacggggatgtacgggcgacggaggaaataagaatttcccttcttgaccacgctaatgactgtgtattcaagacctagacctttaagctctttgattcttgcctctgctttcttaatgatgaaattgttgaatccaccacataatccacgatcaccggtgacgacaacgagagctactttcttaaccggtctgactttggttaagggaacatcgacatcatcggtttgaagctgttcgttgatgttgtaaagaacttcaactagggtttctgagaatggtcgtccattgacaacagcttcttgagctctcctgactttagctgcagcgacaagcttcatagcttcggtgatcttttgagtgtttttgactgaatcgatacggtctctgagctcacgaagagacgcttggagtggtgaacacaggaactcgtgaaggaggtgaggaagtgt

SEQ ID NO: 14072 - DNA, 511 bp, Arabidopsis thaliana columbia
tttcattttttggtgtaaatgtcaattattttcattttattggcatgtgttttatcaaatctaatggctggagcaccgaaagttatatacttatattacttatatgaatttgagatatcaaaggagaaattgtggagataaaattttcatttctcgtaatattttggaataaaaacacataagattgttttttttttaagaactaaattatgaacccgaactaaacagcaatatataaaaaaaaaaaatataaggtgaaaataaatgaaaaaacagagagaattccaaattgtttttttttttcttctgattttcagaattctaaattgtttgttcaatcttcaacctccaaacttcatatcttttttctcacaacgctcaagaaacgtagtaagaactttaatggcattgatctgacattgcagaccaaaatgtaactagctgtctcttcgaacagcgcgtcgacaccaagttccgtcctccgggaactattgtctgaagcgcctcgatc

SEQ ID NO: 14073 - DNA, 461 bp, Arabidopsis thaliana columbia
attcctgtgagaagaaaagggaaggagaagaagatagagattcgaatagggatcggtgaaaagagtcgaataagacgagccattgttgataaaaatgccaggattggtaaaaacgttatggtaactacatggatttcaacttacaaaattcaatttctataggttatatatatatataaatatttccaactcttgataaatacaattcacagataatcaacagagacaatgttgaagaaggaaaccgagaagctcaaggatacgtaataagagaaggaatcattatcatacttcgaaacgcagtgatcccgaacgactccatcctctgatttttttcctattttacaaaatccatcatttttcaatgtaaaataaaacatttctattacatgtcaccaaggaatgaaattaatatggtcaacaaacctgttactaattgaaacaattacatttcacaaaaa

SEQ ID NO: 14074 - DNA, 483 bp, Arabidopsis thaliana columbia
  unsure (1)..(483): unsure at all n locations
nnnnnnnnnnnnnnnnnnnnctaaagcgtacttcatctagaaactccagctctcccgatgttcggccgctctccttcgttgatctccttaacactccctaccctcagccaggtcccgctccggttcatctgggcaattctcatcttcgatcttctgtgggaaacaatgcatccttgctgagtcataagcagacctttgatatgtacctggcgaatgtgaagaagacggatgatcctgccgttcagtatgaatttgccgttttcatggtcaacgccatgctagaaatgccggacgatgtattggaaggcggcaagcgctcaatctcagttgagaaaggcaaaacttccaacgacattactcgctcccatctcttgaaagaggccaaatcgattttgcagggactagccaaccgcagttatccttttgctcagtactacctagcggacggctatgctcgggcttattcagtaaagggaaagagga

SEQ ID NO: 14075 - DNA, 469 bp, Arabidopsis thaliana columbia
cagaacagtattccagctcctaacagctcctgcaaacaataccaagtgagttaagacctcaaaagttcaataatctctcccggaaaaccagaagataagaaggaactagcaagatgtatgcgagctatgtggggaatctctcgttaaacattgttcttccaaagttatagtttagttctatgtaaggaatctatttaaagagaagaagtttctttacctttagcggtgagaaagcgaatgtcacaagtgcgtttgcgccaaaattcacaagcactgctagactgattcctctacctcttaattttaagggaaatatctctgaaatcatcagccaaccaatagggccaaaggacagctgcaagattgatggaaagcctcttaagatcatatcaaaaaatttactgaaaatacaaagccgcagatgacattgtacggaatggaactttgatcagaaaaatgtgtaagaaaa

SEQ ID NO: 14076 - DNA, 600 bp, Arabidopsis thaliana columbia
  unsure (1)..(600): unsure at all n locations
tnnnnnnnnnnnnnnnnnnnnnnnctaaagaccgatgatcacaatgccgttactcattttgcctccgatgccagttcttcaaagacgtctttgccgagggagcattccgggcagaggaagttatccgggacttcactccacggcgttcctggcgcaacgtcctgcattggctcgccttttgccggatcgtaaatccactggcagacgctgcactgcatccgtgggccgaggtcagccgtcgtggtggcagaggtttcttctttaactaccgtattcaccgtgctctgcggcacggcgcgagcgcccactgacgggcgatttcgcgaccgtgttcacggcataacttcagagcgtcctggtctggtcgccatttcgctttcaggctaagcgacatttcgaaacccgcatcctgcaggcgcgtggaaagacgatccaccgcacctgcgctccagccgtgagagccgaaagcactggcgcgtttgttacggaagcgtaaaccagtcatctcctccaccagcccggcgattttcggcatcatcacgttattcatcgtcgaagtgccgaccagcacgccttttgaggggaagacattagtcagga

SEQ ID NO: 14077 - DNA, 190 bp, Arabidopsis thaliana columbia
ctagtaacgccagtgtgctctaaagtacaactactgatgaaggacctgcagatgggtttgtaagcgacaacaagcattctgacatcttgtattatcttatgcttctacacagcaaagaagaggaagaatttggtttcctgcagactatgttcagtgccttctcttcaactgatgatccacttgactatca

SEQ ID NO: 14078 - DNA, 498 bp, Arabidopsis thaliana columbia
tagatccctgttgaatgtgctctaaagggagttaaacatggcttataaacacattggcgtggcaatttccgggaatgaagaagatgccttactggtgaataaagccctggagctcgccagacataatgacgctcacctgacgttaattcatattgatgatggcttaagcgagttgtatccgggtatctacttccctgcaacagaagatattcttcaattgttgaagaataagtcggataacaagctgtataaactgacgaaaaatattcaatggccgaagacaaaactgcgtattgaacgcggagaaatgccggaaacactgctggaaattatgcaaaaagagcagtgcgacctccttgtctgtggtcatcatcactcatttatcaaccgtttgatgccggcatatcgcgggatgatcaataagatgagtgcggatttgctcatcgtgccgtttatcgataagtaaccgcttaccagtaatgctccgctgtcatatgg

SEQ ID NO: 14079 - DNA, 612 bp, Arabidopsis thaliana columbia
tatctatacagacttatttttgagacttgtacacacaacatttgaagatccctcatgtatgttaggttgtagtaatcgtcactctatatacatcttccgcatcctatacatcctcttcctttctaaacatctctctactacttccccatatggttcacatcacccagtaccttgctcagtttctgcgatttcattcatagtcttgaacggaaaaagcgtttcttaaaaccaagatttgagttcttacgggaggaggacgtggcatatggttgaccgttgagacaacccgcaaatctgatatcccatccttcgatgttctttggaacacatgagtcgaataggaattgcccgagtacgctgtgagcgtttatgctcgttggttggagtgggcggaaggacgatctttctctctgttcttcttgtgaagatgatggatcgctgttgttgctgttgctttgatacggtgctgagctaggtaagaaaaagtggtcaccatggcccagtggctactcttcttaggctttggttagagttcacagcaactttctgaaggtcgcatattaactcagagaattcatcatgcgtgtgaagctttttcgccgagctgccgga

SEQ ID NO: 14080 - DNA, 865 bp, Arabidopsis thaliana
tgaaagagaattctatcgattcaaaacttaggtatccaactttggatggtatcgagaaagtgttgtagccttggattagatgactttgtgtttatcattcgggtgatggtttggttatctccctcaaaaataaccttcttatgcccgaagccataggaagcttgtatagcccaaataagtgttgaacactctgcctcctccgtcgtcatacgaccttgaaatttccccataccacactcgatcacagtaccttgagagttccgaagatccaaccaagtcctgaaactgtgtttctttcatggtgcgatgcatcatagttgcattttaatttgtctcttcccggcggcgaccacttggtattacgagacggatctgcattcctgttcccattttgctgctcgtttgtcattgtattgtccaaccattccttggtgtcattgagagccatctccactgtagtttggaattttgttcgcgtgtggttaaagactaggtcgtttccgctcttccatattctccacattaaccaaaagggcataaatcttgtaactcgatccacccttgaatcattatgcatttgaaagatgatacgcaacttctcttccggtggtattccattgtcacataattgggaagtttgaaagcctgcagctctccatatcatttcaacccgaggacatgagaagattgtatggtcatttgtttccagctccgtgcaacatcgcgaacaatacgggtccacgtttatgttccgacgtcgtagattttcggcaataccaatagcccgggatgcatatcgccagagaaaatgttttaactttggtgttatgattttttaatgtctactagattgtagtaactatca

SEQ ID NO: 14081 - DNA, 308 bp, Arabidopsis thaliana columbia
attcaacgtatgtatgtctttgaagccaaaatatctctgcaaacaaatttgtaatgaaccaatagacaaacttccaatgcgaacaaagttctatatacttaaagagatcattttacacataaatcgtcggcgaacaaattctatatcttttagcagcaacctaacgtcctgtgactcaacctcttcctcaaccttgaagaatttatggtgaattcccttgagtaatttcaaaacattggccaatccaccgttgttctcactctcgtctgttttttcctcagagtgaggctttaacacccggcttttgg

SEQ ID NO: 14082 - DNA, 554 bp, Arabidopsis thaliana
tgacttctcttttcttctttgttctccttttctcgtctcttctcataagcaatggcgatgccaacccaaattacaaagaagctctctccaagtcattgctcttcttccaaggtcagcgatctggtcctcttcctagaggccaacaaatttcctggagggctagctctggcctttccgatggctctgctgctcatgtacacaccttaaaccatatttaactttgatacagaatatatctttgttagtaacattgatatatgaattgcaggtggacttaaccggcgggtactatgacgcaggagacaacgtcaagttcaatttaccaatggcgtttaccaccacaatgctctcatggagcgcactggaatacggtaaacggatgggtcctgagctggaaaatgcacgtgtgaacatccgttgggccacagattatctgctgaaatgtgccagagccacgccggggaagctttatgtcggtgtaggagatctaatgttgatcacaaatgctgggaacggcctgaagacatggacacaccacgtacagtttactctgt

SEQ ID NO: 14083 - DNA, 568 bp, Arabidopsis thaliana
accatatcgcgctcatcccattcgccatccatgcggctttgcggggcgggagcaaacaggttttctggcaggtagcctttccacagactgtgcattgagttatccggatcgcacaccgacatcgcgccaaaggtatcgccatgataaccattgcggaaggtcagaaaacgctggcgcgcttcgcctttggcttgccagtactgcaacgccattttcatcgccacttccaccgctacggaaccggagtccgcgagaaaaacgcactccagcggttgcggcgtcatcgccaccagtttgcggcacagctcaatggctggcgcatgggtgataccgccaaacatcacatgcgacatggcatcaatttgcgacttcatcgccgcattaagctgcgggtgattgtagccgtggatcgccgcccaccaggacgacataccgtcaaccaggcgtctgccgtcagacaaaatcagctcgcaacttcggcgctcaccaccggataaaccggcagaggggaggtcatggatgtgtatgggtgcaggatatggcgttggtcaaaggcaagatcctttag

SEQ ID NO: 14084 - DNA, 1324 bp, Arabidopsis thaliana
agaagacatgctaaaaaattgtaggtgtgaatccaaaagatggttgcttgttctgtgaagaggacactggaacaattagtcatatactatttcagtgtccattagcaagacaagtatgggcattattgaatgtaccatatctagtgcatggttttagagattcaatttattccaatatgaatcacttggtgcagatttcacaggcctagacagttcctcaagacatcggatatgttaattcttggattttatggatattatggaaaaacaggaacaaaagcttttgaagaaggacatcaatggtggatggctcagagaaatggatttcctttgactggagctcaagattctctggaacaaagatgtattgcacctcaatttggagagctaaaatgtaacataggttttgcatggtttcggaaaaaacctctatctggagctgcctgggtggttagggattcatacggttcagtttactccatagttgaaaagcctatactctaggtacactttttgtttgaaagcaaaacttaaaagttgggaatggactcagatggtatgaattggcacaacttggagagggcttcttgttttgaagtcattcaagctctaaacaaaccaatagaatggctagctattatcaatcacatagctgaattgttgagttttacaaagaacaagccaaattggtttgttatcatggaacaaccaagtgctaataaaggtgcttttgagatagcaaacagtgtcttaacagggtttcgcctgcaatcatatgttgcaagaggacatcctcaatggcttgctcaactttttgcgaatgagagtgttaagattcatgaacacatttcctaaagaagtttgaaatcggagaatgttctaaacgagaacaagctacaaaggagaaagaggtaggttttcagttgccttcaaagaagcgataactcactctacatagtctgtcaagatgtttttggtatgtttaacaggaacaaaggaaggaattttttggctcatgcattgtcatcttgcaggattaagaatgttgacaaagacagagtttagtcctttcaatcgggtttaagtctaaattttagtctaatatgttgaagtttaacagggattatcaattttcatgtgatggatgtcaccactgtattaatacgactagagataaacaaaaaaaaaaaggtaatcagattaggcccacttaagccggttctccttgacagaaccggttggttttttctgtgaattactaaccagttttatactgtcggatccttaaaaaacctcataaacccttgaagctcgaggaattgtg

SEQ ID NO: 14085 - DNA, 178 bp, Arabidopsis thaliana columbia
gtaagaatctcgattcattcttacaatatattccaaactgggtaaaagttgctgttgccttggctttaggtctaggtacgatggtgggttggaagcgtattgtggtgactgtgggtgaacgtatcggtaagcatcatatgacatatggtcagggcatgtctgctgaactggtagcaat

SEQ ID NO: 14086 - DNA, 759 bp, Arabidopsis thaliana
tggctaatgccattgaatcactgacaaaatgaccgatgacttcaacttaaaagttcaagcccacagttccaaaggtagaggaagtggtaaaatttaggtatggtctctttctctctctctcaattttctctttctacaaatatatactacagttacagtagtagttattattattaattattctctccccaatcaaacaacactcatcagagtcacacatgtgtcacttttttcttcaatattttagttttatgaataaaaaatcaaaataaaacaataaaaacttttttaacttggctagtttcccagtataaatagatgtatcaacgaacacatttaagaccacaaaagaaaccaagagctctcaaacaaaacagccttttacataagaacaaacacccccaaaaactgcaaaaaaaagagagagatcattaatccatcttcaagatgtctcttcctgaaactaaatctgatgatatccttcttgatgcttgggacttccaaggccgtcccgccgatcgctcaaaaacctggcggctgggccagcgccgccatgattctttgtaagtataatcacataataaaagttctagagaaaagctaccaacaatatacatgctgaagacaagaattgaaactttttaatggcatttactaagttataagtttcttatggctatcattcttattcttttatgtattctcgatgtatccaactttatcattaacaaaattttattgtgtgaaggtattgaggcc

SEQ ID NO: 14087 - DNA, 340 bp, Arabidopsis thaliana columbia
tagaatagcttcaagctcggccggatcaacctattggaaaagcttcatctttgaaaatccgtccaatatgaaacaaggaagaattatgtttaatctttggtataaacattttacctgataacctttgtatttaataagttctttgatacgatcaacgatgatgatgtctccatcatcatcgatgtatcctatgtctcctgtgtgaagccaaccttgttcatcaattgtcttgtctgtctcttccttgttcatgaagtaatcttgcattacacattggttcctcacacatagctcaccatgaagtgttcttcgggagtgttctaccggtgtcaggatctat

SEQ ID NO: 14088 - DNA, 609 bp, Arabidopsis thaliana columbia
aaaggaacgaaacaaaatctcatcctcagcagcaggtgggtaccggacaactaatgcctggaaatatgataaggccaatgcaagcaccacaggctcagcagcttgtcaataacatgggaaacaaccaactcgcatttgcacaacagtggcaggcaatgcaggcatgggcgcgtgagtgaatatcgatctctcacatcctgccaacgccagccaaatggcacacatccttcaggcaagaatggctgctcaacagaaagctggtgaaggcaatgtggcctcacagtcaccatctattccaatctctagccagccggcttcatcttcggttgttccaggtgagaattcacacatgccaactctgctagtgatatctctgggcagtcaggatcagcgaaggccagacatgcattatctactggctcatttgcctcgacttccagtcccagaatggtcaatcctgctatgaatcccttctccggccaagggagagagaaccaatgtacctcgacatttagttcacctacaaatgggatgcctcaggaaatccctgcagacttctgcaaatgagactcctgttttggatcagaatgcatctcaaaaaaaagttta

SEQ ID NO: 14089 - DNA, 569 bp, Arabidopsis thaliana
ccaaaccaagacccaacaaaggaggacatgtagagaagttgttactccagagcagaaaaccacaggaaacacattgttttgggcctgcaagaacctgttaaagcattgaagaagaccgtagcgaagatgcttgggatcatgaattttgcgtaggagccagcgagtgtagcaatggatttgttttgtccaaagaagacgagaaggtgctctgtgttagcccaaatgatggagagaggaatagaagctagtgtaagaacaaacatagctctttgcatttgtattcctaacattccgtacttctttgctccgtacgcttggccacaaagcgtatctaacgcacttgctgttcccatctgttcatgaggaaaatggaaaagtgaatcagtgtagtttcttgcttcacaagtaaaaacgtacaacccaatttttaaaactttcaattgaatattaaaatttggatttgttgacatcgttcaatgttcgacaagtggttttcaagttcaaataagagccataagcaactgcttaaagcattcatttttgtttatcaagaaaacattttgattttg

SEQ ID NO: 14090 - DNA, 539 bp, Arabidopsis thaliana columbia
agtgtgctctaaaggccaaaatgcctctcctgacgttctccaaccccttgtaatactgtcaatccagatattttctactgctcaatattcaatcggcttcaggaatacctggtctaaggttttgtgatggacgatgagcggctgaagaatccgcctgtcggttcttctgtcctcgaacgcatccgcgatattcacgccagtatgcgccgtgtttatttgcaggtgatttgcccccctgctgactctcagccaactgtatcgccattaaggtgaagatgttgttttactcgccccagaacacccttttttatacgactattctatttctttaaccgctggcgaaaaaaactgactataaacttcaccaataatcagactgccatcaagattaatttgttcatttaatatatcaaatcaacttgttttatttttactatcaaaaatagctcattgccttactataattaatatataaattcggtaattaattcttaacatgcttttactaataatctcaattgctggccctataatattgc

SEQ ID NO: 14091 - DNA, 985 bp, Arabidopsis thaliana
atcccccctccacgccgccacgataaccgcagcaacctgcgtcatcgggctaccgatcaacttcttgaaacggtagcggtttgttccggccaagaaaacgctgagtgcaagcacgatcgcaaacgcgcaaattccatagccccatttgcgtccaacatcgtcttgtacgtagacaaggaccgtcacagctaaaagagagccaacgttgatacaaaagaagaaacggttgaagaaatatgtcattttcgatcgttcttttggttcggtctcatcgaattggtccgacccgaaacccgagacactagccttcacgcctcccgttcctagagcggtgaggtataaggctaagtataggaccgtcagttgtattccacttgcttgttcgcagtgagacgacgttgttggattgcatcttggtggtcgaagtcccggtatgattgttgatagagttaagattgaaacaccctgatagcatcatagttcataacacggatattatttttcggaaaactataacaaaaataacgacttatgctgtttactatttcgatttgtttattgactagacaatatttttattttcttcgttttcttgggtataagttttggtaaggagaaagggacttttgaggtccttaccgtggcttggattgcggcgaatatagcaatcgttaggtacctatacaaaacaaaatgaatgaactcaaattaatattttaaaaagaatctgaatgattttagttaagtaaatataaatatatttatagacaaacctgccgagaaaggtatcggcgatgaagccaccgaggagacagagcatgaaagaagttccgaggaaattggtaacggtgttagccgcagttgcattgcctaaatgcatagttccgtcaaatacgtcaccagattaactccgatacctaacgtcgtcagcctctccacggcctcaatacgttcacacaataaaattttgttaatgataaagttg

SEQ ID NO: 14092 - DNA, 617 bp, Arabidopsis thaliana
aaaggatactaataagagatgtaacatttttcaaatctcaactaggtttaggctaattttatcactacatagggacaattggatagtatatccatgctttcttataatgtgtctgtttcataaaaaccttgtttccaagttacgtccaataattaattaatgtagggcatttttttcttagacttaccaaaccataaatgcagaaggaataactagtttcataaaagggatgatatcgcgccgagcttccttagagaaaccggtccaggtcagggagcaagaaggcgaaaacttgacgtaacacgacaagagaatgacattgagccaatacgagatcgcattagcgacacgagctcctctaaaccctaaaccagatttcaacaccaagacccaacagatgatcacgtgaagagaagtggtgactccagaacagataaccacaggaattacattgttctgcgcctgcaaaaacctgttgagacattgaagaagaccgtagcgaagatgctagggatcatgaatctggcgtaggagcagagaggtgtgcaatggacttgtcttggccgaagaagaccaggaagtgctctgtgttggcccaacgatggagagaggacaga

SEQ ID NO: 14093 - DNA, 485 bp, Arabidopsis thaliana columbia
tgcatgagcgtgatggtcatgaagattggaagtttgataatatatatactacacaaacattcagttacaagaaacataaaatacagaaggttacaagaagcctcaagatgaaggtgtgtgccaatgatcttaccagattcagtagtagtgttccaagacttgagttttttcaagctttcccaaccatcatctaccatatcacaaaaatcacgatataagaattaacacaacaatagcaaaggtcaaatttttattgagctaccgaaccgaaagaatcctactacttgcctgttcttgaacgcttagatttgggatttgatttggcaaggtcaatgtgaagagtagaatgcttttcaagatcaaacaccattccctgaaaggttcagaaatagaattcagaaagtttcttaatctaggcgaatgacaaagcttattcacttacgcatacaagtcccaaccgaatgatttcaatttactagattgaa

SEQ ID NO: 14094 - DNA, 469 bp, Arabidopsis thaliana columbia
aatcaccaccatatatagcgcggaaaataataaaaagcccgacttgctgtgtgatgatcaacagaatcagcattggtagaccgatttccacacagtttgcaagctgttaaaatccgaagagatcacataatgacttagtgaaggagttaaaatttgttaaagctgaatactttagttgaaattgttaccagtgggaagcctctaaggaataggccaaggctcacaacagaaacaacgggcacaacaatgatgggactaaagattctgcattaaagaaaccataatcattaaatgttaaaacttccatcagcttctaaactagtaatgttatatattgatcttttatattaccttattaagttccccatgcctgaccatatccgattatgatgttgacgaatgaagaaatgattaatgatccttgtaccgttctcatagtatgtcggaactctacaaggaaaatggcatt

SEQ ID NO: 14095 - DNA, 471 bp, Arabidopsis thaliana columbia
tgataatgttgctccttccatactatctatgtaatcctgtaacaagtccagaaacaaaattctcactgatctttcggatttctcagacacaatttggaggctgttcttgcttgcatttgtagctatcggggatctggctgaaagatagtaagtgaaaaatgttacctgctttgtgtatgaaccggcgaggaagaaattctttatgggcgtcttctgatcgggtctgaatggatcttttccgggtgcttcacggtacagagactgagcgatttttacaaccgacgaccaagtgacttctaggcctcgtgacgatggaaacaactcagtgacctgaacaagatttgagaatcaacaacaaaccagctagacaaaagtgttctcaagagttgaatttagccatgttctttactgcatcgctactttctctatgatcctatcactttgcattcgcatatacggatctcctggtgt

SEQ ID NO: 14096 - DNA, 478 bp, Arabidopsis thaliana columbia
ttgctaaatgtgaaaaaatcattaacgaaaaaatttgaacatcactaatatagtacctttggtatctcagggattgacaaatgctcaactcctcctaaaggcatatcttcttccacatgcttatctccttccgccggtttatctttttgtggcggtttgtcttcctccaccggtttatctccttccgccggtttatctttttgtggcggtttgtgtccctccgccggtttatctttttgtggcggtttttcttcctcagccggcaatttatcctcctcgaccggcttatctcctttcagcagattgtcttccttggatggcttgtcttttctcggcagcttatctctttctggcggcttgtcttccttcaacggattatctcctcctgattgcttgcactttctgccagcttgttaggccatcaggctacctcctcgtgcatgcaaagtagctctggaatactcttctttcctaagtg

SEQ ID NO: 14097 - DNA, 1351 bp, Arabidopsis thaliana
tattgatatgggaataactaaaacttctcctaatactacaattctcttgaagacttttcacaataattctatgtcccaagattatcatcatcatcatcatcataatcaacaccaaggaggtatcttcaacttctctaatggattcgaccgatcagattctcccaatttaacaactcagcagaagcaagagcatcaaagggtagagatggacgaggaatcttcagtcgccggaggtaggattccggtctacgaatcagccgcgtatgttatccgaaatgtttaatttccccggaagcagcggtggaggaagagatctcgacctcggccaatctttccggtcaaataggcagttgcttgaggagcaacatcagaatattccggctatgaatgctacggattcagccaccgccactgcagccgccatgcagttattcttgatgaatccaccgccaccgcaacaaccaccgtctccgtcatccacaacttccccaaggagccaccacaattcttcaactcttcacatgttacttccaagtccatccaccaacacaactcaccatcagaactacactaatcatatgtctatgcatcagcttccacatcagcatcaccagcagatatcgacgtggcagtcttctcccgatcatcatcatcatcatcacaacagccaaacggagattgggaccgtccacgtggaaaacagcggaggacacggaggacaaggcttgtccttatctctctcatcgtctttagaggctgcagcaaaagcggaagagtatagaaacatttactacggagccaattcttctaacgcatcacctcatcatcaatacaatcaattcaagactcttcttgctaattcttctcaacatcaccatcaagtattaaaccaattccgatcatctccggctgcttcttcctcttccatggcagcggtcaatatcttaagaaactcgaggtacacaacggccgcgcaagagttgttggaagagttttgtagtgttggaagaggatttttgaagaagaacaaacttgggaacagctcaaaccctaatacttgcggtggtgatggtggtggcagctctccttcgtcggccggagcaaacaaggagcatcctcctttatcggcgtctgatcggattgagcatcaaagaaggaaagtgaaactactcaccatgcttgaagaggtatgttcatattaacttttaatattgattttgactttgtctatactctacagtgatattagttcatacattttacgtaaaattgttttcgtgacatttcgataagattcataaatttgatcaagagttatgacaaagaaacaagaaacctgatatgactgaat

SEQ ID NO: 14098 - DNA, 546 bp, Arabidopsis thaliana columbia
acactaatcaggtacgaagcagaagttgcatgcaaatggattttggagaaaaaagggcttacaggttaccaggtaaagttcctaggaagttcactaaatgtaaaaggaatcccaattttgcatgagttgaatacgtgtagaatcttcagtattctatgaaatttgagtttctcagatagcataactcccctaggtgcgtgttgatcatataaaatctaatttgcagattggaaaaagtaaggttttcctgagagctggtcagatggctgagttagatgcacacagaacaagggtgctcggcgaatcagcgaggatgattcaggggcaagttagaactcgtctgacaagagaacgatttgttctcatgcggagggcttcagttaatatacaagctaattggagaggtgagggccttaaatttttttttttttaatggcgttatggtttcattgatatgcagaggaaattaggaatgctgataaagtctctttttcatattttaggaaatattgcacgaaagatatctaaggaaatgagaagggagga

SEQ ID NO: 14099 - DNA, 538 bp, Arabidopsis thaliana columbia
gagggtcccgcggaattacttgtacactagatgacaaatcttaagttagtaacttaaacaaaggaagtacaccacatagcttcgcctataagttcggttacctaggtcagatacttgtctaacgcatcttatgatacatgaagacaacaaacaggacaagtaagtctgttcaacccaaaagctttttaagcacagacgttgaagccactactgatttatccttcgttttcttaaggtaaaatttgcacaggaccggtcctgcaacattccaggcaaatgtacatttcgcaacaccttcctgaatggcataatcgtaaacgacgttgtagagtgccaaggcttgggggtagagttcttccagacttttattgctgtcttcaaaccctgcagcgccatagaaatcctgatacagacagaagaaaccgttcaaccgatgagttgtgttaagaagcattatatggactaatcaacaaaaaatgtgattcatgaaatctattggtcagatctttgcattggattgagcgagacttacctgctt

SEQ ID NO: 14100 - DNA, 477 bp, Arabidopsis thaliana columbia
ttgccagaaggaacagtactccggaatatccgccggtttcagccccaaagcagaaacgtttcggccatacacctggtaagatattatccgattatgttacttgcttgtaaacaaaaatttgcagagaaaatttataaatcacacaatgaatcatcatgaagaaggtcttacctgaatatcaaggaacaactgcatacacatcttgtctgtttcagatacattttgatcagaaacacctgatgctgcacctcctcgtctctgtgcattttgacgcaatttctgaagcgatgactgtgtttttcttgcctgtaacataatacaatcaatatatctagattctctaccgcctttcactacacataaattactcaccatctctgcatctttatagtaaaaaaaaaataaaaaaaattgaaaacgatctttagggatagaaagaatgattctggtttttgttttggctactggggttatatt

SEQ ID NO: 14101 - DNA, 500 bp, Arabidopsis thaliana columbia
ggtccgattgagttatggcggatatttgttatgaagacgagacgtcggcttgtgaatcaagaccgttgtggtctagccggaagtggaggatcggtgtccagcgattcaggatgtctccgtcggagatgaatcccacggcgtcgacgacggaggaggaggataaatctgaagggatttataataagcgaaataaacaagaagagtacgattttatgaactgtgcatcgtcgtcaccttctcaaagctctcctgaagaagagagtgtatcacttgaagacagtgacgtctctatctccgatggaaattcatcggttaatgatgttgcagttattccgtcgaagaagacggttaaagagacggatctgaggccgagatacggcgtcgcatcggtgtgcgggagaagaagagatatggaagatgcggttgcgttacatccgtcttttgtacggaaacaaacggagttttctcgaacaagatggcactattttggtgttacgacg

SEQ ID NO: 14102 - DNA, 1023 bp, Arabidopsis thaliana
cgacgtatcaatgtgcttctcacgaaatgcgggtttttggagctataggaagcggacgtagcagcgttgttcaacgagctattcatatccctaatcatagaattttagcgttgaagaagattaatatctttgaaagggtaatgttaatctcttttgctagtttaaagagaaaaatgtgactccatttagtatgtgtttttgaatatgtactgattttggtgagcaggagaaaaggcagcaattgcttacagagatacggacattgtgtgaagctccttgtcatgaaggacttgtggattttcacggagcgttttatagtccagactcgggacaaatcagcatagctcttgaatatatgaatggaggatctcttgctgatattttaaaagtaacaaagaagatacctgagccggttctttcatcattgttccacaaacttttgcaagtaaagatacttaactctctctataatgtgcaacatatatatgcgttatgttttaagtgtatataaattcattcttagtgatgtgatttcattttaagggattgagctacttgcatggagtgagacatcttgttcatagagacattaaacctgctaatttgcttataaatctcaaaggggaaccgaagataaccgattttggcataagtgctggccttgagaattcaatggctatggttagtgattgtatctcagtctttcactccttattaatccagtaatccttttttgatgagtttttaacttgtattatctgaaaatgatggttgcaaagtgtgctacttttgttggaactgtcacctacatgtcaccagagaggataaggaatgacagttattcttatccagctgatatatggagccttggtctcgctctttttgaatgcggcactggagagtttccgtatatagctaatgaagggcctgttaatcttatgttgcaggttaatcaacttgtccccaaatcctttcttccgatatattatttatatttacactaattactgttatgtgaatgaa

SEQ ID NO: 14103 - DNA, 553 bp, Arabidopsis thaliana columbia
cgactctatacctagattctcaccaagcatctgtataacgaagaaacataacaggtttaagaaagacacatttttcttagttgtttccgagctgttagaaacaaatcatttgactttaccgttctctgttgctctggagctgcattcgcaagccgtgtagccaaagctacaataggaacaggttgagaagtaggcgagtcacgatgatgcacaccaccaccacttgagacgtcatatggaacagaaagcatgttttgagtaggaccaggcattgtgtttacatctcgctgaggataccgatacattcgacctcttggatgcatctgtagagaaacagattgatgcaaaatgtaagcatgctatcgattttaaacatgtggagaaagtcttgggcctaaagcaaaacttaacctgctgctgcatcataggagaaggttgttgtggttgtggaagagctcctcttctaccaccaccaggtcgctgctgctgctgttgctgctgttgctgttgctggccttgttgcatcataggcatgaagaagtttggcattgga

SEQ ID NO: 14104 - DNA, 529 bp, Arabidopsis thaliana columbia
  unsure (1)..(529): unsure at all n locations
nnnnnnnnnnnnnnnnnnnnctaaagaccggaaatatctgctgtggcgtaatacagcctttcatcagcgtcccggaaatcagtgcccgcacctggtcggcgtcgtcactgttacgatcctgttgatcgaacttattgaccagcacgtacagcggcaccgattgccccaccgccaaaatcgcctcacggacctcttcatcggagatcgatttcagttgcgtataatccagcaccgccagtaccgccgaggcgcgtgccagctgctggttaagcattttttgcagatgcggttgcccggcttcatttggcccgggggtatccagtaacgtcaactgaccgggataactctccagccccgctagatggacaaactccacttcaatcacgggaatatgctcaatggcggcgtaacgagaaaaaggaaaatcgacgtccagcgccttcgccagtcgcactaaatcattcaaacttttcagacaatgaaaaataggctgggcacccagataatatttttcgaaagcgacgccatt

SEQ ID NO: 14105 - DNA, 409 bp, Arabidopsis thaliana
  unsure (1)..(409): unsure at all n locations
ccagttcttcctatacctgcactaagagagaaaaaaacagttctctcaggagacgttcaagaacgcttggggcccgcgtttacaggcatcgtacggtcagtgcacaatgagggnagccagactaggtggtacttggtatagtcttttgagaatttgacngacagccactgtgggcgtgtggactccgtgatcannccagtgtgtatagttaatatgcaaaagggacatggacggatccgtgggtctntaaaacgacaagatggggaagtgagacatgcttaaccctcgaggaaatgacttgatctggtaaaaataaacaggacagaactgatggaanattcttacctcctgagtgagttaacctcaagattcggtaacatcaatggaagatgagtagtctttatccact

SEQ ID NO: 14106 - DNA, 756 bp, Arabidopsis thaliana
taaaaatcttttattagctgtgtgtatcgtagaattagatacaggctataattatcacacagtttcacctatttatttccgaccattacttaacggttactacaattctttgcatcatcatcattcatcatggattcttcttaccttagaatctctctttcttttctcttctgggctttactactctcaccggctgtgtcacagtcatcttcttgttcgtcacagacattttccggcgtcaaatcttaccctcactgtctcgacctccctgatcttaaagccattctccattactcttatgacgcatctaacacaactctcgccgttgttttctctgctccaccgtcaaaacctggtggttggatcgcttgggctattaaccctaaatccaccggcatggctggatctcaagccctcgttgcctctaaggaccctagcaccggcgttgcttccgtgacgacccttaacatcgtctcttacagctctctggttccctcgaaactgtcctttgacgtgtgggatgttaaggcggaggaggcggctaatgacggtggagctttacgaatctttgcgaaagtgaaggttccggcggatttagcggcgagtgggaaggttaatcaggtttggcaggttggtccgggagtgtctaatgggaggatacaggctcatgatttcagcggtcccaatcttaactcagtgggatcactcgatttaaccgggaccaccccggaatccctgtctcctggagtggtggtg

SEQ ID NO: 14107 - DNA, 485 bp, Arabidopsis thaliana columbia
agttatcaatcgcataactgacgctacccaatacctatttaaactatgtgaatgtctctggagccaatgggttgatcagagtgaaataagccaatttcctttgttcatattaatcatggcagactgcaagaaattgcactaggaattgaagatgaagcgatcaatctcccttttgatttgtgtgaagaggcgattagctaaacccgctatagtctaattgtgaaaccggtgaatccaaggaagcagaacttacgagcaatggcgagtgccttaccccgtctatggggtgttggtgaggaagtttcaagtcgtattctggactcccgtaagatccaattcctcttccaatctgaagattcgatggcgtcggtcctgagacgcggtccttggtccttcaatgaatggatgtgtgtggtccagaaatggaacccaaatcacaccgaccaagatctgaaacaaattcctttttggattcagataagagg

SEQ ID NO: 14108 - DNA, 451 bp, Arabidopsis thaliana columbia
cccaaacctgtttctcctcatccaagttgggtttatcagttcagctgtgtagaaattcaatcgtctgagaagtccgaggtttgatgtctgatggttttaagatcgaaaggatttgacttttatcagattagtaatgagattagattgtttttgaggttattgtaatcagatcttgatgctatttctggtgaaagagatttaagacaagttagggaatgggtaatacttgtgttggaccaagcagaaatggcttcttgcaatctgtttcagctgcaatgtggcggccaagagatggagatgattcggcttccatgagtaatggagatattgcaagtgaagctgtttcgggagagcttcgatctcgattatctgatgaagtccagaataaacctcctgaacaggtcacaatgccgaagcctagggactgacgtcgagaccaaggacagagaga

SEQ ID NO: 14109 - DNA, 592 bp, Arabidopsis thaliana columbia
aatccttcgctaatttcaagaaaaaatggatatgatctttacctgtgcgagggctgctgctacaaagtcgttgactctttcttgaacattgtagtcaaaaaggagaggatcatcctatattcaagatgattcatcagtgcacgttcaaacaaagttcaaaaacagcacagccggttcaattgcttttacctggataggagctgatacatcatttatttcaaacgtgaacccttcaggagggtcataatgtcttgggaatacaccagtaaatatctacaagtaacatcaaatagcaatgagacaaagccagctatggaaacagcagaattataatgtgaggtttaacggtttaaacctgtgaagaagagccaagagacttggaaccttgccaaataacctcaagtgtcttctctcttaacctctttgcacgatcttggtagtcaattctagcgaaaaacagcgaatcaaagccaaactgtagaagaaaccaaagggttgtccgatcaaaataacttagagctgatataagctaatcattcacatactgaactcatctaaactcactactgaacgaaaggaacaaaaccgatga

SEQ ID NO: 14110 - DNA, 845 bp, Arabidopsis thaliana
tgcattccataatggtcttggtgttccagctttcctataaagttaaaacaaatattcaagattagtctcaatagcaaatattattcaaggtcccacgatctttagttttcaaataaagacgaaagaaaatctaaaaagatattttagcgcaaaaagtatgttatggtcccccgcacaagctattggaccggtctagtgttagacaagaaaatttctcgtatggaaactaacatgtctagcttgaattgtaaaatcgttaaaagatatatcatgtagatggaatatgttcaggtctaagtaacgtaagagtatagtgttatagtctgccttttcgacaaagcaaaggtgaagcagaggaaactgacatcaccattcacagaataaatttgcatttgaatgcgtgtgcgtaaagtgatcaataagaatattccaagtcacgatgatctatgttagtaaagtgacttacttgatgaagtgctcggagatagtaccggagagaatccgaccaaagaatccccaaatgctagtcatggagacaaaaatggagacatcagtgtaaccaagcgcaaccgcgatctgacccatattgttcataactgctaaaccagttcctactccacacaagaacgacacgaacaacacccaaaagtcaacggtcaacatagcttccattatggtgtgttcttctccaagaaccggtcttttcttctccgtcgtcactatagttccgtgattctcttcctcctcgttacttaacggcttaagagacggtggcaattcgttatccgccgccgctgcagcacctacgattgtttctccacttcaatctcagatcctgatcttag

SEQ ID NO: 14111 - DNA, 1421 bp, Arabidopsis thaliana
cgtattattgccttctgatcctttcccgtcacacccgtcgtaaccggtcgaaacgctacagccagtgccgctgctacagctcaacgtatcctcttcgctcaactgcactagctgctccgccgcctcaatctccgtctccgaaaacgtaacccccgagtcttcagaaaaacaaatcttctccatttgattgatcattttcgaatatctgattgtcgatcgaatttatcttgtctcctttttgaccactttgatcacgtttacgtgtattgttgttgttttttgttgtatcgtttcgttttgtcgtcttttatataacagaagcaaaaaggaaaaccctttaaaagaaaatggaaataatgaaaaaaggaaactacaatgtcggttttgcaaaaggaagataatatggaaagttaataaaccatgcctgattcaatggaaccgagtatattttaattacgatccggaaccgtcaaaactattgaccaagtttcagaatctttgttttggttgatccaacgactcctgcgactttgtctgttacttatatggtggggtttagtggtttacaaaatttccatttttttttgaagagagagagatgcgtttgacttcaattatacgatttggtggggtccatgcaaagccattccggtatcgataaggaataaacacgtcttggggcccttttgccgcattccacgtgttctcatctcaatcgcatcatcatccgctgtgggacatgccggtgcttcgcagccgttcgatcaggttaagtaaaatcattctaagattactaaattactattgaaacagttctttccaatcatattttttcatgtgtgatgatctgtgatcgaatatgaacaaaagaaatttcgaacaaatttacaaatcggtcattttaatttaacattcaaaacaaaaagttttatctacatcacatcacaattttgaaacagttatatccgtaacacacacacaccgcaacagacggatttaaatataaatgatcgtttaacacaagttttaatttacaaagaaggtgtaaaacaacactaaaatccattattaacaaagtgtgtatatatgatcgttatcagtattatacaataactacggaataactaaaagtacatgtaaaaaagaaaaacaaacaattctattagtataaccatgataacaaaagaattaatttaggggtaacaaaaaaggtttaacaagtcgtaaaaagtaaaaactgcacatcttcgtctacaaacacacttgcatcatcatcaacacatttgcttccaaagctccaacacaaactcctttgctcttctttcactgaggatcttagtttccacaattcagaccacagatctccaacactggtccccctttagccacaaacgggttaactctgacccacaagagtgtca

SEQ ID NO: 14112 - DNA, 597 bp, Arabidopsis thaliana columbia
tgagcggctctctaccaaatgatattggaagtctacaaaatcttgtaaaactatcacttgagaacaataagttttcaggacatctcccacaaaccttgggaaattgtctcgcgatggaacaactttttctacaaggaaattcttttgatggagcaattccaaatataagagggttgatgggtgtaagaagagttgatttgtcaaacaatgatctatcgggaagtatacctgaatattttgcaaacttctccaagttggaatatctcaatctatctattaacaattttacgggaaaggtgccttccaaaggaaattttcagaactctacaatagtttttgtatttggaacaaaaacctaagtggaggcatccagggtctgaaactaaagccatgcctcgcccaagaaccaccagtggagacaaagcattcctctcatttaaagaaagttgcaattttagtaagcataggcatagctttgctattgctgttggtcatagcttcgatggttctgtgttggttcagaaaaagaaggaagaccagcagacaaatacctggttcctctaagttggagattttcatgagagataactatggaga

SEQ ID NO: 14113 - DNA, 565 bp, Arabidopsis thaliana columbia
gccaaaaaaaaaggtcattcccgaaagttttaactttgctgaatatccgtgtagataaacttctcaacagaattacatttagaagtaccaactttcaaaatgaacccgtctgtgctaacgtcactcccttgaaggcaaggacgacgagtataagattgaattgtgtacaagttgaaacaatttttttttcctagtttacatgctgatcgtactttttgaaaagagcaaagagaactattcttaaatcaaagtactgtaatgcatggatgacacaataatttttactgttaatagatggtaccttgtggccttgtactcttttcagaagtgtccttttcagcaccaagggaaggaaaatctccagaagtcaaagaaaacccatcattctttgatggagcaactccctgtagaaaacaatgagaagtctaagaatgaagataaatttcatggtagataatgcaaaggtgggtaaattgtacacaactattcttcaaaaaaaaccttgaagattgaagtttgcaaataataatcaaaacgccttccacaaattctatttgccaaccag

SEQ ID NO: 14114 - DNA, 794 bp, Arabidopsis thaliana
gacatatccaaggcctatgatagagtggaatggaactttctacatgacaaattggaggcgttggggttcaatacaagatgggtaagtctgattatggagtgtgtcaagtcagtgtgttatcaggttctaattaatggctctccatatggggacattaagccatcaagaggtctaagacaaggttaccccctgtccccttatttaattgtgatctgtacagaaatgctgattaagatgctgcaaattgctgagaaacaagaacagataacaggactgaaagttgcaatcggagctccccaagtctctcatctcttgtttgcggatgatagcatgttctactgtagagttcaagaggaggagatgaatcatttgagcagaattgtggaagagtacagtctggcttcgggtcaaagagtaaactaccaaaaatctagcataacctttgggaagaatgttccagaagaaagaaagattggagttaaaaagaaactcgacatagaacaagagggcggacaggacgtttaccttgggctcccagagtctttcaagggctcgaaggtatccattctcaactacttgagagaaaggctcaagcaaagagtgaccagctggcagaataacttcctctctccaggagggaaggaagtcttgttaaaggcagtagcgatggcccttcccacgtatacaatggcctgttttaagcttccctcactgtttgtcacaaattgttcagtattggcggagttttggtggaaaaaaaagcaggaatcaagaggaatgcattggaaggcgtg

SEQ ID NO: 14115 - DNA, 597 bp, Arabidopsis thaliana columbia
cgacaatcctctcacaggatcaacggtgaaactccactcaatcacacaaccatcttcgccacgtggcaatatcttcaccgtcgaaacgtaggattcgaatccagtgttactctccactatctcgtatctcatcacacgttcaacaggattaacggccacaagcttctcctttgaccatctcgcggcggagtctacaccgttggatcctatggaaaagccggaacagaatctgatgcaaccctgttcaccgttgttgccgtggacgccgtgacatgtggctagcgttggaagccacttgtggagattgaaaaaatcggtgaagagaggccagatttcgtcaggctttgcctttgtgagcgtaactgatactttggctagccatttttctgggcttgaagctttttccatgtcaaagagagagatagagagagcgaggatctagatatatgaaaataagatatagtgtattgtttatatgagtctatgacatctaagtaaaaatatcatatgaaaacaatttggagaatgaaatttgattacatgaatagttgatgccgatacagtgatcgaagattttaccgctttttttgtttttga

SEQ ID NO: 14116 - DNA, 733 bp, Arabidopsis thaliana
ggcctagtcggaaaagacgattttatcctctctctctctctactcttaacggctcatgtgtttcgtattagcaacctgccgccgacttagtgtgctaattcacgtgactgatcggcgcgatttcgccgggaaattgcagaaattaaattccggcgacgttacgaaacttctagatatagacggatcggtgagaacggagagagaattacctgaggagtgctgcgagtataatggattgagccggagaaaaggatcttatgttcgccgtcgatgatcagcgagcgaccgtcgtatgttacgtttgcgacgtctccggcaactataaccgccatgagaacgagaaaaactagcgagtactgaaaagtcgtcatttcttatgtaaacactgacgtttgaagattctagagagtttttatagtttgggactatgcacaactaactgtgcagtgtatctcaccatcgtctcgaatttatgcgacccaatcataaatttcttctttattttttcttaaatccggtttatatatgattcaatggaaattgcaattataaagtaaaagcccaatagcgtcaaaaaaaagtaaaagcccaataatagtgaggcccatcaataatctggagtcaaacaatggtggataatggaaatctctcaaaatccaaatccggttttagccggttataaatgggtttgactggtttcgggtcacaatcgaacggttgacgtcgatcatca

SEQ ID NO: 14117 - DNA, 509 bp, Arabidopsis thaliana columbia
cttccttcatctttctagcagcgatcaaacgcatctcagcagcttcaatcttgtttctcgtttgttcaatctcagccacagctttattaaccgcataccgaacattctctcctgttctactaaattccttagcttcataacttagtctctgaatctccatggacatttcagctgcattctcagagtttagtctctctcgtgtcttctcaagtgcagctctttcctcttccaatctcttgtttagtaacccaacagacacgcgaatagcagccaaatcttttgtcgtcttgcacagattcatctttgcttggttcaattccttgaaaacattcatgtcacaattttctttatcctccttgttctgtatctttgatttgagctcttcaacaatggctttggtcgactcaagtgacttcaacaccttcaaagtttctccttctttctcaatcagttccttctctaactcactcgctttcaaaaccataccaacttcgttctgcaaccaaaga

SEQ ID NO: 14118 - DNA, 591 bp, Arabidopsis thaliana columbia
cctttaattagggttgtggttttgttgactaattcattttgtattggttcccacgatacaatttttactttgacacctagctaagtggcgagcattactttattattgactagtaattttcagaatcttaaaacgaaatttctaattagtttatttaaaaccacattcatcatctctacctatttagaaacattcgtccagacttctttctttggtctcgaaaaacatggagttgggaaaatcgattgagaaccataacgacgttgtggtaagactaacgaagcatgtcatcgctaccgtcgccaatggctccaatcttgtcttctcaccgatatcaatcaacgttttgctcagcctcatcgcggcaggttcatgttcagtcaccaaagaacaaatcctctcattcctcatgttaccgtcaacggatcacctcaacctagtcttggctcagatcatcgacggcggcaccgagaaaagtgatttgcgcttgtctatagccaatggtgtttggatagacaagtttttctccttgaagctttcctttaaagaccttttggagaattcttacaaggcaacttgtagtcaagttga

SEQ ID NO: 14119 - DNA, 445 bp, Arabidopsis thaliana columbia
cagagtttgcatcttgtttgagccgtcaccgtttcttagacttaacagccacaacacctttataaagcttcacgcgatccttcaacgcatctcgccgaggccgagccaccttattgtttggatcaaacaacaaaacttcttcaaacgcattcgatgcccaaaggcaagtccttctacttctcataagcatccccaaggttgtcccaagctgttacataaccgggttgcagcttcaccggcatttcaaactgagcaattccgttgtcacgtgtatcctctcgtacataagtcactccaagagcgttatagacctgatctcaggaattgtatattgccgtgtcaattgatgactaagttactggcgcacggtattagtgtaaaagtctattacctgagcaagatctcgatcatcagcgtcccagatctggatagcttgttgccaaaa

SEQ ID NO: 14120 - DNA, 584 bp, Arabidopsis thaliana columbia
tgagaataaggtttatggaggtaataagttattgattttggaagtcttatctcattgtgggaattgtgtataaagaagttgcatttttgaacttttattttggttttgtttttcaggagacaaatatgagaatggagtgatcacacctgggcctgttcctgtccctactaaagaggggtttgattctttaaagaaggagagtaagccggaacaagaggaagctgaaataattctaacgcctccagatgagggtaaaacctcaggacaagtgcaaggtcaaggaagtctaacgcttccagatcagaggagtgtcaaggaaagacaaggaactcttgctctagtacaaggccaaggtcaaagaagtggaatgtctatccttggacaagggcaaggtgaaggaaggcgaatgtctattcctggacaatggcaaagtcgaggtcaaggaaattcatttcaagggagtttcaagcagacctagggaactctgcccgtgcgaaaagggcaaactcaaataagtgatgaaataccttcgttccaaggaaatgttaagcaaagacaagaaatgccaatccatggacaagggc

SEQ ID NO: 14121 - DNA, 1045 bp, Arabidopsis thaliana
ggttgacctgttagcaaccaaaacttaggggttaagaatcttaatcttgtgtcagagaatactgcaacagatgaaacaggaagctgtgtgaagtattttacctagcaacaatgctcgcaacagactcagtttcaagaccagacccgtaagcaaatagcgggtcataatgtgtatctccatagctcataggcaactgctctgtgtttctgaaccatgtaacaggaagttttccactgaagccatggtccccaaagagagcatcagtgataccttggccttctgttcctggtagccatgctgcaaccaatgcatcgatcgaggcaacgtaaggttccatcacaagtggtctacctgaaatgaccacaaccacacacttgacagcctgacaagtggagctaataatcgctggaccggggtcaagcatagttagcttgtcgctgtctccagctgtttctgcatatggaggttcaccaacagcaatgattgcataagcaaagttgttcgatttgatgaattcagcatccgggttctcgcggaagacaacttcagtgctttgatcaacagctgattttacagcgctaagaagtgtagtccctgaatcagaagaaagggtacagtctattaacagtcacaagatatttgttacaacttacaaagcataaacagtcacagacaagatgatagaacttgtataatctgcaataagagttgcagaacgtacctctcgtgttcttattaccgctaaatccttgccaagttatggtccaaccaccacactgataacctaaattatcagcgtgagtgccagcgactaggatctttgaagtcttcctgggaagtgggagcataggattggttttgtcccgttcttcagtagcacaagggattttctaacagcctcccttgccaagtctctatgtgcctaatataaattgagaacattccatcaagactttgtagtacttgcaacagattctagctcagggttattaggcaactgacctggcttccatagtcactggaaaagctgtaatcagccaaaggg

SEQ ID NO: 14122 - DNA, 580 bp, Arabidopsis thaliana columbia
cacgagcattaaatgcaaagtagcgaaacatcccatcccatctcctccctctctctcttaaccactaagcaaaaatcccatctttctatataaacctctctcccaactctgctacttcccaccgtaaatcgtttctgggttcttaagaataacatggcctcgtcatcatcatcatcttatagattccaatctgggtcttaccctctttcgtcaagtccttctcttgggaatttcgtcgaacgcattaaagacgcttgtcatttccttgtctctgctgttttgggtaccattatctccgcgatcttgaccttcttcttcgcactaggtttgtcttcgtttcttgtaactcttcttgagattgtctgtagttctaaaactcgattttggatctaattgttgctcatcttcgattggattgagttggatcattgaattgatttgattattagaaagtttgtaacttggagctaagaaagctgattcctttttcatgttcagtgggcacattgctaggggcacttacaggagctttgataggtcaagaaactgagagtgggttcatagaggagcagaattggag

SEQ ID NO: 14123 - DNA, 497 bp, Arabidopsis thaliana columbia
tggaatttactgaccttcgaagattactcggagattgaatatacaatgaaaatccagctacgaaaactgagcaaagagcaccgacgttatctctctcgccggaattggcggagaaagacgataagcgaccagtgagattgcggcggaaagcgtgtagatcggaaggaagacacggcggaccgtacggattcatcagtgtgcatccaacttcggctagaatggcagtcatcttctccaccgcgtcgggctcaacggattccttttgcggctgggggattttgagagacggagcagctgaggatgacgacggaggcggtggaggctttttgcgagagagaaacaccatttttccagtgacggcgacggagattactcttaatttcgcctattgattctccgattagctaatttcctgaagaaattagattcaaaatttagtaaccctgaagaagctaccgcaaattttcaacaaagaaggcccagagttctcattacat

SEQ ID NO: 14124 - DNA, 699 bp, Arabidopsis thaliana
ccactttgcagtacaaggaagtagccaagtgctaattctatctctctttttagttatttattatatatatcctttaaccagaaaaagttatttattataaataacttaaaacctaatctttgccctaaatcactcaactcgatctggagaaagaaccctaatttggaaacatatctaaaaagctatggatttgatctctcaaaaccacaacaacagaaaccctaataccagtctctcgacgcaaaccccttcttccttttcttctccaccttcctctagccgctacgagaaccagaaacgccgtgactggaacactttctgccaatacctcagaaaccaccatccaccgctctctctagcttcttgcagtggcgcacacgtcctcgattttctgcgttaccttgaccaattcggcaaaaccaaagtccaccaccaaaactgcgccttctttggcctcccaaatccaccggctccttgtccttgtcctctccgacaagcctggggctcactcgacgccctcattggtcgtctccgtgcagcctacgaggagaacggtggcgctccgagactagcccttttggctcacggtccgtcagagttttcctcagggaggttagagattccaggctaagtcacgtggtgttagctatgagaagaagaggaaaagggtcaacaacaagcaaataactcaggtccaac

SEQ ID NO: 14125 - DNA, 522 bp, Arabidopsis thaliana columbia
actcctagaaatatttcatctaatgagtacagaagcaatgacagataaccaacctatgaacatagaggaaatactttcgtcccttcaaatacatttctctgacataagaatcctcgccttctactggttttggtgcagttgcagcatcttcctctggtatagcatatgccatttgaaccgacccccctccaagatcaaccactccaactgtgtccgagtacggctttcccaaagtccttagcaagtaattaaatgtcaccttaacaatgggaagtttgatgaaacttaaaacttgttacttgactacatgtttaagatgaagagacatacagacatacaacaaatacaggcacaaaagtctaaccataatacaacagatttaaaatccgaactggatttaacatgaatctgactctaattgatggaaaaactacaacatacccactgataagatccttcctgagtaccatccagaacagtcactgcatttgcacagtcttcagcctacttctacctttgagg

SEQ ID NO: 14126 - DNA, 1182 bp, Arabidopsis thaliana
cataatcgcattgaaataaatgattattatatgatctaaattctaacaaagtgatatttaaagatgcctccactaataaatcataaagcatggtcacataatacacacgagccctaagtgtatcaactatcaagaataatcatcgaatcatctttcaaatgttaaaattgaaaacaaaagaaaactccaagaacataatggatcaaacactttatcgtaaataatcgtagtttttcttattcataaacaactagtacagaaacaaaagcatcagtagataatgtaaaagaaggttttacattaatatcttagagaaagcaaataagagacaatacatatagaaaaggggaaattatataaatatgatcatactgttgcacccgagtaattagccatcatagactgaccttgttgtggctgctgttgctgttgctgaagctgtagaggcggctgcgtttgcggtttctgcctgttgactctcttcctcttcttctcatagctaacacctcgagctttggcttgaaagtctctgacttcacggaggaataacctgacggcgcgtgacgcaaatgggttagcttcaggtgggccaccgttctcctcgtaggcggcgcggaggcggccgataagagcgtcgagtgagccccaagcttgccggagaggacaaggacaaggagcaggagggttagggaggccaaagaaggcacagttctggtggtgaacttttgttttcccgaactggtcaaggtagcggaggaactcgagcacgtgtgcgccgctacacgaggggagagagagcggaggacggtggttccggaggtattgacagaaagtgttccagtcacggcgtttttggttctcgtaccggcttgaggaaggtggtgttagttgtgttgaggaattagggttcttgtttggttggtgagagataaatccatggctttttcttgttcttgattttggaaaaagcagccggtgaagccaaagcagatgtctagccggagagaagaggatagttgaagaagattgaatcttgatttagggttttgtttttcttctttaattttatatggatcaaagagagattagggttctttttttgtagacttgagctaagacaataattgcagcaaatgagaaaagtgagaagagagagaacttagctgttgtgatgatgagatg

SEQ ID NO: 14127 - DNA, 672 bp, Arabidopsis thaliana
tatactcacaaacgtaaataattcgcgagaaaaaaaactatatatgtaatatatccatatataggttttgatgaaaaccctaaaactatagatggtttattcttcgtgatcggtgtttcagtgccgaaacaaaacattcatagtttaaaattcagagagaaccaatgcttcctaaagcgttaacattgtaaaatccagacgagaaaaaaccagaaagacctgccgacatctgaggagcattaaacacttcctcatccaacggtgaataatactctccacggacctctccatccaacggctctaagttcatctccgactcacacggacggtggagatctacggcggtaaaagtggtgggcgacggtggtagatcagcggcgtcttgaccggtgagttcttgaacaagctctctgaacttagaaggacaagtctcgactctcatcggatttgatatgtaacggactttgatgggtttgtgcgtagtcgttgacttcctcttctgcttaggtgggatctagtcggagcgatgatgactttctctggtttatgagcaacgttgatgatgactgatccatctctttagttcttttgtaatatggagaaaaatttagatgtgtgagctcctcttgttttagtccaatttttaaatatatatacaatgacacttttttt

SEQ ID NO: 14128 - DNA, 1340 bp, Arabidopsis thaliana
  unsure (1)..(1340): unsure at all n locations
ccaaactattttcagttataattcatctccggttagcatctttgatgttgtcgagtgtcgaccatggcattgcgtttcccgcctcgtctcctctctcagctgaagctatctcggcgtctgaattctctcccggcaccggtatctgaagattccgaagacgaatctttaaaattcccatccaatgatcttcttctccgaacgagtagcaatgatctcgagggcagttatattcccgccgatagacgtttctacaacacgctgctgaagaaatgtacagtctttaagttgctcattcagggaaggatcgttcatgctcatatccttcaatctatctttcgtcatgacattgttatgggcaacactcttctcaatatgtatgctaaatgcggaagtttggaggaagctcgtaaagtgttcgaaaaaatgcctcagagagattttgttacttggactactttgatttctggttactcgcagcatgatcgaccttgtgatgcgttacttttttttaatcagatgttgagatttggatatagtcccaatgagttcactttgtctagtgtgatcaaagctgctgcagctgagagaaggggatgttgtggtcatcaacttcatgggttctgtgtaaaatgtggttttgattcgaatgttcatgttggtagtgctcttcttgatttgtatactcgctatggtcttatggatgatgcacaattagtctttgatgcgcttgagagcaggaatgatgtttcttggaatgctctgattgctggtcatgctaggagaagtggtacagagaaagctctggagctttttcaagggatgcttagagatggttttagaccttcccatttctcatacgctagcctctttggtgcttgttccagtacagggttcttggagcaagggaaatgggttcacgcttatatgattaaatccggtgaaaagcttgtggccttcgcgggaaacactcttcttgacatgtatgcaaaatcaggaagcatccatgacgcgaggaaaatattcgatagattggctaaaagggatgtggtgtcttggaactcgctgctgactgcttatgcccaacatggatttggaaaggaagcagtgtggtggttcgaggaaatgaggagggttgggattcgcccaatgaaatctcgtttctctctgtgcttacagcttgcagccattctggtcttctagatgaaggatggcattactatgaattgatgaagaaagatgggatagtcccgaggcttggcactacgtcacagtcgtagaccttcttgggcgagctggtgatcttaatagggcactgagattcattgaaganatgccaatag

SEQ ID NO: 14129 - DNA, 699 bp, Arabidopsis thaliana
gtttcaccatctaagttcatcgtctccacataacagatcccatcctcataactagatgacaataagagcaaatcagcagggaaaaattgatccttttccacctttacaacatcccctacacgtaacttcttccacttcctacgaccaaaatcaccatcccctctgtgaacagtagctttcctcgaattcaccttcacatcctgcataaacctccgccaatcctccaacgcctctttacccatactaagcccaaccacaaaaatcaaaggagcgatcatactccatttgttgaatggggagagaggaaagacagagagaatagcagcaacgaggaagtagaaattggcaacacggtggaactgctcatacaagcatttgggcaagaaagtaatgagattatacctagtggtggacacataatttgaagtgtacctaaggactttagccaaatgcaaatgaggttggttacaatgaacaattctcgtgtatccaggtccattaatgatatgaggtccttgatcttctagggtttttggtctgagacatttaaaggtgtagaaatggcttttccggatccttgatcttattctacgacgccccataatctctcaaagtttcagctcaagaaacagaaagatatcctttcgacaacgatgtgagatcagctccggtgattcaaagactccttgaaagattggt

SEQ ID NO: 14130 - DNA, 1032 bp, Arabidopsis thaliana
atgtccctgcttctcatcaacttgcagacatcttcaccaagtctcttccccaacgtccattctttgacttaaggtacaaacttggcgttgttttacctcccacaccaagtttgagggggtgtgtgaatcagagagaacctcctctacaatcagaagctttgctttctgcgaatggacctgcaacactcaacaatactttgggcctcagtcaaagtgtcaagcccatcaacctcaagtcttctctaccttgcaacggtaacaagattcctcaatttccagcgcatcaacgtacgggattcacagctaatcatttgtcccttcataacaaatttgatcctctttgttcctctgtcgtgatgtgcagctaatgacgtgtgacctagtgtctcaccattttggggttcatatataaacccttctctgtcattgtaaaccttaagctgaaatattcaataaagagatttctcttcatcatcgttttatcaatactttcactattttagtctttcaattacttctttgttatagaatttaaccacaacattatcaatttattaactattaagtaagagtttgacattattcttgcaggttttctgtacaaccaaccgtatcaatggtatcaggttttgacatgacattacataattgaaggttttgctgtcgttacatagtagtcaaaatcaaagtgaattattttaccaaaatagttgtttagattttaaccaaaggaacaaaggacaccgataatgttatggttatatataatttcctttcaaccaaaaaacaaaaaggaaagaagaggattacataaggaattgtgatgaagtagagagattacaacaacataacagaaagctcagttaaaaaactttggcttgagagtttgatccgactaaacataataaaatgtatgttccaaaaagaaactcattacaaacccttccatttgtttacaagatttcagacatctttttttccggtggtgacttttcaggtgtgagctgacgctgcagtcattcccatggatga

SEQ ID NO: 14131 - DNA, 787 bp, Arabidopsis thaliana
aattgaattctaaaataacactgtctagtaatcacctttttcccgctaaaatataaaaatcatacataaagtgaaattaaagactttacaaagagaaaaaatctacaattgagcaatcttgacaaaaaaaaaaggacaaaaaaaaagttacaatacattagtaaacggaatgatatgagaaaggttaaagaatccagagcaccattagcgcacgccaatgccttctaagccatctcgaagagatgaagtttcacaggtcacgatccaccattttgaaatggatacgggagcaagccttagggaattatggaggacattattttgctgacgccacatgttatacacttaccagtttgaaagtattgataaaacgatgatgaagagaaatctctttattgaatatttcagcttaaggtttacaatgacagagaagggtttatatatgaaccccaaaatagtgagacaataggtcacacgtcattagctacacatcacaacagaggaacaaagaggatgaaatttgttatgaagggacagttgatgagctgtgaatcccgtacgttgatgcgctgaaaattgaggaatcttgttaccgttgcaaggtagagaagatttgaggttaatgggcttgacactttgactgaggcccaaagtattgttgagtgttgcaggtccattcgcaaaaagcaaagcttctgattgtagaggaggttcctctgattccacaattgagctcaacttttctaagcagagaaggagcggaggaagaggatcgtgaggccaagaa

SEQ ID NO: 14132 - DNA, 594 bp, Arabidopsis thaliana columbia
ctctcaaacgctctttccaggatcattcttagccagatcatatgtgcaccactggtcgctcctttgttaggcccacatggacgctttgataccaaagtgtcataagccgtgttaagctgttcgaaacacataatcacaacgcaaaaaaagtatgaaactttcttggattgaagtagagtgagactattaaacttacattcatgtcacagaaccaatacatataagcaatagagaaacccctggagctcttcccaatccggctgagcaatgcacatagactcttcctttaccttctgaaaccgcccattccaaagaagaaacagcttttggaagttggcttctcaacgaaagtggatcaaaatctttagcctaacagatttgtaaacaacaaaaccccaactgataaatgctcagattcatatgattcaacaggttgcaaaagcaagaaacgttccttacaggccttctcatgtgacggattccaagctccttacatcttctaacaatggaatccaaatcgattccccaatactcaatgtccttatcctgctgcaagttaagtatgtaagcaacattctgttccaacatgaaaga

SEQ ID NO: 14133 - DNA, 596 bp, Arabidopsis thaliana
tcctcctcctccgtagaaccagcgttccaacatccaaactctcttcttctaccgctgtgtagtagtaatactgtccctgaacagatctcttgtagccactggtctcattagagacctcaactctctgtttcggcgcactttgtgaccgaactttagctttataagactcagtgttagccatgtaattcgggtgataacccgagtagtaatagttattacatccccaagaatactcgcttcttgacgtcggcgtaaaaggagttcttcttcttgacccactagaaccaacttgaggactattctctgtacttctcggacccaacaaagattgttgtcgtttcctcggagactcattgtttctctctgaacgtaacggtttgggatgataatgaggcttccaagtatccacttctaggatcttgtctccattttcgctttcctccgcctgccaatctaaccgcttagagcctccacggtggtcaagagagctgacttcagcgtttgaaacgcagcgcgtgtgaagagaacgtggagaagacgaggaagatgggaacaaaagagcggtggaggagtggaaagaagcagaggagtgagaa

SEQ ID NO: 14134 - DNA, 657 bp, Arabidopsis thaliana
gagaagagaaacaaaagtgtacctgtaaccccattcgttgtcgtaccaagagacaagtttcacaaaggacttgctcaatccaataccagcattggcgtcaaagatactggacctgttataaccaaattggaatcaccacattggtcaaccacaaaaaaagattcagatgactatgaagaaaaggagagagaccaaccttgaatcaccgacgaaatcattggagacgacatcttcatctgtgtacccgagaatgcctttaagaggtccttctgaggcatgcctgttagaggtttacattaaaccatgagaggttattaagagttctacattaaacgataatgtttcgatgacgatatctggtcgggcaataaaattttaggaagcatacttaatggctgccttaacatcttcgtaagaggcacccttctcaagtcgacaagttaaatccaccacagaaacattcgatgttggtacacggaaggccattcccgtaagtttcccattcagttctggaagaactttacctacagcctacttgatcaaaaaaccacagctcagatatgattcccgatttaggataattacatgcttgcgataaccatgtgagtttttgtgtacttcgcggcgccggttgagctaggaatgatgttttgacta

SEQ ID NO: 14135 - DNA, 693 bp, Arabidopsis thaliana
ctggatataaagcacaatacaacaaactcgatttgacttgctcccccttaaggttatcgtagctatacttcaaaagcggaagaaccttatcctccatgcctataaactctgcagcgtatgaattcaaaacatgtatagcgtgacgccattcttgtatcgtccttttgcatgacatggtctcgcctatgacgttgagcgccaatggtaggccacaacattttttcgcaactattcttgcaagttgggggatccccggatcgcttccaagtgttgtttgtccaaccttcttttggaacaaatcaaatgccacattctcttccaagcattggacttccattggatgttcgacccccatgcgtgcacatacctcttgggaccgagtcgtaaatgccaatttacgtccttttttggttcttggatccggaactccgatctcagctaaatccaccttttcccatatgtcatctaaaaacaacacaaaactcttttccctcaagatattgtataaacaaatccccttttgacttttatctttctgtgtccactcatctccaccaagaccaagcttttgagcgatttcatcttgaaccttctccacatgaaactcttgagacacgacaacccaaatgccaatatcaaatccacacttatccttattgaacatattgtagagctgagtgagaagtgttgtct

SEQ ID NO: 14136 - DNA, 627 bp, Arabidopsis thaliana columbia
cagatcaagtagcaccaacgagctcaaaaatctaagctttgttcaaatttcaagtcaaatacttaatctttaagctaactgaagtaaaaactcaatctttaagctaacttgaagtaaaagactcattctttaagctcatttcaagtcaaaaactcaatctttaagctaatttgaagtaaaagattcattctttaagctaatttgcagtcaaagactcaatctttaagctaatttgaagtcaaagactcaatctttgagctgatttgaagttaaagactcaatctttaagctaaattgaaacagatctaaagcaataccggtgccaatctaagccaagaacagcagtaacagagcgaacacaaagagcttcaaagagaagagcacagagaaggaatacgatagaaccaaggaaaggaatagctgctcgtagctctttagaccagtgtttatagaacagaacacgagtgacgacggcgatacaagaacagaccaaagaactggcataagacgagaatgccacaccggtgacacgtaacgcatgtaatcgattacacgtatgacatcgcggctattccaagtccactttagtcatctgaaggttgatgggtcgccggatttgacggtggt

SEQ ID NO: 14137 - DNA, 582 bp, Arabidopsis thaliana columbia
agcttgaatttaaaaacgttttgttaataaccagatttcagttttgaatttaaacctaaataataagttagaaaatgttgatggatgatgtgtagatatatatttacctttctcggacatagttggagttggaaaagtagatggccgagtcaacacggatgatcaagattccgggaatttgggcagcgtccggatactgtagagtgttccgatatacattcgaatttggcagcttccctagaaccgtggttcttggtctcgtcacttgaagcaatatctttgcaaaagagatcaccacctatatgaatagtttcaccaacaaccaaaaatataagtttgctttatatagatatctattgtagataacaatctattatataaatgatcttacagcgatcaagagaccgatctcaaccgagatgaagatgactcctaagaaagctcccatgcaagccaagaagtcgagtttatcgatcctccatatgagaatcgctgcgtcaatatcgataagaccgaggacagccgatataatgatggccgcgaggatagcatttggagtgtacttgaagagtggtgtgatga

SEQ ID NO: 14138 - DNA, 317 bp, Arabidopsis thaliana columbia
cctttgcagcaatatcccatttctccttgttttagaatataattgtctcagcgcttgaataatctgtgcaagttagtagatgcgttggagtctcaggactcatttgcgtctcaactactaattttttctgctgataatctggtgcagaaacggtttcaaaatgatatgtccataaataatagcacagtggaaatcttacaagatcaacagtgggtatctattccgtggagaaagttgcaagttggagatattgtcaaggttagtctttcgttgctctaaaagaggtgaatctattcatgattagagtcattagacaa

SEQ ID NO: 14139 - DNA, 542 bp, Arabidopsis thaliana columbia
  unsure (1)..(542): unsure at all n locations
accatatgtcaatacactaatcatatgtcaatacactaaattctcctatgaagcagtatcagggagaaaagatatggacctgggagtttcataaccaatgactttgtcgtcatcgccatcatcatcgtcgacaagtaaataaggggaagattcatttggctttcccttaccataagcttcattgggtcttcgatcccctttaggatccttagactcagaataaaagttctttaaactgaccttacacttgcttaatcttggcagcgaccgccacacattatttttctctattattgagtctctattagctttgcttatccagcttccacgtcccaaatcttgtagtttgtcattaactagtttcactggttgaggtcccatctgttaaacaaggactattaagaagcagccacctaaaagggttacaaaaatagagaatgtaaaaaacaccatactttgagattgtcactaaaatgagcagcaaatgttgaccgagacacgtctttcgatcccgaagtcncttgtccagaggtgtcttttga

SEQ ID NO: 14140 - DNA, 557 bp, Arabidopsis thaliana columbia
tgaaggtaaatattcacaggaaagttgtttatcagacactaagtgataggttgaactaagtgagaagtcgcaaatcatgaatagttagtaaagctgtatagatcaaatttataacttaagcaatgacatcccaacatctgagaatcatataactcagctacataatccataaaccttctaatctttcaggaaaagtgtacatttcaataaggagttaataacactaaaccttgtcatttcttacaaaaatgattatatttgtagatatctcaaactgcaaaatctgaataccttgaaaaaattattccataagcttgttgttccaagacttaagggatgatcctcatgagtaatctctgaccttgaaagggcaccagggctttcgatttttggatcattactatcaccgccctttgatttatccattttccttgttacttctgactaactagccacaaaaatatatagaaaccaggttaattttaaacagaaaacaataacggaacatgaaaaaaggaagaattatcatccagattacataagcacctctacaatga

SEQ ID NO: 14141 - DNA, 518 bp, Arabidopsis thaliana
tcccctggccgcttctttccagatatcggtatcggtaagctgagttatcactatcaaatgaaggtggcaaaaccatatcgggtaatggaactggcactgcagctggagccccgttttctggatcatcttcttctcccggataaccaaactcactttcacccagcttcttcccgtttttcttcatttctttcatcctctttaattcctctctccattgcttcttctgcaggagctttacacggtaatcatactcctcgaaatatgcctttctctgttcatttgagagctttgcaagttgggtttttcgaagaggcttaaatggtggcagctggtcatactcatcatcttccccatcttcctgctcagaatcagacacatcatcaatttcgatatcagagtcaacactatcaccaccttggtctccagggagcttaggatgtgcacgggactgcaacagccaagacaacaagtaagggagaggcggggatctaactcggaaaccaaatactttacgatgg

SEQ ID NO: 14142 - DNA, 1157 bp, Arabidopsis thaliana
ctcgccatggctgctcaaaacgatgctatccctcttaattcaaacatagttcttaatcaacatgatgaatgtctcaacgctcataagcaacaactacctcatgtggagcttacaagttcacgcccaccttgacggacatggccttgatggtcacctcgacggatcgatcaacatccctccacccacgattacatcaaatggtgttatatcagagaatctgcagttcaccaagtataaaagccaagacaagctgatctactctaatctcattggagaaatctcaacaaatctccaacccttggtgtcacgcacgaccaccgccaatgagatctagaccaagctctctgacacttatgcgaaaccgagtcgcatccatctccaacagattagaaggcaaatcacaagctggacaaagggaacaaaaacaattgatgagtacatgaatggtctcacgatacgataggatgagatggccttacttagcagacctgcataccatgaagatatcattgagaagatccttatcgggctgctagaagaatacaagactgtgattgatcaaattgaaggcagagatcatcagttacagaagttcatgagagattactaaatcatgaagggagactcctcactgttgctacacaaccaaccaattttccagtctctgctcatgttaacacaacaacaataacaaccgctacaacaacaatggatgacgctctaacaacaacaacaactccaactggcaaccatctcagtcccaaaacaacagtcgttctgacacccgtgtatcgaagccgttcttaggcaaatgtcagttttgaagccacaatgctaggcgatgccccaactcaatcacttcagtccatgtcgtctctgtctcttaccaatccgttcaagccctcgcaaccacgtgccaatctcgcagttggttcatcttacgcgaccaacccgtggctccttgactcaagtgcaacacaccatctaacatctgatctcaacaacttagctcttcaccagccatacaatggtggtgatgatgtcatgattgcggatgggtcgaacatgaccatctctcatacgagttcactctcatttctaatcaaatttgatctgtactttttgatagaatattgtgtgtgcttaatatacagatg

SEQ ID NO: 14143 - DNA, 811 bp, Arabidopsis thaliana
caaacatttattattattattataggaattgaaagaaaattaaattttcaaaaagaccgcttacttgtttattatatacacagagaagagaacagtctcactcgccactttcctcgagaaaacgaaaaaaaaagatggtaggaagaagaaaagctttactcttttctctctgtttcttcttcctctctcttccttccttctcttcccttccatccttccaaaccctattccccaattctcattcccttccttgtgcttctcccgtctcattccaacccgactccgactccgagtcactgctagaatccgaatttgaatccggatccgactccgagtcttcttcttccattactctaaacctcgaccacatcgatgctctctcctccaacaaaacacccgacgagctattcagctcccgtctccaacgtgactcccggcgcgtgaaatctatcgccacactcgccgctcaaatccccggaagaaacgtgactcacgcgccacgacccggtggattcagcagctcagtcgtctctggtctctctcaaggaagcggtgaatacttcacgcgcctcggtgtcggcactccggcgagatatgtttacatggtgctcgacaccggcagcgacatcgtctggctacaatgcgctccttgtcggagatgctactctcaatccgacccgatattcgacccgagaaaatccaagacctatgccacaatcccctgttcttcacctcactgccgccgattagactccgccggatgcaacacccgtcgtaagacttgtctctaccaagtctcttacggagatgg

SEQ ID NO: 14144 - DNA, 1056 bp, Arabidopsis thaliana
tagaggctagaggattgtgctctaaagcggtgcaatttcctctactacgactggacaggatctacgtcaaaaatgccagcgccacgcgccaaaccgcgttgccgctgcggacatggcgacacctttctgatcatgcccctttaagtgcggagattcatttatgaaatgtagctggcgcgaaggcaataagatccagttgctggaaaacggcgagcaatattatcccgcggtgtttaaggcgattggcgaggcacaagaacgcatcattcttgaaacgtttatctggtttgaggatgacgtcggcaaacaactgcatgcggcactactggcagcagcgcaacgcggggattaaagcggaagtcttgctggatggctacggttcgccggatctcagcgatgagtttgtcaatgaactgacggcagctggcgtagtgttccgctactacgatccccagcctcgcctttttggtatgcgcaccaatgtgtttcgccggatgcatcgcaaaattgtggtgatcgacgcgcgtatagcctttattggcgggctgaattactccgccgagcatatgtccagctacggtccagaggctaaacaggattacgcggtacgccttgaagggccgattgtcgaagatattctccagtttgagctggaaaacctgcctggacagagcgcggcacgacgctggtggcgacgtcatcacaaagcggaagagaaccgccagccgggagaagcgcaggtattgctggtctggcgcgataacgaagaacatcgcgatgatattgaacgccattatttgaaaatgctcactcaggcgcggcgggaagtgattatcgccaacgcctacttcttccccggctatcgatttttacacgccttgcgtaaagcggcacggcgcggggtgcggatcaaactgatcattcagggcgaaccggatatgccgattgtcagagtcggtgcgcgcttgctgtataactatctggttaaaggcggcgttcaggtttttgagtaccgccgccgcccgctccacggcaaagtggcattgatggctttag

SEQ ID NO: 14145 - DNA, 1068 bp, Arabidopsis thaliana
ttcatatacgactcgggattagtatttcttacaagacttgttcaataaaatttcttgccaacaattatgacttttcctgttgtttacaatttttcacaagtctattgtcgattttaaatttgtgttatcacacacaacatgagactagtaaaaccaattgacattgactacaggcttctaccgattaaacttatcttgtataacaaactcaaaccatattttaatttttgttttccaattggcgactactttcagtaaaagtcacttagtttcttgctttttagaaccacaaaaaccaaatatacttttttcacctatctcattttatctctgataatttttctttacactaaatgtttgcatcacaggaacaaaaaaatatttggtttaaccaatttcgtagattgaaacgaaaatgttggtgtttgtttgaaaatttcccaacgtgttacgtgtaacgtttcgaatggtctaagaactaataagcatgcgtggcattggcgttgacgttgactcagaaaactacaagtatattttatttacaacaaaacgtatgcttcacggatccatcatcatctataaaacacgaagctaatgttcatcatctctctctgcagtctgcatcacagacacaaaaacaatggctaaacccacatcacgaaatgaccgatttgcccttttcttcataaccctaattttcctgatcctaaccgtttccaaaccggtcgcctctcaaaactgtggctgcgcctctgacttctgttgcagcaaatatggctactgtggtacgaccgatgagttctgcggcgagggctgccaggcaggaccttgccggagcagtggaggcggtggagatcctgctgtttcactagaaggaacggtgacacctgacttctttaactctatactaaaccaaagaggtgattgtcctggcaaaggattctacactcacgacaccttcatggccgcagctaattcttaccctagcttcggtgcttccatctccaaacgcgaaatcgcggcgtttttcgctcacgtagcccaagaaacagggtgtaagtaaatttt

SEQ ID NO: 14146 - DNA, 551 bp, Arabidopsis thaliana
gtgcaggattctcagctccatctccaattcaagctcagtcatagccaattgcgatgcaaaacagagacatagtagccattgctaaaacaggctcgggaaaaactttgggttacttgattcctggtttcatgcatctccaacggatccacaatgattcacgaatgggcccaacgatcttggtcttgtcccctactagggagttggccacacaaatccaagttgaagctctgaaatttggcaagtcatctaaaatttcgtgtgcggtaagtgaaaatacttgaatacataagtactgaacatgctacttgagaagtgtcttattgagtgtttttgtcaatgtatatttgtagtgtttgtatggtggagcaccaagggtcctcagctgaaggaaatagaaagaggtgtagatattgttgttgcaactcccgggcgactgaatgatatccttgaaatgaagagaatcagtctgcatcaagtatcttaccttgtgctggacgaggcagatagaatgctggacatggggttcgaccgcagatcagaaaaattgtgaa

SEQ ID NO: 14147 - DNA, 577 bp, Arabidopsis thaliana columbia
tgaaagagggcccatgccggtccaacgctagacccgccatactaatcagagggttcgaaaacgttccaagcaacaacgagcgtgcgttactcgaagccgtgtcaagacaacctgtcgcagtggccattgatgccagtgaggccggtttcgttcattactctgggggagtgtacaatgcgcggaactgtgggactagtgtaaatcatgcagtgacgctcgttggctacggcagagccggaaggagtgaagtactggttggctaagaactcttggggtaagacttggggagagaatggttacattagaattcgtagagatgtggagtggcctcaaggcatgtgtggtgtagctcagtatgcttcttatccggttgcgtaactaattcggttagattatttgaattgaagtgatcatcatgtgtttggtttttatgaattgtttagatgaggtctaaatcttcatcgcaacttaagcttgaccttttgaaactgtaatgtccatttatcgtaatgaagacagtagaataaataagttaagacaatatgtaacagaatttcaatctctcttcttgctttga

SEQ ID NO: 14148 - DNA, 1010 bp, Arabidopsis thaliana
ccagatactgttctaacgtcaggtctgaagtacttaactgagtccagataggaaaggtaaacccggcgctgattgggagacgcagaatctgttccaaattcctggacatacatgccaaataagcatacttcaacaccttcaatcttctgaaacaacagaatggcctgaaaaaaaatgagtatggaagttgatagtcaacaggcatcatgtagcagaaggtcataattagaaaacaaaaagaaggaaaagaaataagaaccaagcatacacaatctgtaccttagacttataagggaattctgatgaataattatcttcacggaaaatgtcaaggaaacgtggctttacttctaatattttgtcgacagatgctacaactctgattacaagcgagtcggctcccgggacctgatatatcaacaaagaagaaatttgatcgtatcttcttagccctaactttattaatggaaagagcattataagaaactaggtatcaagcatgtaagtgaattttctaacattagcagccataaactagttttgtatccttctttataccatctccagtgtgtaaacttcataactctcaccaataaatcaacaaaatatggttaaatgtggaaaaaaaaacacagccagcggtcaagacaaagatatacagtgggaaataagcccaagatttatcggaaaagttaataatcacctcctcatagctttttccttgaagtctagccctctcttgtctttcctgcttcagtttcttgaacaaccgctgttctaaatggttgctaagagtactggctggcaaactttttgccccaaaataacattttgtgataccggcttcctttctccttgttccacttcttgtatatagcaattagggcaagtgtactcggcttgctcatgattcctacggccgttgaacaaagcacaaatttgatgctgccatgcttgacatttatcgcattgcacccactgcacagaattaatggttcagaaaaagagta

SEQ ID NO: 14149 - DNA, 569 bp, Arabidopsis thaliana
gttggtgcgaaataaatcttcccttcttcccatcccttaaaaattctaccagctctttgttctatcttaagctgaaatagaaaaaagaaagaaacatgttttagtttaactactcttatataagcaatcataacagaaaaaccaatcaattttaaattaaaaattatattaacctgatctttctctagaagtgattcccaatcatggtttctaagctgttcatgcaagtcactgctcgcccttagccgataattcaaatctccgagccatattactttactgtaacacaaccatgtatttaaacgattagaaaatgtttactttactaaaaaactagtattcgaacattaatttttcatagacttactcatggtccattattgtctccggtcgagaatctttagaagaacgtgaaaatcttgtcctcttaaatatttcggtcacatctaagtttcttctaagctcgtcgccttctttttctccagacgtaagatgcgtacaaacgaaacatagacttgtctcatgcaacgacatgctgatcgaaaccgagccctacacaaggttgtaca

SEQ ID NO: 14150 - DNA, 729 bp, Arabidopsis thaliana
tgagctgcaacaccctctattgtgctagcaataacaatgtcgtctacatagaccaagacagcaagaaactcaccaccaaagcagcgaacaaacaaagtgtgatctccatgtcctttaataaaacccaaatccaacagacaattagaaaatttcaagaaccattgacgagatgcttgtttgagaccataaatcgttttcttgagtcttaacacaacattctttggcaattggtcccccttattgtctgcataaccttcaggtaaacgcatatatatatcctcctccaaatctccattcaaaaacgcattagaaacatcaagttgagtcaaaaaccacttcttagatgcagaaatcttaagcaacattttaatagtagccatttttgcaaccggagagaaggtgtcagtataatccaaaccttctttctgagtgtaccccttagcaaccagcctagccttatgccgctcaagactcccatcagcatgaaacttcagagtaaaaatccacttacaacccactgccttctttcctttaggtaaacttgtaacctcccaagtgtctttctcttccgtcgcaccaattttcgtatcaatagcatcacaccactctttagaatcctttgcctcagaatatgattgaggaattggaattttagtgatgttattaatgtataacaagtgagagggagagatttttgagtaggagatgaaagaagaaatgggatgagtg

SEQ ID NO: 14151 - DNA, 624 bp, Arabidopsis thaliana
ccactctttttattcccaattctctagaaccttcctctctctccatctctcaaaatctcaggaaacaccattttctcactctctgatcttttttcccccaaaaatggcgcgtgacatccaactcccctgcgacggcgacggcgtatgcatgcgatgcaaatccaacccctccgcctgaagaatctctcacttgcggcacgtgcgttacaccgtggcacgtgtcctgtctctcttcacctcccaaaaccctagcttccactctacagtggcattgtcctgattgctccggcgaaatcgatcctcttcctgtttccggcggtgctactggtttcgaatctgctgggtcagatcttgtagctgcgattcgtgcgattgaggctgatgagtcgttgagtactgaagagaaagctaagatgaggcaacggttactgagtggtaaaggtgttgaggaggatgatgaagaagagaagaggaagaagaaggggaaagggaagaatccgaatctggatgtgttatctgctcttggagataacttgatgtgttctttctgtatgcagttgcctgagagacctgtgacggttcgttctctttgttcttatgctttgttgatagatccttttggtg

SEQ ID NO: 14152 - DNA, 718 bp, Arabidopsis thaliana
gtttctggattttgaactttttgttgtttcttcgatttcgtttttgttgatctgagttgatggtggaagctacgtcaaatttgacgccgagggggagaggggcggcaagcgctttgtttgcaatcgcgcgatcggggttagatcagccagtcaaagccattgggaatcccggccaccggaagtaccggagagccaatcagcagcgacagtgatcctatctccgatgaggcggatctctgggtccacgaagtttccggcctcctccgtcctgttctcaggtgatcttgaaatcatctggaatagtcatgttcatatgcgtctctgtgtgtgtaatgtatacattttgagctgtctctgtaatttgctttcagatgtcttcagattgattcatcagcttggcatggccttgaagagatagctgcttctactcaggctaaggatcacatcggtgcggtatgattaatttctctccgtattttgaaatttcgttgtgaatgttgaggagctcttctttattggatgttacttttggtttattgtagtttatcaagttactctcagaggatgtgagtgatgatgatgatgattctagtgaaatggtggagaaagagaccgccttagctaaagctgctgatgctatggatcaaaacattcgaagcagctctctatctgtggaatctaagatggagaaacatgtggaattcgaaaacgaatgccg

SEQ ID NO: 14153 - DNA, 999 bp, Arabidopsis thaliana
gggtaccgagctctctgttgcttgtatatgaagaacttccagtagcggtcgcagcagtagaagcagcggtaggaaaacgccacatcggccaacaccaaacatacctgaactttccacgtctgcgttctgtagactctgcttcttccaattggcggtagagatgttcaatacggctaagaaagttgagctattcttctctcggccaatcgcagcgatttctcagctgcttcttctgctaccattgcagctttggccaattcttctttcagttttagtttcccttctgatctggctaatgctgatctcagcttctcaacctctgactttagaaccgctatctgattgtaaacaataccttttgttagttatgtttgtttgtattggttttgataataagtgttctagtttggaatagtgaatgaaacttacgagctgatcccgtacttcgacttcgcgctgccctgcttcaacttctagctcacaagcttctctccatctacttacttctgattctgcttctcttattgctttcactagctcttcgacctttggttcagtataaaagcctctctcgagtaagagatttgtgacaaaattgagaaacatatagtggaagacagaagctattgatccaaaaatacattacgttttgagcaagaaacttctcttgattttgcagcttgttgatatacaccgtgttctctgctaatttctgagcttgttcctctgtaactttcctcaaccccacttcttctaacctgtcaaaacaataagaagattgcatttaccaaaatcgaagcgtagtgatctattgagtttgagaaaaaagcttaccttgattcctccaaagatattttcagctgagaaacctcttgccgcagtttcttcattgttttctctattgctataacctgttcttgccatagagtccattatagttaaacctttgtttgatcatactaaaacgcagaatcacaagaatgtgaataaagtaatgac

SEQ ID NO: 14154 - DNA, 660 bp, Arabidopsis thaliana
tttcttgcaaacaagcaaccaaatccggaaggttttctccaaacaccttgtagacgaacacaccatgaaatcggggttatatatagaaagcccgaaactatccatatccttaggtcccaaaccgcatgcatcgatcattacatgccacccattttcttgtgccacactcatccatagatacggatacctagatcctgtaaccctagaatgaagcggaaagacgtaaatacctttcttcttcgtcttgcttccgtttttcccagcagtaaccagttttctcagcttggacgaacagagtttgagtcttggccatgagaattcagctgcagctactttggctccacgtttctcagagactctgtttatttcactcaccgcctcactctcgtagtcgtaaaccgtcaagagcttccgttttgagttaaacgggtaagactcggcgacgagcctgaaagcagaagttctattagcggtgaagaccattgagtagtcttcctcggagattttgagaaaccccattattcttcttttcattgagtactcaaactctgtttcttgacctccatcgttgagaagcttttccttaaggttaccaatctttgggagaaacactgaagaagggactttcagacaaggaagaagagatctggtaagtggaag

SEQ ID NO: 14155 - DNA, 1090 bp, Arabidopsis thaliana
ctcattatttttgttctcgccaccgaaacaacagaagttgcagactttatccgaatttagggtttcagctcgttctctcttctccaattatcagatccacgaaactctacttttcggatcaggtaaaatcttatcttcttctgattgcgtttgtcatcttcttaagcagatttcacaaattgcgttttgctatttctttgatttcggtaatttcgaggtgaagtttgttttcattgcccgatccatataattttggagtttgttgatttgttttcgttcgtcagattggtatatcgtctttcgtatgtccctgaagattgtacgctagcttttgtttaggatctgtcgaatttgctgctgactttagaaaattggatcttcctttgatctgctgtggattgatgtaatttgtttagatcatatcctgtaattgagctggacctgcttaactaggttcctgggactaggatacagaacatacaatttatttatgaagatggcatcttgctcatttcgaatcttatgttgcaaatgataattctggagttggtttcttagctgaggttttagtttccccatctggtttatatatcactaatctctagatgaacatggcttgtatttggattgtgtgttttatcttgctatgtgtattatgcgttccctgtgttctttaactgttttctaagaccttattaatacttattttgcttttctcgattgtggtgtagcacttgtttattatttgtttatgagtgtgccaaattcttatcctccgatggccttcatgttcaggtctcagcttctctatcgtttgcccctcagatcaacaaagtttcatgtctgaacttgattcccaggtccctactgccttcggtaagtttcaattataccaacgctcatttagatctatttcagatgtttggtaacagttttgattggaacatgggcttttgtaaatttgtttctcaagtcttggattcttcagcttgtggtttgctgaactgataggagctaatcagtttctttttgttgcttgcagacccgtttgctgatgcgaatgctgaggactcaggtgcaggacaaagga

SEQ ID NO: 14156 - DNA, 963 bp, Arabidopsis thaliana columbia
tgtatcactcagagagtgcaaagcgtatatcactgatgatccaaggttctcttcacgactcttgaagtgttgatggtatgttcacagcataacacgcaacatgaagccacatttggtctcaaggtaggcaaaggcaatgaatgggagcttccgaatgtatagatgctttgagatatcagaagagaacccccagaggaacctgtataaaatctctctacacgaagataattacagagacttgtaacttcacttcaattttttgttttgggattcttttttgagtaaaaaggtaggaagaggttatattttagtttgtttactttcttctcatgtgctctgaaacaaaataagaaacatctccaacgtattgtagtgattaccaaccgataaaaagctaaagaatttttgagttagtcgattacaaagtataaacacaaatttgaattgatacaccaaagatttctttaacatttcgtgggaggccgagtattatttggctttagcttcgaaccaagactctctggagatagaagctctggctaaatacatgacggactgagaggactacgggggctatcttaatttccttttatatgaatttttctatgttaatttaactttttagatattgatttccattgtaattaaaacgctgtttgtcctaattttattttatatatatattgtataggttccattaaccctacgatcaaaacagtttcatacaaactcgcctcatcttgttctctaagatcaacgtgtctgatcaagcttgatctgcttctcttttttttttgtttttgtaattattcttgcttgattcgatcaacgtgtctgagctttgattcaagtgggggtttggaggtatgtgagcgtcaaatcttcaagttttaattctggaattaggtttccttagtgggttttttttttgtaccatccgagtgttgttgttgaatataaata

SEQ ID NO: 14157 - DNA, 704 bp, Arabidopsis thaliana
tgctgttatttgaagtgcaggactggaattggaaagatcagtgcatgtggtgggagtggttatggtggtgggggtggtggaagagtatctgtcgatatttttagtaggcatgatgacccgaagatttttgtgcatggttcgattctctttacttggttattttgtttacatttgctcatttgattcacggtttttgttttgagccagtataaccaatacgtgcttgcctaacattaacaatcatgtaaactgatcttatcttcctaaacacaggcggatacagtatcggatgtccagataactcgggtgctgctggaactctatatgatgctgttccccgaagccttttcgttagcaactacaatcagacaacagacacgtatacgcttctcttagaatttccattccagccactttggaccaatgtttatattcaggataaagcacgcgcaacttgtcctctgttatggagtcgtgtccaggtatttagaaaataaatatccagtacatgggctttgtaggcttactgatctttctccttgcagtgtttatgttagcactatttgtgatcgtatttacaaagattactatcttttattttgtatatctagtgtctgttgtgtcgctctatatatgttttcttaaaagggtatttagtggaactcttgtttttcagcatattatcttgcaaaattgatgaattg

SEQ ID NO: 14158 - DNA, 986 bp, Arabidopsis thaliana
caaagagctgcaatggaaaagaagagtaaaatgtgattcaattgtcatctgaaatcctgaggcaagcttcaaaaattgcttactttctgcaacaaagaatcatattggcccgagaacaagatggtgtgttggctctgggaccatggcggtggcggccacgatgaagtatagcttgacccggtgaatgacagtaatgaaaaacttcctgcttcagtgagaaatagttgtttccttcattaacattttgccatatacgaaatattggcatgtaataggacaaaaaatctcatcaaaaggtctcacatacctctggctttacgtctgttcgcttatgtctcaagcatcgtgtgcctatgaaagatatttcccctccctcaaattgtttcctcacacaaacattcaatgttatttccgaatcatctaaatgatagcctgcagatttaaaagataattaatgcactagtcactgagaataataaaaagaagcatccactgcccaaacaaagatagtcactagtggtctgcccggacgtttttcccagacatatataagaactttaatccatcatccatcatgtaactattctgtttcctctcttcctaaagatggagacattcatactttttcccaactaacagtaacatagacacacttcaaaaaaagaccattcaatcaccaggactttgatcaaaatatttatgtttgctactaaagaatttactttggttttctctaagcagcttaagtatcacagaatattcttgcaatccaggaaagattgtacggtcctatgagaatttttgcagaatcgttgcagcaaagtaaaagcagaaaatcaaagggactcacctaatggaggaccctatcttcaccattttcaatataatatccatggtgagagtcaaacattgctccacactcttcagggaagaatactgcaagacaacagagtgagtttagtgttatcaataggcttaccaataaa

SEQ ID NO: 14159 - DNA, 564 bp, Arabidopsis thaliana
ttctgcttttttgatggttctggttcaccactcactttccttctttgctttttagatactccagattcatcaaaagcagctcttccctcttcttcagcattcagaacattgacaagtctttgagtttccagatctactgatctcatgtcgtaagaatcatgtgactcttatcaataagaaaataacaaaaactatgtcaatcacctctaccttgccgcaaattcatttgtttgtgtttcagtatgtttttcagctcactatacacagtttttggaaagagtgaaacgggagacggcatggtgagtcacccattccagctcccaatctcgccaaacgaatcgataagaatagatagaatcagttgagtactttggttgcttctggatcacccgtcttcgagggcgggctgcgatatttgttcaacacccattgtcgttagctcttcacttctgtttttatctttttgagtatgctttcaaattttttgcttaacgatgcatttattgtaaaaccgtcttttttggtggataaattttaaattcataaaaaaaaaaatcaaaacat

SEQ ID NO: 14160 - DNA, 609 bp, Arabidopsis thaliana
gcaagtttgttaatgttgttagcaatcatcttgtgaagatcttcgccagcccatacaggacaaatgaaaatcgacacaaggatgcagatcgtgccaccgataagaatagtcgatagtctttgatatgccataatcaatatttcatctgtacggtaacccgaaatcgcaacgaaactaaatgtgagtatgaatatcagagcaccatagtcatatctctgtttaatccgtgggaaaaaccgcgaaaatgttgcagctgcgcctagtgagaacactaagatcccaagaactatgggctctccttgatgcccaaagaaacgagcaaggtgtactgccccaacccctaaggctcctgctattaatgttgcaaaccctctgtttaaacctttggaaagtgttccacctacacaaaaatggttattagatagtgttttttaatcagaatctttaattaatactacatcctgttttttcaaggtaataaattagtacggtttgatagacttaccaacagtgaattcgaagaccacgactacggtaagtatcgccacatacccgtgaccccaaagctgatgtagagtggcgcacatagtcaacaatgccctaatgtga

SEQ ID NO: 14161 - DNA, 1501 bp, Arabidopsis thaliana columbia
atactgacatatagaattagtaactttggttacttgtattcattgtttatgtttattaatactagtggaccaaaatagcgtttgcgttttaaagagcgtttgcgttttaaagtggttgacttgacagagaattcgtttattacggttgagacttgagagaagaagagagggaaggacaaaatggaggagtggattccactattcgacattttcttgaagagtccatctccggaggctgaggcttcgctgtggttagaccaggcgtcgaaccttttttcttcctcctactctgcggcggcgccgatcaaccggagctcgtttgtttcattgctgaagaaacaatgcgatcagaattcatctccggttacgaagaagtaatacccagatttcaatttggatttttgttttgtttttctatatgttctggaccgatttgggttgctgatgaaattgtttttgtttctccgttagggttcttttcattgagacattaccgaacatggttcagtcaaagattctatcttttcttcttttcgagtatcagaggttttgcgttagtgatttggtttggctggctagagaaatgttgggtagtggtggtaataaagttgtcgatttctgggttcagagagatgcacataacctgctcgacagaattcctaaaccaaaatttgaatggatatctaatctagatttggattcagctgatgaagacagcatgaagcaggtatttgactctgtacctgattggctcagtgagaaacttggttctgctggtacaattcttccatggcttcctgtatcctgtgatgatgtagattcagaaatgctggttgttgattcttggaatgggaaggagataactcaaatcaaagaggatatggaagaagatcagagagaagttgtgcataacattgatcataccatgactgttgggttacaagctcatgatcatgaaatggctgtgaatcttagagctcagatttcgaactttgagtctacttctgaagttttaaccttgtgtaacgacattcggagactttgcttggagaagggtaaggactctttgagagttttggctttgattgagccttggaatgcagatgatgagactgctgcagttttactttcgagtttgcataatggaagtgaggaagaagagcttggttggccaagccatgttctatgttcgatcgtgcttccaaagtttttgtctcttgagaagtctgcctctcgtgtgctgatgtcttcaacaatcgagttttgcaagatccaccaaagagcagctgagtatgcattggtgttccctttaatactcaggaaagaagggataaacaatttcatttgtgaggtgatttcaagggttttgaaagagtgcttgcacttgggtcaaatctctggtttttgccagaagttgctttgtggaagaacacaagagcggaggtttatgttccttcctgccatcgagatctcatatcggatgaactgacatggaatgaat

SEQ ID NO: 14162 - DNA, 1341 bp, Arabidopsis thaliana
tggttctgttttcccttcaccgcttcctttctcagcttttattttgtccagtattgcaattacctgaaacagtctccaattcagtttctgctcatagtgataaccgtacatggtattacaattgcttgactgactatatcagcatccaccaagttccggtttctaatatagcacagaagaggtgattttcagagaagacaatcaacaagatcaactagttcatgactcaacactcatgactatgaatgcaagatagagattttgaccgcatcattgagacattcatttactaactgaagactaaatttcattaaacgctagtttactttaagtgaaagatatattagaatcccttaccctgcttcctctttccatggcttcatcctcaataaacctgacctcaggcgtcaatctcaacttcattcgcttcccaagctcactcctaacgtacttagctttcgatttcaaccccgcaattgcaacgtctttccctctatcatctccaaacacggatacatatactttaaccacctacaaccccaaaagaaaccattttcagcttctaacattactctgaagtaataatactctcaaaccagcggctaggtccagcacacaaatcataaaacacataatacgaattgcttctgtcaaaaactgataaaagaatcaggattcaatccgtgcaagccacagtatagcataagtttaatcaaaagatcaagttaagcaattctggaatcaaatatttcgaaagaccctaaatttccactccagctgcataaatagagcaagacccacatgaatacattacacaagagtttccaattagggtttctcatcacctgcaaatcattagagacttcaacatcgctaatggtggtgagagaagagaggtagcggtcagctccaagtgcagcttcaggtaagacagcgtgttgtaaaaccgtgtctgttagaagcatgtcggagagttctctcattatctgcttagccaccatcttaactctcctcgggttcgccatacaccgtacggtcctgcgcacggagagattcgtacggaggttgaccggcgccattgattgcgggaagtggaaagcctgcgtctttgaactgacggtgtagattggcggatgatggaggaagaagaagtgagattgattggtgtggagcaagttaggcatcgtcacaatggttccttaatctcttatattcctctgttttggatttgaaaaggtctctgagcaagtaacgaaacaagaacaaattatccagtgttctaagggtatagtagtcgtttccaaaatctaggtgacgtggaagagttcaatcacgaaaacc

SEQ ID NO: 14163 - DNA, 592 bp, Arabidopsis thaliana
aaatttataagttaaatattatgaaaccaaacatttaatacatattttctatttacaaataataaattgtgtgtttagatgttatttttgaggcgaaacaacctgtcaacaatgaatttgttgtaaatccacttgagataaatcaatagcaagccggatgcaaggatctcattcgggttcgatgtggaccgctttttggaaacatcttagagaacaacaacaggttaaatcaaagagcaagacggatgggaattgacaacgagaataacaaacagtacatatcggtcgagacatacgattattacgaaacacatttttggtatattcatcatcacaattcgtttccatccatgtgaagtctccgagagcacatttgatatgaaaagtgaaagcacattgataacatgtataaaaccattttttcggatttagttcttcctcgcatacctcgcaccagtaccgctcactcgtgttttctccgtagcatagagagagaaaatgatctttatcatttttgtgtgcacatatctttggtaaacagaacatttgatgtctaaaacaaattcacactcctcacaactcaagaccatag

SEQ ID NO: 14164 - DNA, 545 bp, Arabidopsis thaliana
ccagatttgaactgttaccttgctaagcataacgacgagaaatccttcctccgtaactttgttctccaccaggctagtttcatctttcaaaacttttccattgtgaatcaacaattgctgcccacatggataattgtcttttccttgtgaatcttctatattcttcttcaccgccattatcttaaaaacaagcacatcatgcccagatttaatgatttgaagactaacataatcaacttgaccaaaccagattggattcgcgagtcataattttagcagttaataaagctattaaacacttatagaataaaaaaatttgatcaccaaacattcaaaattgtggatctgagtctcttctatgtgagattcctacttctctctactatactaggcgaaaattacgtaaacgcatggacgaagaaagtagaactaaccgtatcggaggggtaaacctaatttcaaatgactgccttgagagtttaacggtgagcttcatatcgtcggcaaaatgaaatcgacggcgagatacgacgcggagagagtgt

SEQ ID NO: 14165 - DNA, 407 bp, Arabidopsis thaliana
tataaaaataccagttgaagtagttccaagttttggtggtttgattaggatccgactcgtcgaactgatcagcaccaaaagcaacaacacatggtcggatcccacccgacccgagagctccaagaagaagagctacgtaaagtatactcaattgtgctgtgtcagctactacacaaacctcttctcctttacatggtggtggccttagcgttggtattattgccgatatcgtaagcaacgtcatcccctgttttttttacttccatttaaaatttctagtaatagagaatgatcaagaaaatgacaactagactaagtttggtccaaagaaactgagccttggttaaatcatccaatggttttaaatttatgtggatataaacttacgatttggtagatgatggaag

SEQ ID NO: 14166 - DNA, 561 bp, Arabidopsis thaliana
ccgaacttgtctcaaactcgcttggtttaacatttttctcattgagatataccacttcatgcaccattagttcttcagcttcttgagtgtcattgtcttcttcttcttttgctttttgtagcttaagtagacgatcaggacaagaagaagcatagtgtcctagcttatcacatctgtaacagaccacctttgacgtatcacgctcttgtttgtaaccctgatatccaaacctgccacgacctctccctctttgatagaagcgatctccttgtcctctgcctctaccttgctgagattgtgaatcatggtttgcatacataagtttccatcgtttgtttgatcctcctcttcatcacatatcctttcttcatagactttcatcctccccactttgtcttcaaagcttgtcttgttaaggtcgagaacctgttcaagtgaggcgatgatttgtatgaagcgtttccttggtagactgtttaggaatttcttgactaattttgatgcttcaatcttttctcctaatgctgcagttttgtggttactctgaaagtctcctgcaaa

SEQ ID NO: 14167 - DNA, 468 bp, Arabidopsis thaliana
gattgatactagttcaagtccctgtggctactgaacatgacgtaactaattatgttcttatcacctaaatagtttaggcctaaaccaaaactagcttaagagtgtggtgcactaaggcactaagccaggcccaaagctaatccatgtgggactctaaaataacatatgactttcatattaagatattatatgaaaatgttaaaggagaaagaggtgtgtgtgcacacatacgtttggtgggagaggctcctgtgatgtattctggtatccctgagatggaggtataaccacccgacgaatcccgcctactttcatagacctcacagctgtttcaatcccggaattacctgcacatcaaaatgtttcagtcatcacaaaacatcatcatagagacatagaagaagtattatcaacttcaaaaacccataccacttagtttgttacatcactattcaatgaagaaatgta

SEQ ID NO: 14168 - DNA, 648 bp, Arabidopsis thaliana
ctccacgtatgtaccaagaaagtggcgggggagtaagaagagctgaaggctgaaacatttgatccattgtcacctttgatccgatccttcctcgtccgttgctacagctatggtaatctttttgagattttggctttgagcggtcacacaaatgttcgtctataaacaatggctccactttccaacaaccctcaaacactttcatgaacattgttgtctcttgcttatattttgactggcctcaagataaaaaaacaatttgagtttgtgaagatagagtaaaaggattgattcttgcggtagaaaatatatcttacagtgagatttttccggttttcttcgacaatgagatgtataggacaagttccatcccaccaaaggaacttccaggccgcggcttgcttcacttccacggtctgctttggcccttcgtcgatcaaaacttttcttgatatgttttcctatttaggattaagacctatatctcaaatatttgctgtaatactcaattcaaatcaaacaaaacaagaccatgcacaagcaccttgatgtttttgaagtatcttttgttgtctggatgagtgaaaatgttgtatactaattcaggaggcaatcctacgtctgcttcaatgtttaaatggcaaaaca

SEQ ID NO: 14169 - DNA, 1021 bp, Arabidopsis thaliana
catcaatcattttttatggtaacccaagacttgaaaccaacttcagtacttgagcaaatatattatttgatggcaaatattttataattagttattaccataaatccatacaatgttcatttaagttattatcatctcctgttatatccatgccaacttctttggtcgggacagggcagaaccgtgtcattgatgcttcgttcattgtcatctgtgaaagggcaaaactcaaagtatatattgtcttattaaggcttatcatttaattaatgttttcttttctttctgttataggaaataaatagattatagaatatattgttttaaggagagttagtgctgacacctatgcaaaagctacaacagctcttcttggagtaccactaagtcacaactcttcttttcttgaaggcccaaccttggctcctcctcatgtaagggaagctatttggtgtggtagcacaaactccacctttgaagaaggtataacaaacttgtatttagaatgttggacaatttcatgttttgtatagcaacaatcataatattctaaacttcaaaaattatcgcatgattcaaattctcaaaccacattctgcaactcacatccgactatgaataatatgaatcaaagacagaaaataatacaaatcttaattaaactagaactgcaataatacaactaatatgcccaagtttttgtggtctagtgatagaaaaatctttagtgaaaggtgaaactgccagatccaaattcgatttttcctgaaaacaaatatgggacgtctgttacttggatgttcgcccaaatgtttatctagtagtcagaaatgtaggtggcctaactaccccctgacattaatttgaaagcatttcaaactcggatcatgcaatgtggtggcccgaattctcacactggatcgtggagaaatctcactcgtgtaaacacatctggggcattcttcctatcgaagccgaccggatcagcaaataagatatatgagaaagaaaaaaaacagca

SEQ ID NO: 14170 - DNA, 1058 bp, Arabidopsis thaliana
ggatcccttgttcgcagttaggattcaagcagttcgtccttcttttggtagtttcctcgagacaagagttcaggaaaccaactctctatcggttttacaatctattttacctggatggtcatacctcacaaactatgatcaccaccggctaggtcgtacctgggtagattcttctgatgttgtggtaatgactctcctcacaaagagttctcagcacatcacttgttctgtccaaattgtgggtacgagggagcaatttatttgttctttcgtctacgcatctaattttccttcagaaagacgtattttatggggggacttgtgtcaacttcgttctgctcttattcccccaacaacttcatggattgtctctggagatttaaatgaagtgttatctttctctgaccactcacgtgtgatggatttttctctcaatgattcggggatgagagacttccagaatgtagtgtcttactgtgatttggctgaccttcattcttcggggccaacttttacctggacaaataatcaagaggagaaccctattgggaaaaaacttgatagagctctgataaatccaatatggttatccactttcctttactcttatgcggcctttgaagcaggaggcatctccgatcattcccggtgtgtagttcatctctcttctccgcttttttaacttcctggcaagtcaccaacagtttctttccacagtggcgcaagtgtggtatgccactccttcgcttttccattttcgagtggccatgtctctgatccataaaaaattaaagagcttaaaagttcaccttagagagttgaaccggactcagtatggggacctgcctcaaaagacaaaagacgcttacgggaccttctgcactttacaaactgaaactttacatgatccttccccgagcaatgtggcagcagttaaagaggcctcagaccgctggcacactctagcaagcctcaaaccttgaagaaagtttctcaaacaaaaatcttgtgtgaactagctgagatgcgggttcaaaacacttcgtattttcaccggg

SEQ ID NO: 14171 - DNA, 941 bp, Arabidopsis thaliana
ataggcgatgaacatcagctgccaattgatgttcatcctcatccgaatcctgtgacgcctcttcatgtgttcgggaaatcaaaccagcttcaacacactcataatagagacgaagcctaagtctatctccaaattttggtagcgtacttctacagataggacaaacatcacacctctgacaacactctgtgcacaaggaggcatgaccacatggattcaacacatagttcacaaatcttccacagctagctaagtctcttgttgcacgacatcgctcaacttttgcctcattacataattctctgaggtttatagatgccaaatgtttcaacgcctcctgtaagttacaaacaataaattcgaaattaactctaagctctgcaaaacccatttttttaagctgaacctagaaatcctaagacctgagctaaactaattcagtggagaaataaaaaggtataaagcggaagaacctgaacaggcttgctactgtaattaggctgcgtaggaagagatatcgatctcgcggcggaggcaaaaccgttgatttctctcgtatccatctactccggtgacgaatacaaaaatggaggtaaagagagaaaaagcgtggttggtgttggcgagagtgataaaaccagtctagggctccgttgagctttctcgggagggaagacgaagagaggaaacactgttgagtgaatttctcctcaaacgggtcaagtcggattgtttaattcgggtcaaattttaaatatgggcctttctttttgaagtcttgtgtgaatcttgtgattgtctgggcccaagtcggcaaatcacgattcgggtcaaaatttaaatatgggcctttgtttttgaagtcttgtgtgaatcttgtgattgtctgggcccaagtcggcaaatccgtgtccgaaagtgaacagcgcgtgttttacgac

SEQ ID NO: 14172 - DNA, 747 bp, Arabidopsis thaliana
ataaattttgattatagttaaaagtccagacccaatttggcacctggcttagttacgattctaaggcatgacacctgcctaatatgtttattacagaaaataaagagaatcagctaggtgtcccttattgaacacattaacaaactccaacgacactacgtgtcttcgtgactcttactatatccaaaaacctatagctaaagctgaattttccatgattagtatagtcccaaccaaaaaaatactgaagaaggcataagcatggccggagaagaagactggagaaaaacagcagatacgacgaagatgagctcggagggagtaaaagctgccggcgttgagtcatcaaagaggccgccaggaagtaatccaggtggtgttcttcatcaacgccgtaacttgccatacagttacacgacgatggctctagccggattagctatctcgggggccatcatgtacactgttatgtatgctaagaagaagccggaagccactgccactgatgtagctaaggctgccacagggacggctaaacctgaagatacacatccaagaaagtaaaatttcaagggaagaattaaagggtttatcttcttcttctttttttgcttttgtaattttgttcttgcttcatgctcttgttggaacttcttatttacttgtaataaaataacataacgtgtccaagaatggcttatgtcaactactagagcaagcagaagaataaaatgggaggaatagagt

SEQ ID NO: 14173 - DNA, 659 bp, Arabidopsis thaliana
ttcaatcgccatagttccagtcttgcagagtttaagaaaccagacaataagattgtacatgcataaaatacaagtctatggaattcatctcttttatacaaaaatctgctagggcaatacaggagaccagttactactgccacttccaaaatgttgttcagggaactggaaatatgtttatacaggattcccatgctgaaaaggtaagtgagatttctacaaaagctaaaaaaatcagtagaatcttcctggtgctttgcagttacaaaacttcgtttaatgtttttcaggaaagaccagtgttgccaaaagaaccacttagcttgacttgagaagcttcgttcagacttattttaattgtgtgggtctgtgttaatctataaatgtcaatgcattcctcgagatccgcttcacatgtcagaagaacccattccttgtcatcatccaggtacttaagatcaaagggtgcaatattatctatgttaaaacgcctagcaatctcatgctgcaactctctgaagcccaagtaggaagcaaagtaaaccgtactttggcttcccaaatgtggcttcacttttgaggccccccagctttaacttctgctactattctcggtaacgaggtggatttcgaaaagaggatcccactgaatgttttgt

SEQ ID NO: 14174 - DNA, 603 bp, Arabidopsis thaliana
catgatctctagtttagttacctgtaaaccaagcgggataaacctcgggtaatgacgtggaatggacgtaggtgaatcaatggcgatggggttgctagttgttgtaccggtctcttgaaccggagttatacccattgaccggttttgtgtcgcatccggcctaaaacatacacattcaagattaggattttgggtgtatcaagaaaatgagcgaatcaaagaaacacaaaaacattaaaaacaaaaccttatgattgttgatgttgtggttggtccaacactaggtttcgtggtgtcagtgagaaaaggccatggctccttcttagcagtgaatatctatggaaagataccaaagaaacaaatcaaaaacattagaaaacgtaacgtttttcagaaaacaaattatggcaataatatctcaataaaaaatcttgcctttttattttcttcttcaagaaactgagacacagaatcgacgcaagatctttggtttgaagggggctctatgaattgataaaatcttcctgctcctggagatggattcggtagattcatctgcataaatcatgaccataaacacgaaaaaatgttttgacttatacg

SEQ ID NO: 14175 - DNA, 865 bp, Arabidopsis thaliana
acaactgcaaaatcacaacacaaagatggaacaagagtggaaatctcaaagacagtaggagaacccacaaattaggcgttttatacatccccatttaaaaagaatggtaacgccgactctgtgaagcatttttcagcactcctttcctttcccccacaaactaaacaaaaaaccattaacaaaaaaaccattcacaaaaaaaatagagagaatcatctgagagagtagtagtgatgatatgatcgcttcttctcctacaatctcagaaacctccgatcacggttttagatatcttctacaacggatacaatggagagcaccgattcttccggtggtccaccaccgccacaacctaaccttcctccaggcttccggtttcaccctaccgacgaagagcttgttgttcactacctcaaacgcaaagcagcctctgctcctttacctgtcgccatcatcgccgaagtcgatctctataaatttgatccatgggaacttcccggtacgtacgacctcatcatcatcatcatcaacaactacttttttatatatagtattatttgatttatatgaatttgtgaccttttttttggttatgatgatctaaatctttttcttcttttttctataatttttttttggtttgtggattcgtttgttgcagctaaagcatcgtttggagaacaagaatggtacttctttagtccacgagatcggaagtatccaaacggagcaagaccaaacagagcggcgacttcaggttattggaaagcgaccggtacagataaaccggtacttgcttccgacggtaaccaaaaggtgggcgtgaagaaggcactagtcttctacagtggtaaaccaccaaaag

SEQ ID NO: 14176 - DNA, 537 bp, Arabidopsis thaliana
ctggttgtagtaattcgagtggtgaatcggagaggtttttatcggaaaagtcgccggagatgttggcggaggaagtggaggggtttgcgagagaggagaatctgaggatgaagaagaagaaggaggaagagtatgggtttgagatggaggggcaaaatgggaaatttggtatcgggatttgtatttcgcggttgaatgatttgcttgtggcggtggaggcacggcggagaggtggtgatggtgattgttataaggagatgtggaatggtaaactcagggttcaacttattcgcgtttgcgatcagacgtcgtcaacaaacgcggctatttaaaagaacgctatgaagttttctaccgtgctttcaattttaaaacgccaatcgcgtttcgttggttggatttggtttctactacttttgtttcggaattaaaaacagagagaaaataataccaattaatgtatgtatttaaatactgtaccaaattgtaggctactattttgtgctttttgatcaatgtgttactatgtacaacaac

SEQ ID NO: 14177 - DNA, 1037 bp, Arabidopsis thaliana
gttgttgatgtggtggtaatttatggattttttatttaggaaactcaatatgaatcagttagaaaatccaaaatcataataaaaatatcgattttgagttctatattccaaaatgaaagaaccgttactacaaatcagtttgaatttgatctggtctgggaatggtagaaagatagagaaataatttgtaggtggaagaaatttggtggaacgtaagaataaaaccgtaaaaaaaagtggaagaaatacctaaagttataagatacaaaaaagtgtcgcttcatacaaagggataagcatttaagtgctattttcataattggtccatgatatatgatagtgcataatatatgacaatacgggatccagtagtgatgaatggatgtgatgctaggacattatctttgtccgtgattatgctagaacattatcttttgtctctagatcttcctatagataaagatgaatcaagtgactgagacatttttatgatgatggctgtcaaaatgatatatttttttgtataatctaaaaaattggagatacaagtaatgaattagagatatacttgatgaaaaaatgattataacgatgaataggttggaatgacttataacatttttcatagtggaagagtgatagtctaaaattctcatctttttttaagagatggcttgagatgtttttctagtgtataaatgttctagtttctgaagaaatcttgttttcttctatatgtgtttttggagacttttactaatatatctttatttaaacttatttattagtggagaattatgcccaatacttcttgtgagaaaaaaacaagaataactaaccaagcattaccttattattaaaatcttacaaaacaagagtttagctatgtaaaccattgttgaaaaaagacacgaccgaatccatttcagtctttttcaaacacattccaatctcaacgccacctgactcatcacgtctctcagccattgcgatcgcttctccttggtcaatggagacaatatcaactttaacgggtc

SEQ ID NO: 14178 - DNA, 978 bp, Arabidopsis thaliana
ggtcttctttcaatgtatccttcttctttttagagatttcttcgtctttctcttcaataaagtcagtcactttctttttctttttattgcgcatggtactaatgtccagatcatcttgcacttcaactcttcttttcttatttgccacaacaactgcttgcccaccttcccaagcatttaaaggcagacggtcattgataatatcaattatcaagttgtctagcaatggatccttttttgcattttgttccacatctctccatgtaggatacatattgtcttgtgacacaggtatcatgtgtctaacacgcacctgcatgaccagaccaaaaacaaattgttaatgttgataaactattattaagaacatgtactaacatgaaaaatataaaaaaaaaaactccccactaagatttaaaaatagacacaaattacatggccgtgctccgccttttcctttttgatgaagtcttttaacttgatactttttcgagatgaattccaatcaagtagtggtatacatgtcaatatatcccttttcatcccataaatctctcctaatcctgggacactctcataaatccaaatcactaatgcgtgaacgcatctttgaataacatatgagtctttgtcgtagtcaacaatcttcaccgagtttattagactttcgaaagcaacacgaccccatggatatctctcaaaacccaccggatcaagaactcttctagcactagacaaagggattttagatccgtgatgtataccatgaattgcaacagatagcaaacaaagcctaccaactatcagtctctctttcaacccccatgccttgctaagatcaataactgactgcaactcggtaaaattaggaccatctgaggttcctacattcattgcttccctaaactcacggtgatcaacttcgcaactgtccaacaaatcaattggatcacagtttacgcctgttatagcagcgaa

SEQ ID NO: 14179 - DNA, 1251 bp, Arabidopsis thaliana columbia
tcctcatcctgcaaggcatacaagtaagattgtgttgagtaagtaaatcacaccacaagatcatgatgtaacgaagtaacgaagtaacgaagtaaaacatttatgttatcaaaaacttagcactgtaacatgcctcagaactggagtctccgctagctggtttcatttgagtatctttgtcaagaacagctctcttttgagcattgctccttgtttgaggccccttatccgcctgagccggtttcataacgcctttaccttttcctttcgatgagctggtacctttctcatgcacaggatctttctttgaagtatcaccgatgttaattgccgatcgagatctagaagaatgacgacgagtggttgaagctggagttgacgaagatggtgatgaaacaccagcaccgctaggtaacgtgcctggctctgtattgccaataggcgctgccggcttcagagcagattcactccgttgaactcggggccacagaaattcctccactgctgctaagcttgccaatggatctataagtacaatattggaggagtaatcacgtagtgttttctctccagatgctcggcataatcgcaactttaaaggatgtgccaaagcactcaaacccgaggagagccgagcacttccacttagtgaccttgagggatggctaaggacaacaggaaagcgctccagtgacgataaagcattttgaagtttctgaatcaaaactgtcataggagggacctttccctcattaccatcaaaaggaagagcgacttctagaaaagctttaaaccttctgagtccctcctggcgaagtttgggcaaattaagttcggagatcttctctttggaaaagtatccacaagaaaaatagttaagcaatgctgcaaccacaccactgccaataaactcaaaagttgagacaccatcccctttacttatctcgccaagtatctcagaaatgacaccaatcaagtactcttccttgctagcagagaaatcgccaaggaatggcccagaggctttagattttccctttcctttcactttatgatcatctataccagcagttagcttcgtgcaaagattcttcagatgtaaaagatcatctgtaactccaacatcaacatccccaccatcagacgggaagtacttgtctttgaatgctttggcgcaggaactaactgtttcccttagcatgaagctagctgtaggagtacaagggaattatggtttgccctatggtaagg

SEQ ID NO: 14180 - DNA, 586 bp, Arabidopsis thaliana columbia
ggccaaaggttcgtagagaagctaaacccaagagggagcctaaaccacgagctccgaggaagtctgttgtcaccgatggtcaagaaagcaaaacaccaaagaggaaatatgtgcggaagaaggttgaagtcagtaaggatcaagacgctactccggttgaatcatcagcagctgttgaaacttcaactcgtcctaagaggctctgtagacgagtcttggattttgaagccgaaaatggagaaaaccagaccaacggtgacattagagaagcaggtgagatggaatcagctcttcaagagaagcagttagattctgggaatcaagagttaaaagattgccttctttcggctcctagcacgcccaagagaaagcgcacgcaaggtaaaagaaagggagttcaaccaaagaaaaatggcagtaatctagaagaagtcgatattttgatggcgcaacgtgcaaagagaagacaaggaccaacttgttgcgacatgaatctatcagggattcagtatgatgagcaatgtgactaccagaaaatgcattggttgtattcccaaacttgcaacagggagggatgagatatgat

SEQ ID NO: 14181 - DNA, 1019 bp, Arabidopsis thaliana
tcgttttgacaggtgaggcagaggaaagaggcagaggagttggtgaagagaagaagagaggagctagagaaagtgaagaaggagaaggaagaagcttgctctgtaggacaaaacttcatgaggttgtatgaagaagaagcaagacgtagaaaaggaacagaggaagaactcagcaaggtggcggctgagaaagacgcagcgagctcagtctgttcggagattctattactccttcagagttacactcgtcgccatggaactccttctggattctccgatgaggattccgttacacgccagcctccctcatatttcatatgtcctatctcacaggtatgtggaccaggacccccgtgggttcattgttcaaatgagagcattgtaacagaacaaacttatattcgatgtttagaagttaatgcttgtttatttattaattcaggaagtaatgcgagacctcgtgttgcagccgatggtttcacctatgaagctgaatctttaagagaatggctcgataatggtcacgagacctcaccaatgacaaacctgaagctcgcccacaacaaccttgtcccgaatcacgcccttcgttccgcgattcaggagtggctacaacgaaactcttgagaatctttgcttttgttgtgtttacttaaaagctgttattatttgctgtgagtggtattcataaaaactgtttggttctctctagtacccatttacaaaaatgcttgctgttttgctctctctcttgagatacgtcaacatatcttggcgtttgtaaacttgaattcacagacgtccctttctatgggccagtattactaaagatggcccaacaaatgacccacgaatatggtagagagtttaagcgcacgtgatattaagattaacaacgtgacgcgtgtacaaaaggacgaattggctttttcacgtgcgagaatattattggccatacatttgatcttagcatgaggtcgacacattagatttcagattataaaaataattactaatgg

SEQ ID NO: 14182 - DNA, 799 bp, Arabidopsis thaliana
tgacccacaaacgacattgaaccgcctccgatacccaataaaccggcagctccaataaacattcctctattccggtgaccacatcccatcgcaacgtttctaaccaccgtcttagcaaacgtcagcgtttcgagagctaacgttcccttcgtgtaagacccgtctccgtacatgacctcgtaacggcacccaccggagtgacaaccggagttttcaatccggtcacagacggaagagccacaagagactccagtgtaagacccggatttagccgggtcaaaaaccgggtcggattgtttgtaacagagcttacaaggctgacattgaacccaaaccatatcgctaccggaatcaatgaccatgtactgatctctcggaggacttccgacgccgattctgacgaaatactcaccacttccttgatccataccggaaacaatatcggacccaaaatcgttaacctcgtatctagaatcggaagaaggtataactttcccagaaatgcggcggagaatggcggagactctgtctgtgtctctgcgcatacgagcatggagacggtggtggtggttacggtaagtgactgaagggaatctgtcgcggtggagaagacggagagtgtacttagaactggattcatcggagaaatgggtgttgttgaaatcgggaagagttgcagtgacggtgagaggaggttgtaaaacgtcgatgatttgaaaatcagggaaggagattgaagaagaagaagagagatggagatggagatggagaaagaagaagaagagagggaggagcattg

SEQ ID NO: 14183 - DNA, 865 bp, Arabidopsis thaliana
cttcaaaaaagcgaatggcgagagttaagtcgaaaaagaattgcttcggatttagaaaaggacatgtaagtgttggttggcatggacgtgacattgtggttggcagctataaccgacgagttggagccttggggcttacgggcagtggaccaagcggatttgctaagtcgggtgtgggcggctcagcaaaaacatgaggatttgttccgctggctcgagaaccataagacggagttcgagacttcaaacaacgggactattctggttaataggtgggtgtgtgttccgagtgataaggagttctggaagatatcctgaaggaagcacatatgtctaagttttcgattcacccgggatcaagcaagatgtataaggacttgaaacggtattaccattagaagggtatgaaagccaatgtggctaggtgggcggccggatgtttgacctgtcagttggtgaaggccaaatatcaacttctggtcgagttgctccaaagcttacctatgcctgagagtaaatgggacatgattacgatggatttcctaatggatttgccgatgtgtgacgagacgagaaggatactgtgtgggtaatcgtggatggattgaccaagtaggcacattttgttcaagtaaacaagtcggccaatattgacaagcttgtggagatttatgtccaagagattgtccggtatcattgagttccggttagtatagtgtcggaacgagattcaaagtttacttcacgattttggaaggggcttcagaagcattttggcacaagactgaatatgagcacggctcatcatccgcagacggatgggcagtcttagcgtacaatccaaacacttgagaacttgttgcag

SEQ ID NO: 14184 - DNA, 1089 bp, Arabidopsis thaliana
gagacacgtggcggttccacggaaggagatgacgacgtctctacgcccaagccgcgagatctcttctttgtcctggcaaactgccacgtaaccaatccagctagattgtgtagccatccagcttggcgctttctcaatccaacgtggcaagttaatacctgacgtggcacgaaggttcttcgttagtcgataaccggagttgggtaaaccggatcgctctaacaacgtgctcctcggaaaccggcatgtcccgtaggttggagaggaaggatcgaaatcaaatgcttgataagccgattcgacaaattgaccgtaccggagaatctctcgccggagattgtcgtccaatgggtctaaaagaccgtcccaattttgaagcccctgatactccatccatctccggccaagcttaaccgggatactcgaaccagtgggtgagaattcgcctggaatttgatcatggtttagcagcaaactctcccaggtttcaggtttgggtaaaaccggtggtcgggaagtggaaactgaaggagaaggaagtgtaagtacacatcgacattgacgattcgacgtcgtaccacttatataagaaacgacgtcctgttttggtagtgaaggtactactacactatgcggacgtacgggagaaagagagaatctcattgttgagaaagtgtgtgtgtgttttaatttataaatatttgatctgattaatcaaagttttcttaaaaaggttgtatatagagaatggagtatgttgaagtcttgaagatagatttggtgtaagaagataaagtgattgaaggaaagaggaaatgggttccttttatagtgagaaaagttgggatctatagtggagttaaagagattgttgaaaatgaaaggactcgactctgaaaattgtggacagtgcttatataagtatatgaatttatatctaatacccaaatacacacattggtactcgtttgtgtatgtaggattcaagtagttttcgtgtatgtaaagcaataaatgtacacattagaaagctacaatagctgggtttggatatttattctatgaagaatgagtacaactttgacaaag

SEQ ID NO: 14185 - DNA, 557 bp, Arabidopsis thaliana
caactacaaaatcttatcttccaagtaaacaagatcatggctctaatcaaagccctgaaattaagtagtagtgagctaatgcaattacttcctggcaaaaccagatttgagtcaaatgatcttctcattctctctcaatgagaagcaaactagttatcttgtcattctctctgaataaacgttttgtttatctgaagttgatgtaaatgactttggaagcttggttttaaaagaaacaaaaatgaaaataaataacatcagagctctccaccactccctacgtttcgatgtaaacaataatatgttatacttaataatacagagaaacctaacactgagaaattagtcaacatgataatattttaattcagaagcataaatgaaaccgaaaaagcaagaatttaattggcatggagaaaccatcgagcatccataagagacatgtcgtcaagagcaggaaagcgtttgagggtctttgttacaagattgaacacacagatgtcaaggtcacgaggtctgcattggcagggacggtagtgacgggtgaaatagatgga

SEQ ID NO: 14186 - DNA, 1320 bp, Arabidopsis thaliana
ctatggtactacttatcatttaggaaattgatagtatatctaaaaacgatgacatagctctatgagatataaagattgttatcaactatctatgattcacgctgttatctcatctgacaatcatcacatcacttataacacattgtgctcaaaaccgttactcttttcattaatttgcgttttcttatacaataccaaaatctgaaatattcttcttccagaaatgactccttatattgaaactagcaaataggtagatcgtgaggaggagcttcaagagtctccaattctccgacaccattgtcgaccaagaacgccatagcaagaccccactttatatgaacatctaagtgacaatgcatcaaccaaacccctgtttcaaaaccataacagcattatttcccctaatatcaaatcaaaatgtaactattactaaagatataatcaacttttgttcattacctggattatctgccacgaatctgataacagcccatccattaacaggaacagccacagtgtttctaagcggaggatcaacaagattaaacttagaagtatctttcttgggattaaagttaccgaacccttcaccaacaatgtagaaatcgtaaccgtgaagatgaatcgggtgattctccgatgtaacaatgtttgtatcctgtaaaaaaacttgaactcgagatccatactttagtttatacagtttagtacccttaaccggctgaaacaaagccctgcttatgttatttccggtataatcgaatttaaccggcggtttaaacggaaaatccgttgtgaaaacgccgggaattccgttggaatgtgcttgtaagagcgagaaattcgacggtagaacaaacgaaacgttgttcatcgatgcggtaaaccgggttccgttcaagccttggcaccggcttttagggaattttttgggacaattatcaagacctaaaccaatggtgaagaacaaattatcatcgattgttttcggtacgacgacgttacggagagatttgaacttccttgagaaagacgtcacggtgttcgtgtcgttgaaggcaggcaaaaccggcatgattggtttagaagtggtcgtcgtcttcttgtattggagaatggctgtagttgtggtgttatcaaacggtgcgttttgagcgctttggtaagctcttgctgctatgtaatagcgttttgggggttggtctgcggttagaagtacgtcagtagtttggcctggacctaacataaggacctttgtggtgaatggtttgaggtaagatgcgtcggctccaactacagtgagcttgtggttagcca

SEQ ID NO: 14187 - DNA, 489 bp, Arabidopsis thaliana
tacaagattgaacgaatcagatgtcaacggatagggtcgtctgcattggcagggacggtagtgacgggtgaaatagatggagtctggttcgataccaagggtttcgttagcaggtatagtgaaacccaagtcaagaagcagggcctcaccaccaagagaatcaacctcaagaacagtgtggcaggcgtaatctgggagttctacattaggatcatacttgtagacgcggaacagtccctctgccatggattactctcaaccaacaaaacctctccagaggttgtaacagcaatgctagaatcccacgagtgataacgagaaagcattgagaatggtttattaccctcggtgatgtccttgaagaaaccttgcggtccagacagatctaggactttaacaaaacgacgacttgtcgagatataaagagagtaacgccccagtaccatataagataagccatccaaaaagtgggcgtctcggaaaaacaga

SEQ ID NO: 14188 - DNA, 739 bp, Arabidopsis thaliana columbia
  unsure (1)..(739): unsure at all n locations
atctctggttcagggaggctgtgatgaagagatgagcgtgtttctttacagaggacaagtcgaaaaggaaacaattagacagttgcaaggcaaagagacaggactccgtgaacacggtgagttcatcaaagtccgactcatcccatatagagagctctggcgcaaaacagctgacgctaaggttcttatgagcattggtctctatgaaatggctcagcgagagggtcttgtgtccagccagagactgaaacccaactcttgatctcctacaattctctgaaatatacaataactggattcagtcaaccagatgagatagattgagattagacgttcttatgttgtaaaaggagtttttagataaatgttatcgctttataacttggtaccatgacaacttgggaacttatctttagaacaaaagattttgcaaacccaatttagggtttaggtttccaaaagtttacatgttgccatatttgaagttgaaactgtacaagtttgggcaatcaaaagaagaaacttttagttacagtcttctggtttctataaaccaccagggcaaaatgaacatcttacaatatcacaacaacttctccatcaccgtacaatccgaaatggcactacatatcttgtgcatttcaatgtgattttcgggctagagttgtgagtcttgtagttgaatcctaggatgaatgcngcctctctttcttgatgatggctgaccttttgaagacca

SEQ ID NO: 14189 - DNA, 626 bp, Arabidopsis thaliana
tggcaagattttgtgggtattatctgtctgcttgttatcaactccacaatcagtttcattgaagaaaacaacgccggaaatgctgcagctgctctcatggctggtcttgctcctaaaaccaaggtaatatgttggtggatgctgtgacattactgtacaagatatttcgagacttctagagagcttaacctgtttctctgttttcaggttcttagggatggaaaatggagtgaacaagaggctgctatccttgtcccaggtgatattgttagcattaaacttggagacattatcccagccgatgcccgtcttcttgaaggagatcctttaaaggttgatcagtctgctctaactggagagtcccttcctgtgaccaagcaccctggtcaagaagttttctctggttcaacttgtaaacaaggagaaatcgaagcggttgttatagccactggagttcacaccttctttggtaaagctgctcaccttgtggacagcactaaccaagttgggcacttccagaaagttcttacatccattggaaacttctgtatctgttctattgctattggtatagcgattgaaatagtcgtcatgtaccctatccaacaccgaaagtacagagatgg

SEQ ID NO: 14190 - DNA, 623 bp, Arabidopsis thaliana
tttttccagtaaatgagctcacctttggagacatgaccgacttatttgtttctgaatgggccaccagagctggtagacagcgaacctaggaagattttaattctgaacttgttaaagatctcaacttttgtttcacgaactgatcaatgttttatctttcttcgcagctcgagttgagaaaacccctatttcgaagaccttcgccgcccacttctccagtttctgtcgacaagacttaggttgggaagttcttacaaacgacaggattcaagcatcagggcgaagactttgctctaggattgatcttgcttcttcttcacccccgttcaaaccccgaatattctccgaagcagaaatggcctcctcctcttaccgtgctgagaagaagatggagagagaaagggcaaggtggtaatgcctggaactcttgaggacagcaagcttcgtgctcttgacaaagccaagcatcctcagaacgaggatgacaccggagctcgtcaaaaagctcccgcttcatccggaaaaggtccagagatctccacttcggaggcaagaactccgagcaagaatgctgccaatgctcccagcaaggaccccgcgagatgggatgttgataaaaagag

SEQ ID NO: 14191 - DNA, 1541 bp, Arabidopsis thaliana
tcgttaaaatcaccgtcggcacaaccgcttatttcccagatctcggcgaaaatcgtttcggtgttcttgaagcactgaagaagatcttcatcgtgttcttgaattttactgaaccgaatagcctccagatcgtctttcacagaatccccgaagtctttggtctttgtcatgcctccgaagaaaataagccgcgaggtgtactcgatcgagggtcagttcgggaaatataaaacctcactttcaacctcgagaagactcgccttacttagaggggcccatcagatctcgacacaaatcagtttaatatctcccgaaccgacagactctcccgaatctccccctgctggacatacttgcgcattcgaaattttcttctcggaatgcggcctttacttccctcttcctgacatcctcatcgagtttatgcatgagttcggaatagcgttgcctcagctatgtccgaacattattcgcaccatcctaagtcttctcactctggcagaagaagatggatttcttctttcactacccgacctccttcaactataagctgtgaaaaaaggtcgcacttcggggacagggaccttcttcttatctcctcgaaaaggtttccgtgtgtttgaggatttcgcagagaaagatgaaaactggagaaaatcttttttctttttcctcgtaaacgagctcacctttgggaataagaccgatctctttgtttatgaatgggctgctcgagctggtagatggcgaccttaggatgatttattttgaacttgtaaaaattttgttttcacaagctgatcaacgttttattttgttttcgcagctcgagttgagaaatcccctatctcgaaaaccttcgctgctcacttctccagtttctgtcgtcaagacttagtttgggaagctctgacaaacgacaaaattcgagcatgagggcgaagacttcgctctaggactgctacctcttcacctccttttcaaccccgaatattctccgaagcagagatggcatcctcctcgtactgtgctgagaagaagatggaaagagaaagggcgaggaaagaaaaggagcggcttcagtcagacaaggtggtaatggctggaactcttgaggacagcaaacttcgtgctctcgacaaagccaagcagcctcaaaatgaggacgactccggaactcgtcagaagtcttccgctttgtccggaaagggtcccaagatctccacctcggaggcaaggacgtcgaacaagaatactccggataaggagcccacaaagcgggatgctgacaagaagaggaagcattcagagaccgatgctcgctctccttcccgctcttcacgcgccggaaatgaggcaaaagagactggtcaaaaccagcagaaggggaaaaacaaaaagggagattcgcaagatctcgttgttctctcctccagggtgtctgagtcccgctactcgcagcgtcgcaccacatctcctttgcctggtaagctcgtcattgtcgcagacgtacacaagtccttgaggatttctatgcacgg

SEQ ID NO: 14192 - DNA, 487 bp, Arabidopsis thaliana
tggcttatgaatattgtgttgaactgtcttgtattttcgtgtattgcagacattcgaaagtctgaatgtccgaaagagcttgagcctgttgataaaagagctcctgtacatgttaatcttatgagaagagatgagaagtgccctgtaagttcctattgggatacactaacttgtgcttgatccatcttatgactatggtaccaacacttataacatctttgtttcttcttcttttgtaggagaaagaaaagcttaaggtttcatttcaaggagttggaaggactctaggtggtgcaagctcatcaacagcttcaagccaaagtaacctaactgatgtagcagcggttcaatcaccgttacagagccttgtagtagatgaaactcttccatccacatcgatccagcttagactcgcggatgggacacgcatggtagcaaagttcaacaaccatcacacggttaacgacattcgtggtttcattgagtt

SEQ ID NO: 14193 - DNA, 611 bp, Arabidopsis thaliana
tctccaatcattggatctatctcaaaacagattatccggcagtatcccgccagagctcgggaaacttacgtttctggagtggatgaacttctcgtacaacaggcttgaaggtccaataccacaagccactcagattcaaagccagaatagttcttctttcgcagagaatcccgggctttgcggtgctcctttcctaaacaaatgtggtggagaagaagaagaagaagaagaagcaacaaagcaagaagaagatgaagatgaagaaaaggaagagaaaaatcaagtatttagctggatagcagctgcaataggatatgtacctggtgtgttctgtggactcaccatcgcccacattctcacttcataggctaagagttgcttattttttcttctccgtcaagccgataaaatgaaaagtaagtatcttatttagagaatctgtatttttgttgagttaattttatctttatatattttgtattgctgaacttaccatgaagcacactagtttctggaagattaaatggaccgcaactaaatactgtgttcaatatctttgtaaacccataagaattgcatctacttgctagattaggtgtatcaacatttga

SEQ ID NO: 14194 - DNA, 760 bp, Arabidopsis thaliana
atatatatgtctattatgcgttcttggctaatcaaaatgaagattagatatgctcgaaagcgtcaagaaatctttggtttcagttgatacttgcttgtaaaactaattgtatttgtttttgttttttgttcaaaaattaattatttgtttaccagctacaaaaatatataacatgattgataaagagtgaatatctaatagaattgattacaaacattattttgaaacaaatagagtgataggcatacctataataattctgtccaaaagaaaaaagaaaaaggcatgcctaaatttattactttcataaacaaatagtaataatgaaaagtgatcaagcccaaattgcaagagcagacatcatcccagctccaagaaacaaaaagcaataagaaacaacttgaactctgaaatcaacactcatcttcttgctcaagaaatccgcagcgatcaaatccacaagcgccatgtacacaagtatccccgcagagagagaatcgagcactccttcagccaccaatgctgcaacgctataagagttgtaagatgaggcaatggccgttcccaccgctacaccgatcggagtagtgatggcgaagaagaaagccatcatggcagatccacgcggggttagtctggcctctgcgacgcagccaccgagggcaaaaccttcgaagaattggtggaaggaaagagcgagaaggagaggacgtatggtgcatgggctatgtgataatctaagcgatattcctatgattat

SEQ ID NO: 14195 - DNA, 591 bp, Arabidopsis thaliana
tgtcatatgctaatgattcaaccttgagatacttctacatggattatagaggatctgtgatccgaagagattggagtgagactaggagaaactggacggtcgggttactagttccagcaaccgagtgtgacaactacaggcgatgtggcgaattcgctacttgcaatccacggaaaaacccgctttgttcttgcattagagggtttaggccaaggaacctaatagagtggaacaatggaaactggagtggtggatgcacaagaagggttcctttgcagtgtgaaagacagaacaataatgggagtgctgatgggtttttgaggctgcggcgaatgaaactgcctgactttgcaagaagatccgaagcaagcgaaccagaatgcttaaggacttgtttgcagacatgttcttgtatagctgctgctcatggcttaggatatggctgcatgatttggaatggaagcttagttgattcgcaggagttgtctgctagtggattggatctttatatccgcttgcacattcagaaatcagtaagtattatccacaacatctctcacattcttactttaatgagtgcacgtatattaa

SEQ ID NO: 14196 - DNA, 1551 bp, Arabidopsis thaliana
attaagaacacaaaagctagctacaccaaattgggactgttcttgagaagctggtactgaagctatgagacttcatgagagctcgagtccttttgtttgtattcttgtactgtcttgcttcttcttgagcgtgtctctggctcaggaaagagctttcttttctggcacgctcaatgattccgagacgatagtctccagcttccgaacgttcaggttcggtttcttcagccctgttaattccaccaaccgatatgctggtatatggtataacagcattcctgtacaaactgtgatatgggttgctaacaaagataagccgatcaatgactcctctggagtgatttcaatatctgaagatggaaatctggtagttactgatggtcagaggcgtgttttgtggtcaactaacgtttctactcgagccagtgccaattctactgtcgctgagcttttggagtccgggaacctcgtgctaaaagatgccaataccgatgcatatctttgggagagcttcaagtatcctactgattcttggttgccaaatatgttggttgggacaaacgcaagaaccggaggaggaaacatcacaataacttcttggacaaacccttcggatccttcgccggggagctacactgctgcactcgttcttgctccatatccagagctttttattttcaacaataatgacaacaatgctacggtgtggcgcagtggcccttggaacggactgatgtttaacggtttaccagatgtatatccggggctctttctttatagatttaaagttaatgatgacaccaatggttcagccaccatgtcatatgctaatgattcaactttgagacacctctacttggattatagaggatttgctatccggagagattggagtgaggctaggagaaactggacgttagggtcacaagttccggcaaccgagtgtgacatttacagccgatgtggtcaatacactacctgcaatcctcggaaaaacccgcattgttcttgcattaaagggtttaggccaaggaaccttatagagtggaacaatggaaactggagtggtggatgcataagacagctccctttgcagtgtgaaagacagaacaataaggggagtgctgataggtttttgaagctgcagcgaatgaaaatgcctgactttgcaagaagatccgaagccagcgaaccagaatgctttatgacttgtttgcagtcatgttcttgtatagcttttgctcatggattaggatatggctgcatgatttggaatagaagcttagttgattcacaagtgttgtctgctagtggaatggatctttctatccgtcttgcacattcagaattcagttaagtattattccaaaccttttctcataatcatacttaagtgattgcagtttcactaattatgctatttcttgccaactctctattagaaacacaggacaggcgacctattttgatcggtacatcattggcaggaggcatttttgttgtggcgacttgtgtccttctggcacgacgtattgtcatgaagaaaagagg

SEQ ID NO: 14197 - DNA, 1178 bp, Arabidopsis thaliana
gaatgaagtctaatccccttttgtaacacaacttcatcttgagtgttcctcttatgtatctcagcacccacttaactcccaaccaatgttccttaattggtaaactcatgaagcgactgatgataccaaccggataagctagatcgggtcttgttccgatcatagagtacattatacttcccaccgcattagaataaggtactgacttcatgtactcttcatcatccaggagttgctgctctgaagcagcctgcatcttaaggtgaacaccaagacgagtcatcaccggcttgcattgctccattttataaagctccaataccttatttagataatcttcttgagacagtgttaaggttcctttacttctttctcttgtgatctccataccaagaattttctttgcagctccaaggtctttcatttcaaatctctcacttaacttctgcttcaattctgaaatgaccttcatgtcttttgtagccaccaacatgtcatctacatagatgagtaagtagatctttgaaccatcctccagtgactttatgtaagcacaactatcacgaggactcttctcaaaaccaatctctagcatgtagctatcgaacttctggttccatctttttggtgactgtttcagaccatatagggatttgtttaacagacacacttgatctgacttaaactgatcttcgaaacctttaggagcttccatatagatcttctcttccaattctccatgaagaaatgtaattttaacatcaagttgctccagttcatagtcctcctctgcaacaatggcaagcagaatccttatggaaacgtgtttcaccataggagagaaaacttcagtgtaatctatcccttctcgttgtgcatatcccttagcaacgagtcttgctttaaatcttgccatctctacacctggaattccaggcttacgcttgaaaatccatttgcagccgatcactctctgttctttaggctttgtgactacagtccatgtatcatttctcaacagtgaatccatctcttcatctatgccttccttccacagaacccaatcatcatctttcagtgcttcttgataacttgcaggttcgatggtatctcatcaaaagtggtgacaagggcttcagcatttaatgattcctcatcatctgcagactcactgtaat

SEQ ID NO: 14198 - DNA, 571 bp, Arabidopsis thaliana
tgttttgctgaatggaaaagtttattatggaccttatagtcctaaaatgttaagtatagatactatgagcccccaacccgattcgacattgacatgtaaaggaggaagttgcctcttgcagctagtgaagacaacaaagtcaactcttcctcctctcatcaatgctattgaactttttactgttgttgagtttcctcaatcagaaacaaaccaagatgaaggttcgtaaatttacatttttcatacatatgaattgtagctttgaatgtgtttgattcttgatatattattaactatgaaattctagtgattgctatcaagaagatccaacttacttatggattgagtagaattaactggcaaggagatccatgtgtccccgagcagtttttgtgggctggtttgaagtgcagcaatattaatagttccactccaccaacaatcactttcttgtaagatttttcaatcaccataaccgtatcataattaaaattaaattctctattctaaatatatcacaattgaaacattctattttcatgaatgtacactagaaacttgtcttcaagtg

SEQ ID NO: 14199 - DNA, 882 bp, Arabidopsis thaliana
tatttgatgtcttagatactatctcttagttgttagattctgtgaaggttgcattgttcatccaactatttacatgcttaatcgataagatcaatgttgaaaagggtgaaactgcgcctatgcaattgtaactttgctcttctcggaatatttgttttggaagtataaattgtctctcgtgtgctatcccatctcttacctcttttggtatctcattactttagtgcaacagtctttggggtatcaaccgaatcaatgcaattatcgtatgattcaagaggcaattgtgtaccaaccatactattgctgatgcaaaactgtttatatagtcaaggaggcttgcaggtaatgtacattgcttcatcgagtttactccaaagtgaatatattataagctttccatgtaatcatttcttcatttatttttttaggcagagggcatttttagactcactgctgagaatagtgaggaagaggcggttagggaacaattaaaccgaggatttatacctgagcgaatcgatgttcactgtttggcagggcttatcaaggtatgtaacatatgcacatcttatttccaaaacttatatatgaaccttggtttttaattctggttttcggtttcaggcatggtttagagaactgccgacaagcgttcttgattcgttgtcgcctgaacaggtgatgcagtgccaaacagaagaggaaaatgttgagctcgttaggcttcttccacctacagaagctgctctacttgattgggcaatcaatctaatggcagatgttgttcagtatgaacatctaaacaagatgaattcacgcaacatcgctatggttttcgcaccatatatgacacaggtgagtctgcaacaacaaggttga

SEQ ID NO: 14200 - DNA, 589 bp, Arabidopsis thaliana
tggagctggttgggagtggtttcacaatctacaaaaccattgatgtctccggaaacagactcgaaggagacatccccgagtccatcagtcttctcaaggaactgattgtgctcaacatgtcaaacaacgctttcacaggccatattccaccatctctatcaaacttgagcaatctccaatcattggatctatctcaaaacagattatccggcagtatcccaggagagctcggggaactcacatttctagcgcggatgaacttctcttacaacaggcttgaaggtccaataccacaaggcactcagattcaaagccagaacagttcttctttcgcagagaatcccgggctttgcggtgctcctctccaaaaaaaatgcggtggagaagaagaagaagataaagaaaaggaagagaaagataaaggattaagctgggtagcagctgcaataggctatgtacctggtttgttttgtggacttgccatcggccacattctcacttcatataaacgtgactggttcatgagaatcttttcctgcttttcttctccgctgagatgcaggaagtgaatgatagatcctctagagat

SEQ ID NO: 14201 - DNA, 432 bp, Arabidopsis thaliana
taacaaaaacgatttaattttttaaaatgtaatacaccacaatattaatattattattaattaaaattataaccaaactccttgctcggaacaatagtttcgagccggtttagctttctcggttcgagatatccaaccgatcgaaacaggctttcttccttttatagctatgatcacgaaatgtcgtcgagaactcaacttctgttcttgcacttttctaatgcccttggagctgcaatatatagaaaattagtattagcaaagattcatagtataattttacaccaccagttttggattaaacaatactaagcatgtccgattgcttctgatcccgtcattattcgtatacgtttgcatgtatcaactatcatcctataatagtccatactgcatgtagatagatattttgtatagacgtatttataataa

SEQ ID NO: 14202 - DNA, 564 bp, Arabidopsis thaliana
aaaggcctaatgaattgggttgatattgtgtatgtttagatctgagagttgtgtgactagatctttgattcatttatgctaattttggttttgatttgccaatttaggtctgcttcgattgtagtgcgaagaatccaacttgggcatcggttacatatgggattttcctctgcatcgattgttcagctactcaccggaatcttggtgttcatatcagcttcgtcaggtaaacaattcatcatctgatccaattcttcggcattactctagctcagattttggctaaggtttaagcttttgaggcctttataagggaattagcttaaaccgtgctcaggtgttcagaattgttggctaatgtgtagcattacgttgactttagtgtggttgaatcatcagattatgttttaaggtttcagaattgttgacttcaaaatttcaccagtgtcttgaaattagactcattcaaattatcgattcattgactagataataatgaataatgccacattacgttctcaagatgctaccttttccgtatttgtatagaacaccgaatttaga

SEQ ID NO: 14203 - DNA, 566 bp, Arabidopsis thaliana
ccaaagatcaatgggctagtttgcacacagagtgtgtagtcggagacttttcagggctcatgccaggaagcgtagtaaaggctgagacgggatcatatgaggttgtgctcaacaagaatgtatctcgcccgttttgcaggcagtgtaagtcgcattgcatgtaccctatcatctataagatacctgaaacctcagtttcttatctttgctctgatatttgcataaagcgttttacaaagagagactgatgatgtttagttttgggctttgtgtgtcacacacgtttttctgtgttcaagaaattattagggtcgtttgaatatttttcctttatttttcgttaaggttttccgttgaatcctggtccaaggaggaatcgagtctttgagtataaatagagttgtatcgagtatttgttcttcagtcttttgttttaagaaaatcaataaaaaaacaaaaagaggtaaccctagttacccaaagagcttgtgtttgcatagcactgagaggagtactctcggctcattgttctagttcaagaggacgatcatcgtcttgcacgagtg

SEQ ID NO: 14204 - DNA, 434 bp, Arabidopsis thaliana
cctgtcacgtctttgccccttccacaagaaacaacatttaatctaacttggatccacaatgttcaacacttctccttctctccagcatttccacacctatacatgagttgaatatatgtcaaagtcgtccatttttgcaactttatcattcacgtccaaaaatgcagaataatcatatgatataaaaataatacacaatcatcgcctttttgcgctattaccacgttctagaatttcgatacataatatatcgaattgaggcccttgagatgaagatttcaactatatctgacaaacgtttacaatatatgtttcgttgcaattatcggctatattgcgtattagttttgacgtcatatgattatcttgtatactcatcgatttcggacgtagagagtacaatggtgagcctaggagacatttgagagtctaga

SEQ ID NO: 14205 - DNA, 705 bp, Arabidopsis thaliana
ggtagatcctttttccagtgtgagtgtcgcacatgaggtaggagaatatgtacggagacagattaatgttgaaccatcctgaagtgtccgaagtttttattcatataggtattgagcatgctgcatggaggtctaatcaacttattcactgcttctcggtcttagctatcatctcaaactttccttgcagatccagcctttttacagttttcttgtagcaccaaggatcatgacagtataacgaaggaaagtaacatctgccaagagattaaacatgttgaagccactgtctcagacattttttcgtcgcagttgtctgaggtactcactttctataatccagacctaacccaacctctagttattcctgtttattagtttcaagaacaatggaatctttcgcatatgtgcagaaattgacgatcaaacgaattacaccccacttgttacatagcaagatcttgctccaaatcgtagtcgccatgccatcaaccatgtccatacagtaaagctcttacatgtctgtacctttaggccattttggccactctcttgtaaccatctgacaagtatttggctgctctgtagggacgtcatgatagctgctgaacatgcagagaaagagattctgaaggcagccccgaaatgtggctcgtgtcagcattcagcttagtcttaactccgaataactttgaaggaattact

SEQ ID NO: 14206 - DNA, 575 bp, Arabidopsis thaliana
ttgaggattcggatgtcccaatctcatatgccacactgcatcagatgccttgacttgtctggttgagtagaacatctgaaactttggattctccaacttatagagaccatcactagtgctgcttcccattgtcaaaactttgcttgttgctttgtcctttacaagaacaccattagcatcaaacgtaaaagagcatggataatcttttgttaactttgatactgacaacagagatttagctatatcaggacaaactaatacatcttttaatggcagattacctgacgttgatggtagactagcagaaccaatgtgagttatgggtaagaaattaccatcactcgccattattgtgtcattaccataatagggctgactttgttgcagtctctgaccattgttggtgatgtgagcagttgctgcagagtcaggaacccaagcaccatcatccgtaacatcagtaatatgcaaagcagagaatgcagcagcagcagcttcagagtactgatagctttcatcaaaacgatgccaacattgaatagcagggtgtctcttttacacagatctgacatgtt

SEQ ID NO: 14207 - DNA, 1086 bp, Arabidopsis thaliana
ccacttttcatcttttaaagcttcagtgactgtttttggtgttggatgagaaattttatgtgtaagcagtgcataccttttatttggtttgctaatgcctgtctttgatcttgtaaccataggatgagttgactctgtagttttgatgacgtctgatgttgattgctcttggtcagaagatgacgaagcaacgctgttgcctataggatcaagatctaagcttgtcgtacactcaggacgttgctcatcacttctagacaatcgctgttgaggaagaatcatttggagaggtgtaacacttattggatcaacaaccataagctgcaaattttcagtagtcttcccttgtacatttgaatcaataggatgacttactggtattaattatggctgttgttgattttctgttgttgcaggtgcttaactgaactaatcatcagcttctggaggtaaaaaggtagagagtccttttaaccaagctgcaaacaaaggagttgaagatgcattctgttgatctgtgtaagtgtctgcaaacggaaagaactcttctgcaaacaagacatgccgacttatataaactcggcctgttggtggatagaagcagcgataccctttgtatttttcattatacatgagaaaaatgtattttagagatcgtggatcaaactttgtgcgagcataatctctgagagttgggaagcaagcacatccaaagattcttagagcagaatagtttggagttttaccgaagagagcttcatgaggactgacattagttgcaagagctgttgttggtaagagattgcagagaaaatttgctgtgaagaaagcttcaacccaaaaattttgtggagttttgctttgaaacattagagtaagccccatttatgttagctatctatgtttcctttctgccataccattttgtagaggtgtgtgaggacatgatatgaaatgttgtatccctgaatcttgtaaatgcttgagaaatctttgactaatgaattcttctcctccatcactctgaaaagtccaatttttgtttgcaaaaggttttcacaagattcctgaacttgatgaatattg

SEQ ID NO: 14208 - DNA, 1037 bp, Arabidopsis thaliana
ctctagagagagttcattggatctctggggtccagcacctctttcatctattcaaggatttcagtattatgtaatcttcattgacaatttctcaagattctgttggttctatccattgaagcaaaaatcagatttttgttcaatcttcatcaagtttcagagtcttgttgaaaatcttttgcaaacaaaaattggaacttttcagagtgatggaggaggagaatttacaagtaatcggttcttaaaacatcttcaagaatatggtatacaacattacatctcatgtcctcacacaccacaacaaaatggtttggcagaaagaaagcattgtcaacttacagaaaggggtcttacactaatgtttcaaagcaaagcaccatagagatttagggttgaagcgttctttactgccaatttcctgagtaatctccttcccacaacagctcttgacagctctgccacaccttatcaagttttgtttggcaaagcaccagattattcagctttgagaacgtttggatgtgcctgcttccttacatttcgtgcttatgctcgcaataaatttgatctgaggtctctcaagtgtatctttctcggttacacgaataagtataagggttaccgctgcttctatcctccaactagacgagtgtatctaagtcgccatgtcgtgtttgatgaaggctcttttcctttcattgatacttacactggcctgcagcattcttccccaactccgatgtttgacgcttggttaaaaggcttctcaagctcttcagttccattggaaaaggaagaaaccgatggctctaatattggtacaaatgtccctgtcatcacaaaaaatcaacaacataacctttcattagagtgcagtcgtgctattataattacagagggggagacaacacgtcataacaacaatcaagacataccaagtgaaccggtctgtgttacaccattgtgaatcattccttctcaagataatgctgaagaaattgaaactctgtctacgggaaatgaggagtgtttgagtg

SEQ ID NO: 14209 - DNA, 789 bp, Arabidopsis thaliana
ctgccacaactcatatcaccaacaacagctctcgtcttcaacagatgcaaccttattttggtaatgacacggtaatggctagcgatgacaacttcttacctatcactcacattggctcagcaagccttccctctgcatcaggtaatcttcctttaacagatgtattggtatgccctaatattgctaagtccctattatcagtgtcaaaactgactaaagactatccctgctcctttacctttgatgctgatggtgttcttgttaaggacaaggcaacttgcaaagttctgacaaagggaagcagcacaagtgagggactttataagttggagaacccaaaatttcagatgttctattccacccgacaagttaaggcaactgatgaagtttggcatatgcgattaggtcatccgaatcctcaagttcttcaactcttagctaacaagaaggcgatccaaataaataaaagtaccagcaagatgtgtgaatcatgtaggcttgggaagagttcgagattgccatttattgcttcagattttattgcttcaagacctctagagagagttcattgtgatctctggggtccagctcctgtttcatctattcaaggttttcagtactatgtaatcttcattgataatcgatccagattctgttggttctatccattaaagcacaaatcagatttttgttcactcttcatgaagtttcagagttttgttgaaaatctcttgcaaacaaaaattggaacttttcagagtgatggaggaggagaatcacaagtaatag

SEQ ID NO: 14210 - DNA, 1237 bp, Arabidopsis thaliana
attctatgcagtaaatggaaatgaggcttcatcaaatacaacatgcctactgatgtaaacaagacccgtaggcggatagtaacaccgatagcctttgtatttctcagtatagccaagaaagatacaccgtagagatcgaggatcgaacttgttgatggcatagtctcgaagtgtgggaaaacatgcgcatccaaaacgtcttaaggctaagtagtctggagctttgttaaagagaacttcataaggacttgctttagtatccagagcagtggttggcagaagattcgagagaaagttagctgtgaaataagcttctacccaaaatctctgaggacacttgctttgaaagagaagagtaagacccatttctgtgatttgcctatgttttcgctcagctagaccattttgttgaggtgtgtgagggcataagatgtattgttgtattccagactcttgtaagtgagacagaaatctttgacttgtaaattctccccctccatcacattggaatgtaccaattttggttttttaactgattttctataagactctggaatttaatgaaaatatcatagaaatcagacttcttcttcaagataaaaccagcaatatcttgagaaattatcaatgaagactacataaaatctgaaaccctgaacagaagttacaggagctggaccccagagatcacaatgaagtctttctaggggtcttgaagcagtaaaagcagaagggaaaaatggctatcttgtactttttccaagccgacatggttcacagagcttgttggtactcttctttattttaatcgccttgttggaagataaatgttggagaacttgatcattcggatgccctaagcgtctatgccaaacctcatcagatgttgtgatttgcctagtagagtagaacatttgaaactttggattctccaacgtgtaaagcccatcacttgtttttccgagagtcagaactttgtgtgttgctttgtcctttacaacaacaccatcagaatcaaaagtgaagcaacaaggatagtctttggtgagctttgacacagataacagtgatttagcaatatcagggcaaactaaaacatcctttaaaggaagcatacctgacgtggatggaagttttgcagagccaatgtgagtgattggtaagaagttccatcactagccattacagtatctgttccatagtagggctgagattgactgagacgttgagcattgtt

SEQ ID NO: 14211 - DNA, 514 bp, Arabidopsis thaliana columbia
aaggttcacaatgtgttcggtgcttggtatcatcatgactaatggaagtggcgttggatccgggagttctttttggatcaaggcattgttggtgaccaactcctcctctctagagctatctaacaactctccttgtcgccactgataagtatgaaaagtactaaatgaagaaatatccatttcaggctcctctatgcattcttccatgtgctttagccgaagttgattttgataatcttcacgaggatctcttgattgactcatatgatgagtgtttatctcctaatcattagtcttcttgattggcctcgaaagtgtacaaccttcaccaagagaaagcaaattagctttaattcgtttttgggagtttagataattacctcgagttttaaatggtggtgtagcatctggtggtttatccttgaaaaaaatattgcattcagctctaggtgattgtttgtggatcatgacagcctcaacttgagtgaattctcctaattcacgtgttcttctt

SEQ ID NO: 14212 - DNA, 604 bp, Arabidopsis thaliana
gccagtgtgctctaaagtggaaaaaggcaccggctgcgtgaaaatcactccggcgcacgactttaacgactatgaagtgggtaaacgtcacgccctgccgatgatcaacatcctgacctttgacggcgatatccgtgaaagcgcccaggtgttcgataccaaaggtaacgaatctgacgtttattccagcgaaatccctgcagagttccagaaactggagcgttttgctgcacgtaaagcagtcgttgccgcagttgacgcgcttggcctgctggaagaaattaaaccgcacgacctgaccgttccttacggcgaccgtggcggcgtagttatcgaaccaatgctgaccgaccagtggtacgtgcgtgccgatgtcctggcgaaaccggcggttgaagcggttgagaacggcgacattcagttcgtaccgaagcagtacgaaaacatgtacttctcctggatgcgcgatattcaggactggtgtatctctcgtcagttgtggtggggtcaccgtatcccggcatggtatgacgaagcgggtaacgtttatgttggccgcaacgaagacgaagtgcgtaaagaaaataacctcggtgctgatgtt

SEQ ID NO: 14213 - DNA, 623 bp, Arabidopsis thaliana
gtaatctattattaacatttggactaatcaaatcaataatcttgtcgttgtgaaatctctaactgtttgtcattgtgctttgttgttggtcttaattcaagaacatagctgttaaaatgcttgatcagtctggtattcaaggagacaaagagtttcttgtggaagtcctaatgctctcgctcttgcaccaccgaaacctagtgcatttgttcggttattgtgctgaaggcgatcaaagactcgttgtctatgaatacatgcctcttggatctgtagaagatcatctctacggtaaaaaaaaaactacactcaaaccaagaaattttcaagaacgagattcattaaagttttttaaattcttgtgttgttttgtcagatcttagcgagggtcaagaggctttagattggaagacaaggatgaagatagctctaggagcggctaaagggttagcgtttcttcacaacgaagcacaacctcctgtgatatacagagatttgaaaacttcaaacatattgttggatcatgactataaacctaagctctcagattttggacttgcaaagtttggtccaagtgatgatatgtcacatgtcactactagagttatgggactcatgggtat

SEQ ID NO: 14214 - DNA, 1915 bp, Arabidopsis thaliana
gctgctccgattacctaccatcaccacttacgaaacttggattgattcaatcgaacaaagaccagtgagatcagaagctaagaccatccccattggttaggtccttaaccatgatccttaactttttgtgttttattaaaattttgctttttgtaagttaagaaactaataagagtctttaacaaatttctactccaatggttaagaaacaatgggtccttgagtaaacaaaaatcaaatttttgcaaaataatgtcttccaatacaagcatgaaattcataataacaaagagaagagatgaaatttgaattgctagtatcatcatttgctcaataaaacacaatataacaatacgctagcatgacaaaaacacagttttcagttctgttccaatattttcagaaacagagaaccattttaatatcttgagtgcacaaaagaaacggtttccagttgtgcttcaatattttcagaactgatttaatacctgcagcatagttggcagcgcatgtgcgtaagcacaagtgtcaaactttgttctacactaaaataatagctacccagaaattaaaagaagaagaagaatgagagaaacgaagggagaaatagagagaaagagagattacgcatgtggagagctcgagtaatttagtgttgtggatgattgaaccagctatggctatgctaacaatggctttgcatcttcaaccatcagattataagagaaaatgttaacccaagaatgattacgaattaagaaataactgatttcagtttagatcacaaacatgtaaataccgtgttcactagagccgtattagtctattggacgagattattcgagcgacccaagcctctcggacaccagaaaaacgtcaatttcatgaagagtggatttacaaaaatgtaatggtacaagtagagttttgaatacacatacagtatgtagctacaccattcacaatctcacgacgacggccaaatcaaaatgaaaaaccaaataatgaatcaaataataagagaggaggatcatctgggagcggtggaagtgccagattccatgttttcgagagatgttgaatccatctgcagagacatagccctcaaggcatctccgttttgggaggaggtcacagggactcctcgttcttgagctgccttgaaataggcgtagggaccccatccttcttcgtggtaagggttggggtagaactgacggtagcagaaggcggctacaagggtgccaatgagagctcctgcgaagacatcttgccagtggtgccagtagtcatccacacgagatatccccacaagacaagcggcaagcagagggaagatcacgaggcagagtttcgccacatgtccttcattgttgaaggccttgattttgccagagaggtaaagggaaaggaatgtaagccccgcaaaggaccaggaagtgtgtccgctcgggaagctcttgtggccttccttgacctcagctgccttgccgtggcataccacacctcccaacgcatcatacagctctttgccgtcggggaagcagcgccagtagaagttaggacgagggcgtccggtggctaccttgatggagtcagtgatgacaccagttatcaagacggcgaagagcagcccgaggatgctgtggtgcagatcgtacacacatgtcctcttcaggtagaagcagacgaacactatgatgggaagaagcacagcgtacacagggacagaccagataggtacggtgttgtccttgaaagggtacttgagagtcagtcatcatgtcttttcccacgtagcggtagaaaggagagatgaggttcaagcctatctcgatggcaatcaagatgacgagtatgatccaatcgtgcttgtgtttagaacgactctcctccatgggactttatagtgtga

SEQ ID NO: 14215 - DNA, 735 bp, Arabidopsis thaliana
ttcttatctcaactcaacatgacgaaactgtcaccaatgatgagattgctgctgacttgaaggagcatgtgatcaagcctgttatccctgctaagtaccttgacgataacaccatctttcacttgaacccatctggtcgttttgtcatcggagggcctcatggtgatgctggacttacagggaggaagatcatcattgacacttatggtggttggggtgctcatggtggaggtgccttctcaggaaaggacccaaccaaggttgacagaagcggtgcctatatcgtgaggcaggctgcaaagagcgtggtagcagcaggactcgcacgccgttgtatcgtgcaggtatcatacgccattggtgtccctgagccgctctcagtgtttgttgacacctacaagaccgggaccatcccagacaaggatatccttgtgttgatcaaggaagcatttgacttcaggccgggaatgatggccattaaccttgaccttaagaggggaggtaacttcaggttccagaaaaccgctgcgtatggccatttcgggcgtgatgaccctgacttcacttgggaggttgtcaagccgctcaagccaaaggcctagacagaaacaaagctggcaattgcaagaactgagttgagtcactccccaactactgggaacttatcattataccattattattgcaaatgactgaataaagaaagcttctgcattgtcaccgattcacatttgt

SEQ ID NO: 14216 - DNA, 523 bp, Arabidopsis thaliana
tgagaaagtttaccttagagagccatctcagcttgtaaggcagcgagttcatcttcctcagcagtaggttgcttctgagctggagcacgagcaggcttgtttccttgaggcacatggattggaacaggctgaagaagttgctcttctagctcagcgccttctagttcgtcaagttctgcttccaattcatcctgcaaattgccaataacaataattttaagaatagttgaaacataatgtgtttcttagtttgagtatatgatcaaggggtctatcgggaagttacctcatcaaaatcattagccccaaatggagccgacaatgcttcttggatctgtttcatgttctcagtttgttcattgatctcatccattgtcttgtcaacatcatcaatgtttctgcaaaacaaatgtgtttagctgcacactaagtggccacttaaattatagtcttatttgacccgatagtacagtggttaggaaagtaaacacatacgttgctttctgcatagctttcattgcag

SEQ ID NO: 14217 - DNA, 576 bp, Arabidopsis thaliana
cttcgctccaaacgcttgtccacacagcgtttccaacgcactcgccattccaagctaaaccatttacatatactcatattattattttttagaaaaatgaaggaaaaaaacattttaatcaagattgtgtagatactataccaagaggccaaagttgaagccaacggtgacgttattaacgatggatatggcggcgagttcaagatcgccgagatgaccagcgaaaccttgagtgattacaagcatcgaatatgtcgttactcgactgaatatggccggaccaactatttgccatagcttttttgtctcaaccaaaattctatccttcaatccttcaccgtcttcctccgccgtgtgaggacttttcaacagtgcaactcttgactccgatccttcttctccatcacctcccctcatcgctaattccttttttttttagttatgtggaagaaatgaaatataaggagaaaagaagaagtgagaagaatggtgaagacgagagatgagtcgtgtgtgaattggtttttatctatatataaagtctgtggctagtgttataattcaattgtggtataa

SEQ ID NO: 14218 - DNA, 548 bp, Arabidopsis thaliana
cttttttatctttgggaaatagctgcacctatagctttcaacattctttgtaattacggtgttaactccttcacaagcatcttcgttggccatatcggcgatcttgagctttctgccgtcgccatcgctctctccgtcgtctctaatttctcctttggtttcttggtgattaaaataaccttcctctactctgcttttttcctcctctgtttcttgcgttttctctaactttctagaaaaaaactgcagctgggaatggcgagtgcgttggaaacgttatgtggacaagcgtttggagcgggacaaatggatatgttaggtgtttatatgcagcgttcttggcttatcctcctcggaacttccgtctgcttgcttcctctctacatctacgcaactccacttctcattttactcggccaagaacccgaaatcgcagagatctctggcaaattcactacacaaatcatccctcaaatgtttgcgctcgctatcaacttcccgactcagaagtttctcagtcacagagcaaagtagggatcatggcatgg

SEQ ID NO: 14219 - DNA, 422 bp, Arabidopsis thaliana
gcaactgagttaggagacaacgtgccctcattgcctgaaggaaaaactccatcgcttctaatgccaccgacacccatcatgtgtggtggtgattggcctcttcttagagtgatgaaaggaatatttgaaggaggacttgagagtgcagacagaggaggtactgttgatgaagaagatgttgaaggggattggggtgaggaacttgacattaatgttgatggaatggagaacagagatattgaagacattttggcggctgcagaagcaggtgaagaagaaaacgatgaggaaggtggatggggacttgaagacttggtgctcccaccagagcttgacactcctaaagcctctgctaatgcacgttcatctgtttttgtgacacctccccaaggtatgcccgtaagtcagagctggagccagaa

SEQ ID NO: 14220 - DNA, 697 bp, Arabidopsis thaliana
  unsure (1)..(697): unsure at all n locations
tactccctttgtttcaaaatataagaacaaatataagttgagatatggtcacaaatgataaaatgcatttaactttgcatggaaacttgcaaaacatgttataatatgaaacaacgtagtaatcatctcaacttattcaatctctctgtacaggggaaccaagcaatgtctataccgggttgaatataggttgtcgcttgccggagtgtccgccagagaatccttttgaaatatattatctggtaagattattattattataggcccatggcatagctcgatttttacaaaaagtaaaagagtgatatatgtgttttgctgcttttggtcagatgaaggattcggagctccaagaaaataatgactggattcgtctatatttggaacttgcatgtgccacactgataggaacagggaagctagtgattttggtctctccacttggagattgtcaacgtggnngttgatgcggagggactnctaatggcaaaaatgcaattttgtacattaggtacaaggagttgtacgagggtttggttggtaatgctgtttttgatnggaattgtatcgttagaagaatcttgatgaggataggggagctttantctgggtggggtagaatagagttcagatattataaattaangtattattaatggtagagttaaagtattggtataatatgagtgtagatttg

SEQ ID NO: 14221 - DNA, 643 bp, Arabidopsis thaliana
agaggcaaatgaccagcattctccagtatcttaacacgctctttaacatctcctaggtagagagcattgtgaaactgtcccattacgttgttcttcacttctgcaatcttcatcaactttgaaagcttgtccaaatttccagtaatgagataaagaaaagataacctctcaaagttctttgtctgctggtatgcaaactcaacaattccagaattaccttggcgaagagcctccactccaagtctataccagtggtctttctcgttaatctgtgtagcggatgaacagccacactgatgttgccactttcaagagccagattgaatcggatcctctcatcttcaacaaaatggagggcaacttcagggaatcctttctgctgcaggtaagcaatcatagcctgtccacatagctgagagttctttatcatgctcatgacatgatcatatctcttcctcagcagtgaaagcttgaaaatgtactcggttgcattaatggtgatagccttgtttttgccatcccgatccaagcaaaagattgtattccagacaccttggtgatatagattgggacatcgagggttcggatgattcacgtatctccataggaagacagacttgatatgatcaaagttgtgtaatga

SEQ ID NO: 14222 - DNA, 791 bp, Arabidopsis thaliana
tctatcttcaagactggtacagtttataccttagcaacagctattggagggtaatctcatcccagtcttgaatcaacacactgcttaaccttgtctatcgcttagctttggtgtagcctacagagttttgattgttataataagaattttgatcaaagtacatgatgcgagattgctcatctttgaaagagatcagaaaaatttacccatgtgactagactttgctggcctcgaggcaatgtatgatcaacaggctttcgacctgtaagaagctcgagcagtacaactccgaaactgtatacgtcactcttggcactcaattgcccagtcattgcatatctagtaaagagaatacgagcatatgagagatcgaggattgaacaatggagaataagaagaaaagaaaaccaacttactcaggggcatggtaaccaaaggttccaagaacacgagttgaatgaaggcgtgctgccatatcaggagcttgatttgagagatcaaagtcagctatcttggctacatcgttatcaaagattagaacattgctggattttatgtcacggtggatgacatgtggatttgccttttcatgtaaatactcaagccctcttgctgctccaaccgcaatcttcactcgttgatgccacgacaagagtggaccaggctttgctcccttcacaccttttctcctgagaaagcatagcatatgttaacatcaacaaaaccactctctaaacaaaaataagacacaaagtcatttctaattgtaccgtgaagaatacgatgaagag

SEQ ID NO: 14223 - DNA, 668 bp, Arabidopsis thaliana columbia
cttctctttttctctctccctgcaactggctccatcccaaagtgcttcgttctggtacagcgaccatggcagtttttgttcttgtgatgattttgttggccatggctggtcactcaagtaagtatatcttcgtctcttttcaaatccttctctgtctcatatagatcctcttcttttcttctatggcaaaacgattcttcttttctttgttcacccactctgttttacaacagaacaacatagtcacaaacttcttagctttcatagtttttaatgaaattttccacaaagaagggccatttttgcttttacccataccttcttttcatatttcctttttgactgtggagttcaacaatcttgtcccctcttgaattaaacattaaggtgttccatttcacacattatcagtgaatgagatttgaagaatgctcattgaagtgtttatgtgtgtctttaggtgggacatggtgtgtatgcaaagaagggttaagcgaggcaatgctgcagaagacattggactacgcatgtggtgcaggagctgattgtggacccattcaccagaccgggccttgctttaccctaacaccgtcaagtctcactgctcctacgccgtcaacagcttctttcagaagaaaggtcagtctctgggcacttgtgactttgct

SEQ ID NO: 14224 - DNA, 708 bp, Arabidopsis thaliana
tcccagctatgtggacaggctatgatcgcttatcttcagcagaaaggatttcctgaagttgccctacactttgttgaagacgagaggatccgattcaacttggctcttgaaagtggcaacatcagtgtagctgttgcatccgctacagagattaatgagaaagaccactggtatagactcggagtggaagctcttcgtcaaggaaattctagaattgttgagtttgcgtaccagcagacaaagaactttgagaggttatcttttctatatctcattactggcaatttagacaagctgtcaaagttgatgaagattgcagaggtgaagaacaatgtaatgggtcagtttcacaatgcactctacctaggagatgttaaagagcgtgttaagatactagagaatgctggtcatttgcctctagcttatatcacagcttcggttcatggtttaactgacattgctgagcgactagcaattgagctaggagacaatgtgccttcattgcctgaagggaagactccatcgcttttaatgccaccgtctcccatcatgtgtggtggtgattggcctctactgagagtgatgaaaggaatatttgaaggaggacttgagagtgcaaacagaggggctgttgatgaagaagaagaagatgttgaaggcgactggggtgagggacttgacaaattcgatgttgatggaatggagaac

SEQ ID NO: 14225 - DNA, 493 bp, Arabidopsis thaliana
gaggatgactatcccctatttagatggagacattcaagtttacgaaaacatcgatcacttgtttgacctaccagatggctatttgtacgcggtgatggattgtttctgtgagaaaacatggagtcacacgccgcaatacaagatcagatattgccaacaatgccccgacaaagtccagtggccaaaagcggacgttggagagccaccggctctttacttcaacgccggaatgttcttgtacgagcctaacctcgagacttacgaggatctactacgaacacttaaaatcactcctccgactcctttcgctgaacaggtaaaaggcaaaatcaaaactcagactggcctttttctgttatgctctgttttcatctgttttaagttgtgtattttaatttcgcaggattttttgaacatgtactttaagaaaactacaagccgattcctttagtgtacaatctcgtccttgcgatgttatggcgcacccagaaaa

SEQ ID NO: 14226 - DNA, 893 bp, Arabidopsis thaliana
tccattgcattgccatgttctcaacaacctttttaacactctcttatcagaaaatttcaaagtagattcaatcaagccaagaactttcctatccttgacaaccttttgaagacaattcatcactacatcaacatcaacatgatccaacatttcactaacatcacctttcataaaccacaagtacccagcgaaattacttctgatagttctaatcacagtatgtggattcctacctggtctaaacccatgagacttactcgaaaacctagcttcaaagaaaggttcaagaatcatcaacagaacctcatgaaccacccgatcctgaaaaatcggttcttcagactcaatgatcctccttaccttccctttcgacataccctctccaccattcattgagattttatcctttgggctccttacgtactgattcatcttatcgttccaccgaaatttgccaccggaacgtgtaacggcgttttggagggagagaagcgaacggagggcattggcatgaatagcattgcgcggtgggaaagttccggtgacatgagcacaagttcgttgataagctaagacccataaatcgaatttggagagaaagccagtgaggttcgagaaagtagcagaaggaggagaagagaatgatttgacccagagtgagagacatatatcgactggatcttgtttgagtagtgaatacgggtcttgggtcgaagaaggttctcgtgattcggatttgagagttggggagattgaaagagaagagattggtttgtggaaggtgttgcagtgaaagtgttcgacgatattcctcagagaactcaatggatatgtcagtcttttcattctcttacattggacgagtacaaggaggacgcgtgaataataattga

SEQ ID NO: 14227 - DNA, 704 bp, Arabidopsis thaliana
acaagaatcctaaaaacccgcctagaaacttcacattatacttcaatgttttggttcacagtaagtcagtaacggatacaaactccacaactattaatcttaccacaagaatgcgtatttcatcaagaagagtatgccctctctctgcagcttgccttgcagctgtctcaacagaaatgacgagatctcccatcataagctacaagaagaacgaccataatgagtaaccattggaaccatcctgttaaaaaccagtaaatcaaaaacaaacacttactactggaagcttcagttcagggacatgttgtgacatggaaagcacatcagtagcatgatcttcacctctccactctttgttgagtttacaaataaaatcatcattacaaagcatcaccgataattcaacagtttcatacccaccaagatcttctatatcagtctctcttgttttatactttgaatctttcaaaccattgaaagccaatgtcattgccataggtacattgagacgaagcatttctgcaatattctacattgattggaatttgataagaatctaaaacaacacaactagaaatggctaattgattccaaattcgattatcaaagaatactcaaacctgaatctcgagatcatcaggaagctgttcttcgatgcagatactaacactaagctccaattcctgtttcttcttcggagctct

SEQ ID NO: 14228 - DNA, 459 bp, Arabidopsis thaliana
tcacttgaccgaagagctaatcttgttttgtgctgatccattaagtcaagcggttcatcatctgactcatccacttcaagatgactctggttccgacttttcttggatctgtaatatgtcatcaacacgtcggttaagtagatccaaaagcatagcgatacaagattagtgccaaaatgtgtatataacaaccaacctcaaagcggatgccttggattttaacaaagaggaagccttgctgcggccatgagactccgcatccatgtcgtctccgtcactgtcctcactgtccgcgtatacatcagaaaatatcttggtatcattccacctgctaaccctggaagacccaaataaaaacaatcagtacttgaccactcagaaacttctatgagaccatatgccaattgagttggtaaggtactttgatgaagtatctgttgaatgctgcgatttactgat

SEQ ID NO: 14229 - DNA, 577 bp, Arabidopsis thaliana columbia
tgacttctttgactagatcaagatctctatgaatgatccctttgctgatatcttttccggttttggctctgtgtttttttctttgacagaacggttctttaatggatgggagcttcaatgccgcaccaatgcagcttgcttggcctcagcaagccattgagaccgaacagtcctttcatcaccggcaactgcaacaaccaccaacacaacaatggccttttgacggcttgaaccagccggtatggggaagagaagaggatcaagctcatggcaatgataacagcaatttgatggcagtttctgaaaatgtaatggtggcttctgctaatttgcacccaaatcaggtcaaaatggagctgtaagttgggaaaacggtagagatcatgaatgtgtatatacatcgtataagctcgtttctctctatataaatataatcataaatatagatatctgttaagaaggtatcagtcatttgattcagagagacaacacctggtatgattgtttcttattcttgtaccagatttcgacaatgtagaatttagtaggatatgatcattttgatctcgttatatat

SEQ ID NO: 14230 - DNA, 849 bp, Arabidopsis thaliana columbia
caattagaatgtacttcactgtcaagatccaaatccatggcaaaacattctatgaaaacaagaatataaattactgaaaaccttggatagaattcagcagcgagcttttcgagttttggtttcaagtaaatacatttcctgcaccaagcagccatcctacaaaatccatgcaactaatatcttcaccaaccataaaaatacacaatcaaacacataagagagcaaagacttgagatttatcaagcaattggcaaattcaggaacaccatgagaaatccaaaaacttgggaagaatcagagtgcaagtactcttttttccaatcggattcgtgttgctactagaatcaatgaaccaatactatatcgatttgatctaaaatctcatggaattaacaaattctaacctagaaactcaccagacaataacaactgattcaccgagcttctgagcatcctccatcacttgatcgaagtggctctcaccacagataggtccgagctcgacagacaccggcgagtcatcgagctcttgcaaaccaccgtcctgcttctggatatcgactgctcggattctctccgctgccaaacagattttatcggtaaaagaatgatatttgaagtttctcggtcgagagaaagagctcgaggtttggcgatatggaggaaccaaaggtgagatctttgggtttaaagatctcaaagatgatgacagatttacaatgtctgacattctctttcagtctcagagactcaacaagattagcaaataataagtaacctccaatagtcaatcaatataccaaaacaagaatctcttaggaaaaggccccacacatgttaatggtaata

SEQ ID NO: 14231 - DNA, 794 bp, Arabidopsis thaliana
tgactctagagtgaataggatttccaaaacggaaaactgaaattgatatacagattttgtggttttgtctgatccctgttaggggagaccaataaaacagctagttatggagacagtactacctgtcatgcacccacgagtctaccctatccccaattttccaaatatgatccccaagagcagctctacgtctcttcctggttccttcatatggcaaggcagtaacagaacgagcaggtcttattttaggggcctgatcaccttcccctttgagggctacccactccttaagcttgtctgttcctgataaaagataatatcaaacgatcaaccaatcaattaataaagcaatggagcctcttcgtaggagcttcggcaatcagttctgcatccttttaaataattttacatgcatataatataataatggaaaatgggtgattgcataacctatttacttatacttggaagaatttgagcagtaaaagatctattgatgataaataagatttaaagaaaaccattgatgataaatacaaaaaccttgttctacagataggtcactgaacaacacgtaagctttatcatcctctaagctcaatacattggcagagtaccatgcggttcttaatccaggttcttctttgaaaaccttcaaaaaaatttatctccgttaaaaaaaatgacaatcaaccacgagcagttagttatagacagtgtaaatgtagcacaaacctctacatgagaaccctccttgatgtcctcattctcagttgctttgatagtctgttggg

SEQ ID NO: 14232 - DNA, 544 bp, Arabidopsis thaliana
cctgacgagcggaggcagatcggtaagtgagcatgtgagcgagagatgggatgatatagacggtgaagctaacaagaagagcaccgacagcggaattgattggaccgaaaaaggggaagataatagctaagaaccaaataggtatgaccacaggcaatctagccaaagcccttaagcaaatgctctttgtgtcatgcatcccaatcactttctcccacacaaagtacaaaggtgtacaagcgaacccgaacgttataaactgcacgaacaagaacacgttgcattaatctctcatgatcaaaatttacttaaaaaagaaagaacaaaaatgttgtatgtgtatacctgatgaatgagcatgaggataacagcggcgtcacgcacgcgttcttgggcataagagagaaagcgttggagtggtcgagaagtgcgtctccgaaagcccagtaaacggcggcacgtgacggaatcgttagcgtgaacacgtataacgtcgccatcaagtaaatgtacttaaacttctgtggtttcacatagcatgcat

SEQ ID NO: 14233 - DNA, 394 bp, Arabidopsis thaliana
cgccagtgtgctctaaagttatttattcctgcgactgggagattgaaaccggaaaacgtattctgccgccaccaccagatgtcaatattatgccgtttgaacaggccagcggtcacaccattcacacaattgcttctggccccggctttccggaagatctcattcaccaggcattattgactgcggcttattcggcgcgtgaatatttgatcatgaccacgccctactttgtgccaagcgatgatttacttcatgcgatttgcacggcggcgcacgctggggttggatgtcagtattatccttccgcgaaaaaatgactcgatgctggtcggctgggccagtcgcgcattctttacggaactgctggctgctggggttaaaatttacagtttga

SEQ ID NO: 14234 - DNA, 530 bp, Arabidopsis thaliana
ataccacttatattctgcaaaagatatcgactcagtctccttgatctatcaaacaacaacttcagtgggacaattccgagatgcttgacaaatgtgtcactcggactagaagcgttgaaactcagtaacaacagcctcactgggagacttccggacatagaagaccgcttagtactacttgacgttggccacaaccaaataagtgggaagcttccaaggtctctagtaaactgcacaaccctaaagtttctaaatgtggaaggaaaccacatcaacgacactttccctttctggctgaaggctttgacgcgtcttgaaatcattgttctgagatcaaacagattccacggtcccatttcttctcctgaggtctctctttcatttacggcactgcggataattgatatttcccgtaacagcttcaacgggagcctaccgcaaaactactttgcgaattggagtgcactttggttaatacccacaaggatatcgttggccagagtacacaggagatgacacgtctaatatga

SEQ ID NO: 14235 - DNA, 645 bp, Arabidopsis thaliana
ctaaagcaatgattattaattaaatattgctcacaattatccacaaattcctgcggactaaattcagcaataaattgatcggtaaaaaacacaaaacgcttatcatcatgaaatgtaatatggacattccatattgatttgtcgacaaaatatgactctacttcaagagacttatctttgaaactggtaggtatatggagatttacaggacctgatattgatggtaattttgttacccaactttcaaaaattttgataaaaacatcaacttcttctgaaggttttaacaatatactcttcagatcgtttatcatgtttattcttttttttcaagttctgagcatagcaagcttatcaagggtataaaattatccatctcatcaataatgccttttgtatagccatcataataaccttgaataaatttttcttctctcttttcctcaatactctgaatttttgcggtggtttcaagaaggattttttctttaagagaaactatttctttcaatccatcagaaatttttctgttaatcacaacaccatttgcaggagattttatcaagctcatctctattttgattcgcataaaatgtaattctctctagaagtgttgatgcaagtggtaacggcgattgtatgtgg

SEQ ID NO: 14236 - DNA, 513 bp, Arabidopsis thaliana
agaggaagcaccatcgtctctatgaaaccaagagtcaatgcttgagattgagcttaaccctcttttcttcttcttcttctttttcctcttctttctagtcagctcttcacaaaactcttccttccaccactctctaggctttctcttcttctctttcttcttcttcttagagactgatgatgacccatcaccattgttgatccattccttattgttgctaggtctcacgttctatatcggagataaccattgattggagatgcaccatccaaagggaaataattcctcaattccagaacatacgcacaatgactattcatcggtgcgaatatcttagagacttgacatggttgctattagccccgtgtcttggtgagctaagtgtatctgaatgtccgcaaatggaagaagtaataagcaaagataaagctatggccaagctgggtaatacgagtgagcagccctttcaaaatctaactaagctcgtcttagatggtgtactaaactggagag

SEQ ID NO: 14237 - DNA, 782 bp, Arabidopsis thaliana columbia
tggccatgttggcatattcggattacatgggactttgatgataaataatgcagtgttcttcttctgacggactttttttgaaccaacatcttgcagagctcagcttggtaaagcataccagacggctggagtgctctttgaagtgctcatggcagttaacaagagcgagaaagttgaagcagtaactcctgaggtttgtgtccaaatactattttttcagagcaaccagaacagctataaaatattgcttattcagttaattgagatgggagtttaaaacgttcccatatgtgtttctgagtagattattgcagctgctagagatgtccaagaaaagaacgaaatttatgcaccctacaacattcttcctttggattctgctggggcctcgcagtctgttatgcagcttgaggaggtatttactgtttgaataattcttccaattctttaaactaatcgctactcaattctgatatctgccttcttatacctcttacgctgtttgatgactaggtcaaagccgctgtagctgctttggggaacactcgtggattgaactggccatctgggtttgagcagcaccgaaagaaaaccggaaatctggatcttcttgactggttaagagctatgttcggattccaggcaagttggtgatcgggaaagagtaacacgaagatctgatgtattgatgttaaccagtgagacatatttcttacgtttcatttctttgatttcacagagagacaatgtcagaaacagagggaacatctggtttgtttatt

SEQ ID NO: 14238 - DNA, 780 bp, Arabidopsis thaliana
tgagcttagagaattttcttatgtagaggctgatacatgagttgttttcggtttaggccaccgacgaggctgatctttatggggcatatgatactctgagcagagttctacaggttggttaccccatctaagcttgttgcagttgctcttatactgttcactgggtggccctcatgcttatgttcgtcggtgcaggaacatggttggttttgtgcatctcattttgcagaggtgatagagatgttactcagccataaaactccagaggatgcggcttcttctagaagccgatttgcatgtctccacgtcctaatggctcatggaattcaggttaaatattttacttttgtaacttgatatcggtaaatatccattgtttgagtatatccccatgctctgttttagaaaatgtaataatgtataattcaatcttgccttatgaagacaatttctgtatttttgatgtttacattttttttgcagtcaagcaccgaggaggagaatgagaaggctttccttattctgaacgagatgatcctgacacttaaagaggtaaatatactgtttgcttcgttgctatgttagtttgttggtgcatagggaaacaatacaattactcaactacttaacattatcttgcctttgcatatacaggggaaagaagaacataggaaagcagcttgtgatacactggttatggtgtatacaccctgaaaaattcatcatctatcaccagtgatgaactttgtccaaattgattacatggtaagtcatgagatg

SEQ ID NO: 14239 - DNA, 1245 bp, Arabidopsis thaliana
agagagtagtcaaaatactcgatccacaagtaagctaatttgactatatgcattattaatcaacagtttaattatatacatattatatacaccacatatatgatacctaaaaatggcataagttgacaacgaccctcgtttgccaaattatagtataaaatcatcagggtgttaaatgagagattcccaataaactcaagaaggaacaaagcactctctttctttgaagatgatgatcacaaaaaaactatatcaatgtatgtgtttattatgcatggtgattgcattattagacgtagtgagtagtgatgatgctaaagagcaaaagatgaaggacaagattatctctttgccaggccaacctcctaacctcaacttctctcaattttctggctacgtcactgttgatcccgcggccggacgggctctcttttattggctaaccgaagctcctaggcctagcggaacgaagcccttagtcctatggctcaatggtggtccaggatgctcctctattgcttatggtgcttctgaagaagttggtccatttcgggttaatccagacggaaagactttgcgtctaaatctatatgcttggaacaaaggtattctttaaatttgatttaatttggaattcttaataacgaaacacatcagaattcttattattagtcattttgataatgtatgcagtggcaaatgtgttatttttggattcaccggcgggagttggtttctcttacacaaacacttcgtcagacgaactaaccgtgggagacaagagaacaggttttaatcagtttcactaattataattaagaaagtagttattaattacatcattaatgaatataagatattatgtggggacaaaggggaggatgcttatagattcttggtgagatggttggagaggttccctgagtataaggaacgggctttttacatcgccggcgacgagtacgctggtactttctttcttccttcattttactgttacattttatatattctttctcttctaatttactaaatctactattttttatgtaaactttgtcatgtaagattctacaaatattaagcagttgaaccaaaaggttgtggacgttgacttgatttaaatatctgatataactgtttatgcctacgacacgatatgcacttccggtccatacatgcacatatgcatcatgcatgtgcataattaaaccctataatttcgtaacttatttttttcattca

SEQ ID NO: 14240 - DNA, 1081 bp, Arabidopsis thaliana
  unsure (1)..(1081): unsure at all n locations
tagttataattatgaagtccgtagtataatttcttctaaaatacaaaaaaaacgtccattatgattagttaaaaactgaaaatagttttattttttttgttttcgtattatttgttaggttccttataaatcatagatctatttatgtttaaataacgatcctaaaagttttttctctaatgttcacaaaaatgttacaattggactaatcaggtatgagaactgcctgtcaaatgagcaaggccgagtgttagcagcaaaacttggtgtgacagatcttttctgggactgggacttgccgagaaccagagaaggattctaccggttccaaggctcggtcgcagcggccgtggtccgtggctgggcctttgcacagatcgcagacatcatctggatggaaacggcaagccctgatctcaatgaatgcacccaattcgccgaaggtatcaagtccaagacaccggaggtcatgctcgcctacaatctctcgccgtccttcaactgggacgcttccggtatgacggatcagcagatggttgagttcattccgcggattgctaggctcggatattgttggcagttcataacgcttgcgggtttccatgcggatgctcttgtggttgatacatttgcaaaggattacgctaggcgcgggatgttggcttatgtggagaggatacaaagagaagagaggacccatggggttgacactttggctcaccagaaatggtccggtgctaattactatgatcgttatcttaagaccgtccaaggtggaatctcctccactgcagccatgggaaaaggtatgttagtttatgtttttaacatttatttgctcacataaagtaactttagtgaaataatagtgtgttatgataagattctgcttataagaacaatgaaaaggagtttatatgtgacgttctttatatctttcaactataattgtttggttactanagattcgtccggttggtcgagacaagtaatagagtcatttctattacacttctattataggtaatgtaganaatataaatgcattaagtagtacgtagtgaaaaaaccaggtagaagt

SEQ ID NO: 14241 - DNA, 591 bp, Arabidopsis thaliana
gtttctcatgcatgtttaggtataggatttcacggcaaatcacccggaatcttagctctaggcatagtgagtttcacagaatatcaccggttattctgtaattagagtttgagtttaagaacggctcgataacaacctacctatatctagatctactaatcatctgttttctcagaatacactaaaccagacgttttattatcttgatttacaaccaaccaaccttctatttgcctatttactttgtttttattttgttaaactcatctagcttaatcttaccacttaggctcattgtgtgaacaaaagaactttgtgtaattcgatccttaagtactatcaatgatctcttatttgagagagtggtcttagggtaatttgacctgcatcaaccgtagttgaggcttacgaagtgtataatgacttctcttcattacatggtggcgagttggagattctcgataatgatgttgcttcggtatttgattatttagccaatttttgagccgatgagacacaaattgaactcagtacgacatgtgcaactttgtatgtggggtgtgttctaagacagaaaagtcatcacaacaa

SEQ ID NO: 14242 - DNA, 565 bp, Arabidopsis thaliana columbia
attatcgttggtatgtcacacctacatgtttagttcacacggcatgatcgtaaaatagtatatacctcggttggtgctgaatgaattatttttcttaatcgttaggattcattgatatatccctatttttaccgtttttaagtatgttttaggtataggctttagagtctaattgttatttatacagttttttcctagtctttttcaggtctttacatgttttagatgcatttgaagattatggagcattctggagtaaaacatacaatttaagctgaagaagcaatccagagacgaaaatgcacgtaggtgtcgaacgacacacccctggtgtcgtgcgacacaatacctgacggcaattgaaagacgcaacttattgttgttttgaagattttttgaattcggcccaaaactttctcctatgtttaatgaaggcccaacacgttcttaagacatatttatatagctttgaggttaatgtttagaccctaagctttgggaggctatccctttttcaattctgtactttgggagcaaaaccctatggagattccctgtagagaag

SEQ ID NO: 14243 - DNA, 531 bp, Arabidopsis thaliana
caagctctctttaacacgttttgacttgtgagacacggtatctttagcttcctccgatttacgcgcacgtgagtcgtaactctgcgacgccttatctttcgcggactctaaagtctcatcggcttttgattttgcagtctcataactttctttaattttctccttcgcactcttactctctctctctgcttcctccttcaacttctccgccttctccttagctgcactcgtcatatcgctcgccttctctttcgccgtctcaactgtctccgccaacttctctttagcatctcctgctttgcgtttagccgcttccttagcttcttttgccttctcagataccgtctctcccaagttagggctgttgatgtcttcgttcttgattccgattttctctttggcccaaccggtccaagactcatcgttttcgtctcccgacaagctatctttaacttgctttgacttgtgagacacgtcatccttaacttgaccagctgagtcgtaactctgcgaggccttgtcttttacaga

SEQ ID NO: 14244 - DNA, 478 bp, Arabidopsis thaliana
ctaaagctgccgcaaaggttttgaatttgaacgccataccttattccttcttcaattatttatgttgtgttgaacgttacttgcgagtgacagcccggacgatgcggtcgcctgcgaactgaattaaataaaccagaatgaccagcaataccagtaccgtattcatcaccgtcgcgttatagccgatgtagccatactgatagccaatctgacctaaaccaccggcaccgactgcaccacccatcgcggaataaccgaccagggtaatcagggtgatagttgccgcattcaccagacccggcagcgcttccggtaacagcaccttacggacgatctgcatcggcgtggcacccattgcgcgggaagcttcaattaacccggttgggatctccagcagagcgttctcgaccatacgggcaataaacggtgctgcacaacggttaacggaacaatcgctgcctgcaaaccaatcgatgta

SEQ ID NO: 14245 - DNA, 329 bp, Arabidopsis thaliana columbia
acgtcgcgaagtgactagcatatgctgagccatggcaatgcagcaggataccttctacttcatcttctgagacgcatctcctatagatcttatctttacagagagtgtaaagataatgctcatcccagtagtaatggtggatgtctctgaaaaacttcttcctttcataactgggtcaggttgggaggctctactccgcatgccaagtaattgacgtgatcaacataccatggagatcctccttaaacagcattcaagtggtgaaactctttcccactgtagctcccattgaatcgtctattggaatgggttcttcaattctcatcctt

SEQ ID NO: 14246 - DNA, 500 bp, Arabidopsis thaliana
ggctgtggaaagtgcctgaggtagttgctacaacaaagtctgctggatggtagcattttgagcaaacatttgattcaaagattggaacctttgtcacatatcctccattggagcagcatttggtggaggaggtggtggaaattgagaaccattatgaacataaggaggagttcttggaacaaggacatctcgaccaccaggagcagcaggagttcctggaacaggaaatctaagcggtaagctacacttccaacacgcttgtgaatcataaaaggacctataaaacgcggttttaactttcctgactgtccaaatcgaactttgcctttcataggttgaactttaatagatacttgatcgtctacctgaaattctaaatcacgccttcgacggtttcatcctatctctgatcagcctcaatttttcagtggttctaagattactcaggaccaataccagtagtttctccagcttctgcccaacataaaggtgtacgacat

SEQ ID NO: 14247 - DNA, 519 bp, Arabidopsis thaliana
ttggaagtatcaaaattttcttttattcttctctcgaaattgttaagtacaaaaagaggtaaagcaagcgacgatctggcgtttgatcatcgagcaggtccctgctcgataccgaaggtgattgaactgtcaggtgagcagctgatattcgcagatggatgatgtgatgtaagcgtctcatcatcatcaaccgtctgccacatacgccgtcaacaggtatgggaacggtgctgcgattttcacgtcgtccggggcagcagcaagaaagttccagatggacatagaagcaggacaggtatgaagaactttgggccctataaaatacaacattacttgtatgcatttgattacatgtttgatatcttcttttgttgttgttaatgtttgcccagatcggtattaatgttccaatcccggttccattaccgttcttttccttcaccgggaacaaggcctcattcgcaggagatcttaacttctatggtaaaattcttgtcacaactaaacaaaagaagatca

SEQ ID NO: 14248 - DNA, 517 bp, Arabidopsis thaliana
caatccactcgaccccctatcgagcagaaggcctcgtcactttgcaccactaactcgacacatggtcgagtatcatcgtctccaccacctgaccatcactcgatcacaccactcgaccccctagtcgagtacctccatcacatccactcgatcacttagccgattgcaccgccgagtctcaccatcatcacacactcgaccgaccactctaccaccaagtcgagtaccaccatctctatcacgcgacttcatactcgactatcagcttcagagtcatttccattccgcactcaaccaaacactcgagcacaaggaagaacagaagactccagctcatcactcgaccattcacgtcgaccactgggtcgagtgccgttcttaatctgtcccaatactgcgtcgttttgagtattagggtggtctcacaatattttgctatcagtagcatgtattctacatttttgtaaccgaagttttatccgcaaacactgtgttcttgacattttgtaactcggat

SEQ ID NO: 14249 - DNA, 805 bp, Arabidopsis thaliana columbia
caaacagaactaattcaaacgaatttgaaatcgttatgacttgatctatcaaagctaaatcatgacaaaggaagacaaaattgatagaattcaataatcagacctgaaaattgaaagagtcatttagaaatcgatcttgagctcatctttggaatcggagaaataggagaggacgtagggagcagcacggataatgacaacccagctgccaaaaagagcgacatgagtgcgtagctgcttcagagcctcggctttgtctggtttcgcatgaacattcctgggaacatggctgcgatcttcttcttcctctctgatgtgtgaatgtgattctttaaagattctaaaaccctaaccctcgattgatttgccgtctcgtttttcacaatataagtgtttttagatgtgggccgagtttttaatatgggccgttaacgaagcctttaatatgaattggtgatacacgaagccttttgtcggccgagtaaatacggagatgcttagccgagcaaaggaaagacatttaattgctaattaaaaacaaaaaatggaatgagacataattagagagaatgtatacatcccttgattagtagaaagaaagtataaattgaaattttgtctaatttggctttaattttggattttgtactttgctattcaaaattattaagggtaatttggtcttaacaatcacctaagttttatatgatccgattcaatctaaaccggtcaataaaattaatttccttcaatcgaaaccgttcaacaaagataaggaatctatgtcgtttttaaaatagaagta

SEQ ID NO: 14250 - DNA, 586 bp, Arabidopsis thaliana
aaacgtcgtcgttcaaggttgatgctaagaaaggagaatggtagcccggtctgcatcgcctgatgatctcaccgtcaggtaatgttttgcaaactacattcaatttcggtttaacacaaccggaaccaacatggtaatcgatttggttagcttaggacagtccgataccggtttagtttaagtgtataggaatttgtttgaacacaaccgtgactaatcagtttggattggttaggttagaccggacttggttgataccggtttagttaataatggtcactcactcactcttatacatattgcagtcttgccggtgacaatgggtttgacccgttgggtctagcagaggatccagagaacttgaaatggttcgtccaggcagagctggtcaacggacgatgggctatgctcggtgtcgctgggatgcttttgccggaagttttcaccaagatcggtgagttaccattaacatgaccttaaaacaatttataacttctttcaagaacttaacacattgtcaaaactgttggtaggaatcataaatgttcctgagtggtacgatgctgggaaagagcagtattttgca

SEQ ID NO: 14251 - DNA, 1150 bp, Arabidopsis thaliana
tcattgtgatgtttgggtccttacagaacaaaagctacttgtggagaggtttattttctcactattgtagatgatttctcccgagctgtttggacacacttacttctcgagaaatcgtcggtctccacagtacttaaaaactttgtggcttgggcccttcgaaattttgacaagaaggtcaagactataagaacagataatggtacggaattcatgtgtatgcgctcctattttgcagaaaatggtatcacgcaccaaacctcatgtgtagatacacctcaacaaaacggtagagttgaaagaaagcatcgacacatactaaacgttgctcgagcgcttttatttcaagctcaactaccaactcgtttttggggtgaaagcattcaagcggccactcatttgattaatagaacgccatcgattctactcaaagggaagacaccatatgaagttttgttcaaaagtctccttcatacgatgacataaagacgtttggatgtctatgctatgcaaagttagtacgacgttcgaatgataagtttgaacatcgcagtgctcgatgtgttttcctcggatatccatttggaaataaaggatggctagtaatggacttgcaaactgagaagacgtttgtgtcccgtgatgttatctttcacgaagattctttcccttacccttcaagtactcttgcgagtgaagatgatcacatgattacaaatccagtgactactagtcgacatggggagtctttgtcacctcttgaagatcaaccattcgatctagatacaagactagtcgattcagacacaggaccgatcgatcctgatacacgacagatcgatccaagctctgcagaagtcacagacacgacccgatcgatcgatccagagtccagatcgatcgatccaacacttctgcccgatgacgtagaaatcctagacacgacgcgatcgatcgatccagttacacagttagtcgaaacagaaacattaaacactgatcgatcgaacgatccggtgactcgatcgatcgatcctgttaaaccaacagcatcatcttcaaaggaaaagaaggtcgttcaaacagaaactgagactcgtactgagactgaaatagaagaacttagggttggcaaatgaaagaagatgag

SEQ ID NO: 14252 - DNA, 618 bp, Arabidopsis thaliana columbia
gcaaaaacaagatcaaactacaattaaagacaatgagaaacaggattaatcagcgtctcaacatcagatccaccgtctttaatcagatcttcaatagctgatctcaaacgattcaaaacccagaatgattcaggtttctccatggattcatcagaaatcgagaaataaacaaaggaatcatcgtcgattgcgaatgtatacgtcttcttgtgaactgtatgagaaaacattgaatgatgaggaggcgtgttctcgatgcatcgtaaagctatagcttcgattcctggctcttgccttgaaacgaactccgcgagaactacggttcctttcgcaatgcaagtgtacgataataaacttggatttgaaatcatccttttcaatggagatcgaagcgaaaaaaaagaagagatcgttttaggtttttgaaatcattagggaaatgatgcgatctcgatcgaatcagagaggagatcagaggatttctctctctttttagaaatacatgatctctttctcttgctcaatccaatctgtttcaatggagatttttatgtttctcctctttttagggtttcgaaaattctagggaaaatacagaaatggagacattattggaga

SEQ ID NO: 14253 - DNA, 724 bp, Arabidopsis thaliana columbia
tttttctccatcaatcatcacacttctttctatttatctcgtcctctcgtcgccgattatctctttaccctaatcactcgcattcccatctttaacaaaatttcttccactttctttccgaccaatatttcgtagttcgattgccatttttcctttttttgagtttacgcttcctctttccgatcacatccttgagaagaggaaaatttcgaagttatttgattcattcttccgactgagtttcccgccattattttgtttgatcggaaaattaaatggaaagagtgaatctcggaggtttaggttacgataatggcggagttatgatgactagagatcccaaacctaggctcagatggacagccgatcttcatgatcgcttcgtcgacgccgtcgctaagctcggtggcgctgacagtaagctcctctttcctcctcttcttcaattgtgataaccggtttcactttataattccggttcagtccggttaaatctacagttgatgtatctgtgtaacaacattatagctcttttactctttcttattcttcaattgagataacaggtttcacattatgattccggttcacttcggtttggttggttaagttaatgccagtgattcaattgattcttctctatgtagcttgataacttcaaatttaataggttacaaatgtaattatatctgtttgcttagtgacatttgttactggtttggtt

SEQ ID NO: 14254 - DNA, 485 bp, Arabidopsis thaliana
tcggccacattgttggtagcttcgaaatttaatctaaatgactactcgaggctttctcctgttggcgaggtgaggcggatgctacacgtgagccttgctttgatgacgagccgtctacgtgcagaagccaagttgtgtcgagtgggttttccgagcctccttggtgggtagttcgacaataaaatcggctaggacctgcgacactcggtaacaaaaaaatgccttgttctgtgtaaaaagcggttttttcttggtcttaggggttcatcatgatctggttgtaaccagcgaaacatccatgaatgacagtagcttgtttccagaagttgattccacgaggcgatcgatatgtggtaatgggaagctgtctttcgggcaagcttagttaaggtctgtgaaatctacgcagactctccatttgccgtttttcttttttactacgaccgggtttgcgatccaatcgagatatttcgcctcggtgatgg

SEQ ID NO: 14255 - DNA, 521 bp, Arabidopsis thaliana columbia
gttgcattgtgacgagtatggctaacgtttttaagtaagggtctatcatcttgcaacctagaattagctacctagacattgagcttacccgttctatattcatgcttctgtttttgaatccccaccttcaaacttaagatttttgtttgcttgagggcaagcaagagataagtttgggaaagttgataacactggaatttaccccattttaggcatgtatttatcatcatttagcttagtgatcactcattgtttcatatcattttgcatcacatttagcttattttacacacttaggcatttaggatcatcttgcatacatattgcatgtttcagtgttttcaggtgcagaaggagcttacaaggattctactcgacactctactttatccaaccaacaaggaagcagtagagaattctactcgaccagttcagtcgatcagccagccacaaaggaggcagcaattcactcgaccaacttactggatcaaggcagccttagaagcagcaacatatcgatc

SEQ ID NO: 14256 - DNA, 569 bp, Arabidopsis thaliana
aaaaaaacaacacgtaaatcaaaattacaaaacatgaacatgaaaagaaatgaagaatgaatcattcattctccaccataagatcgaagaacatgaaaagcttttaagatttattaatgttcaatcctggaaagggttctaatccaaagcagcaacgttctccaagtacatcagggaaaacatcatacgcctcatcttccatcaaatgctcgttaatatagttcaaaatatggtcgtctgtgtctttatcctccatggtaatttcttgggaatcaattgataaaggttgaggcataaccgattcaggaataacatagtcgaatttgatcatttttgaaccgtatgtaccaccattattaactgcataagctggagcttcacatgcatgttgtccgacataggtgtttctgtacactggaggattgtcttggatcttctgtacccgcttggtagcgtcgcagttttggtctttcgcataggcacatcggtagtaccactgtaaattttatctacaattagtcatcgctcaatacacactctagaaaatagctctgtatttgtgaaaagag

SEQ ID NO: 14257 - DNA, 366 bp, Arabidopsis thaliana
gtaatcgaaggataagtaggagaagagatggaggagtacctatcacagggaactgaaatagttgtgggctgtgaaggaagtgcaaaagcatctgtctatgaaacgcgatggtatcgatcgacagggggtgtggtgtcgagcgacactgaatctctgcagctctcatcaacgcgtgaattgacactgctaggattttcctgcaaacttgtctcaaccaagtacatactttcttcaggtagaaaataattgataggaatgtcatcttcaaccttgatccttgacaaatgatcagcaactccattcttaatccctttcttatctcgtactttgatgtcaaactcttgaaggaagagaatacatcgtagt

SEQ ID NO: 14258 - DNA, 678 bp, Arabidopsis thaliana
ggtgttcaatttggtattagcagcaaaccggtgagcttctccgagttgcagtagttccaagaagctttgttgatccctaatttcaaccaaagtggcacctggaagagacacatctccatttttcgggtcctcaactatagcaatgttatcattagacggatcaagaaggtcttgtacagtctccatataaagctgcaaataggagacagatatagaatccgtctccaacgaaacttcagctaaaatatcttccatagcacggaccataattccacgatcagcgacatcttcttcccccagttgcccaagtgtatatgtcttaccagtaccagtctgaccataggccataattgttccattataaccatccaaaacaccctataccaaaaaagaaagactcaaattcatagaatgttttcaacaacaataaaaaaaactggatactgatgaaggtctagtacaacttctatatacctccacaacaggtttagccacaacttcgtaaactcgcttctgagaagcatactcggtaagcacttcatcaaactcaaatgtatcagtgtcccaattatttttccggagtttcaacctcttaagctaaagaatcaaacaagaaagtcacaaaattgagctctctccacatttcaaaaaccagactttagtatatagatacactgt

SEQ ID NO: 14259 - DNA, 505 bp, Arabidopsis thaliana
atctttattgcttataacataatttatgtaaattttatctcctgttgctttatatagccaagccgcagcccataataattcatcctaatttaaaattaaaagtgtcttgttagtaacttatttacgtacgtaacataaatatatccgtagtttatcggtttaatctatgtataccggtttgatttgattttattacctggtagccggagtaggagcagtagaaagggcaagatgcttgataagaacctctgtacttatcagcaaattcaaatagctgcataaaatagataaagctacgttacatcacgattgaactaatgtaatggtttctttggacttgatgtgtaaatatactcacggtttttgcatggtttaatagtgtggatgaataagtagaatcgaccgatttgaaaacaagtgaggccgctgcaagagcggctgcggcttcacccgcggcttcagaaccaggggaagaggaagagatactgtagagagttcttgatgt

SEQ ID NO: 14260 - DNA, 552 bp, Arabidopsis thaliana
ctcagagatgatgatgattagggaatgtgaagcccaagcccaatttctaaacaccgtgtcgttttgatagctaaataacagtgagatgctgagtcgtgaaacggcacgcagtgttttgtttttttaaacattgaatttctcggcccgacattatcgtggaagtacgagattcactggatttgatggctcgtcggcctgtttctcctcctcctcgccgtcacggcagggttgagcttgacgggaacaaccgtcagagcagttggcataaattgggggacagaagcgtcgcaccctcttccgccttcaaaggttgtagagcttctgaaatcaaacggcattgtcaaagtgaagctcttcgatgccgacccaaaagttctccgagctctctctggttctaatattggtgtcactatcggaatccaaaattcgatgctcaagagcttgaatgcatccgtaaaggtagcagagagctgggtacatgacaatgtcactcgttacttcaacggtggaaacagagttcgaatcgagtatcttctttctccttctcttctg

SEQ ID NO: 14261 - DNA, 518 bp, Arabidopsis thaliana
taggttccacatatgcaagggtaattaacaacatcagcataccatgggtaatccttctcgaccgctgtgacggcgcaattctcagttggtgaccaattttttgttgattcagaagggtgtcgatcgacagttccagtgtcgatcaacaccatcgcgcaactacgaatgtcaacttcctctgaaatgtgagtgtcgatcgacatagaaggggtgtcgatcgacactgaaactcgattctgcaactcatcacatttgcagtcatcttcttcaaatgtatctatcatgtatatgttctcttcaggtaagaaatcgttaatagggacatcatcatcgatcctaatgtgtgacaaatgatgtgctacaccattctcaactcctttcttttctctaacctcgatgtcaaattcctgaagtagcaaaatccatctgaaaagtcttggcttagcatccttcttttacatcaaatacttcacggaagcatgatctgtgtacaatacccttggatccaacgagataag

SEQ ID NO: 14262 - DNA, 1779 bp, Arabidopsis thaliana
ccggcgtcgatactgctgtccactttgtcttcttgagcactggttcgatctcaatctctctctgttcatctctgttctctgttactttagtggttccaattcaagggtttggtggaattctgctgatttctgttggttttgatttgggtttgagatttaacctaataaagtttcgatctttagagacaattgggggaaaaaacgtttcaaaatggaaacttttttgtttgtaaattgctggctctgactattttgtttgctatgttatgttatctctgttttacttttagacattggtgattgaaattagaatcagtagatagaactttttgaagtctatatatacgagccagtgattttggtgaaggtaaagtgtttatgatgtcttgaaaattggcttttgtttgatgcagttctggggatatttgcttgttccagtcttcttctcctaccaactctactgcctctagccgctacagacaacaacataaagaacacaaagaatgcgacagataccacaagcaaaggaacttttagccaacttgataatctatcaatggctaacatcacagtaagtaaacacaacaataactccattctgcctattgattcattttcagtttttgatagtctaaagcaaaatgtgtatcctttcatttgaacagaaaaaaagttcgaggctgtgggcgttcctaggagctgtttactggatatctttggtcacatatttcttcttgtggaaagcttataagcatgtctcttcattgagagctcaagctctgatgtctgctgatgtaaaacccgagcaattcgctattcttgttagggatatgcctgcaccacctgacgggcagacacagaaagagtttattgattcttatttcagagaaatataccctgagacattctacagatcgcttgtcgcaacagaaaacagcaaggtatctacttgttctggcctaagaaagtcatatgttttaaggttttaggcatcataatgttaatatgttaacctttgctctttgttgtgttgtataggttaataaaatatgggaaaaattggaaggttacaagaagaagcttgcgcgagcagtaagcaatattagcagcaactaataaccgtcccacgaacaaaaccggcttctgtgggctagtcggtaaacaagtagacagcattgagtattacactgagctaatcaacgagtctgtagccaaactggaaacagagcagaaagcggttcttgctgagaagcagcaaaccgcagcagtgttttcttcacaaccagggttgctgtgcatcagcagctcagtctctgcactgccagatggttgataaatggactgtgaccgaagctcctgagccacggcagctcctatggcagaatctcaacatcaagctcttcagcagaataatccggcaatacttcatctacttctttgttgcagtgaccattctgttttacatgataccaatcgcgttcgtctctgccatcaccactcttaagaatcttcagaggattattccgttcataaagccggttgtggagataaccgccataagaaccgttttggagtctttccttcctcagattgcgctcattgttttcttggccatgttgccgaagcttctcttgtttctctccaaagccgaggggattccttcacagagccatgccattagggctgcttcagggaagtacttttacttctcggtctttaatgtcttcattggtgttacccttgctgggactttgttcaacacagtgaaggatatcgcga

SEQ ID NO: 14263 - DNA, 667 bp, Arabidopsis thaliana
tagcttcttcatagcttttgttccatgttgtctgctaaatgtgagattctattactgacttgtgagattagagttttaacttggctctgttggatgaagaaatctgattgctttaagcaagttatgggaagcttagtgaagaaattagcttcttgataggttagagatacttcgattctgttttttaattttcttcttagtttgagcttttgtggtaaactctcaaactcatattactgtgtttgggggtattagaattgagtctgttggatgaagaaagctgggattttgattacttctaatagatttagaaagctttagtgaagaactgttagcctcttgataggttatgagtttctttggacaattctagttgcttttcatttcttctcgatttgaagttttcttctattgagatattaggatcttgactttggtctgtgtggtcattgatacagaaaggaagagcttgtgcgtgtaccgttctcttctccgtagattgacttgctctaatgatggaggtcaaattatggaacgacaaacgcgaaagagagatgtatgagaattttgcagagctttttgcaatcatcaaagccacagagaagctagagaaagcttatataagagacctaatcaatccttcagagtacgaatctgaatgccagaa

SEQ ID NO: 14264 - DNA, 635 bp, Arabidopsis thaliana
gaaaacatgtgtatttaaggaataggagacgactaagaccaggacatccatacagaagaagaagaggctggtttgataacactgtagaagaagggacaacaagtagaattcaaacaggagaagagatatttgaagcattaaaggctttaaaaatgattttgggagacctttggagagaaacagtaagagaaaaagatcagacttgtgtgaagatgatgattacgatgaagacacacatcaatggagatggaagaagcgatcaattctatatgaattaccttattggaaggtaaatactatcacattttactattaacatattattaatcttgaatggtactaactacttattgtttgtgtaataggatatgcctgtccgtcacaacattgacgtgatgcatgtggagaagaatgtgtctgacgccattgtctctatgttgatgcaatctgtcaaatcaaaggatggcttgaatgcacgcaaggatttggaagacatgggaactcgtagtaacttgcaccctcagttaagagttaagaggacttacttacctcctgctgcatattggttgtctaaggatgagaaaaggagattctgcagaaggctagctagatttagagggccggatggatattgt

SEQ ID NO: 14265 - DNA, 459 bp, Arabidopsis thaliana columbia
tagagaaagaacaaacatattgtgaattaaaaagaaaaaaaaagagggacaaaagtagaaagacgtggcaaaaagcaaactaaatttcgaccaatccacatctaaaatctaaccttcttcatcagatggaaggaagctacttcaccacccgcagattctgccatgtggcttctctctcttctacagctcacttcttctctctctgtctctctctaactacattgaaaccaaaccagagtgcttcaatgtcattgctgtgattctctttaagtccagacataactcccatatcttcttcttctgtctttttttatttctttgaaccggagaagaagaagaagaaggagaaggatatatgggaggctgtacttccaaaccttcctcctccgtcaaacctaatccttacgcacccaaagacgcggttctccaaaatgacgattctaccctgctcatccggga

SEQ ID NO: 14266 - DNA, 465 bp, Arabidopsis thaliana
tagtaacgtccgccagtgtgctttaaagaatcagaaaaactgtagtttagccgatttagcccctgtacgtcccgctttgcgtgtatttcataacaccgtttccagaatagtctccgaagcgggatctggctggtggtctatagttagagagttttttgaccaaaacagcggccctttcagtaataaattaaggagacgagttcaatgtcgcaacataacgaaaagaacccacatcagcaccagtcaccactacacgattccagcgaacgacagacctggggatggactcactggcacctgaggacggctctcatcgtccagcggctgaaccaacaccgccaggtgcacaacctaccgccccagggagcctgaaagcccctgatacgcgtaacgaaaaacttaattctctggaagacgtacgcaaaggcagtgaaaattatgcgctgaccactaatcagggcgtgc

SEQ ID NO: 14267 - DNA, 422 bp, Arabidopsis thaliana
gcttaatttcaggatcttgagctgttggggattgttgtggttgttgagtgaaccctggtggtggattctgctggttctagcatccattaaattgttgtttagggatataaccttggttgtactgaacaaatggcttagactgattctgttgtggtggatacacttgatcttgggggttacttacattattgcttttgtatgagaagtttgagttgggcttgtagttattgtagcccttgttgaaccctccttggttctgaatgtagcacaaatcttcagtttgatcattccccccttcttgcatttggaagtgctcttcattagtgatgtagtgtatctgcttcttcttagtcagcaacatcaatggttggtttctagtaacaatcctaggtcaggattcaagcaacgaaaatgagaatttt

SEQ ID NO: 14268 - DNA, 499 bp, Arabidopsis thaliana columbia
ttttttttgtttcagttcgtggaaatccaatcagtattgtggcatctgcaagagtctctttgaccatgctcggtgaaatactgacctgagttataaactattacatctacaatatgtagctgacgtgatttgatgtattacgtgtgttgtgatgggcgtaacgtatgggttcatgctgggtgcgacatcattacgaatgagcgctttaaggtgcagttatacatctccgtgcttcttaacttttgattctaagtagttaggacaactgccgaatgactgacagttgtaatttggttatcgttttaaggaactggagcacaacaattactattgccctgattgtaaagtcctagagagtctcttcccagatacaacacgcagtggttgcacgcctctctggatccgtaatgccgcagccaagcgaggaagtcgcgaggacaggtctcgatgagtctacgattgagtcatacaagaaagttgagctaggggagagtaggag

SEQ ID NO: 14269 - DNA, 446 bp, Arabidopsis thaliana
taacggccgccagtgcgccagtgtgctctaaagaaaacagcttcccatgttccgttatctgccagtaatccgcacattcggtgagataaccctgggcaatcgcctcgtctaactgtgggcgaatcacatcttcgcaaagcccggtatacgcaataaactccacgcgcggcgcggcctccagcagacggaagcgattcataaagaactcaaacggcttatctgtggcttcgacatcacgctggctttccagataccttccttgcataaaaccacgcggatgacgcgttttggtggtacgcagaatgcgcccatccgggaaggtcactttgccgtgtgcgccgcagccaataccgatgtagtcaccaaagcagccagtagttgagactgtgctggcactgataaccgggtttggcgtaacggaagtgtcatattgctgataacccgct

SEQ ID NO: 14270 - DNA, 1432 bp, Arabidopsis thaliana
tctagaggactctttcaaattgtcttttgagataagtcggaatttaagttactggggtctccttttgagattttctatgtctttattacaacaaaaacaaaatagtatgcaaattttttgtttgtagcattagtaatgattaatgaaaatgtttgattgtagtacttggacgaaaacaaatcgttgattctgaagattgttgagtctcaaaactctggaaagcttagcgaatgcgccgagtaagagacaacatatctcctttatgatttcacttgtgttctgttgagtaacaagaaatgatgattaaaatggttataggaatcaagcaaggcttcaacgcaacctaatgtacctagctgcaatagcagattctcagcctcagccaccaagtgtgcatagccaggtgattgtttatacagtgaagtattccaaattttgttgtatgatcaattgagaaagtgatttgttttgtttggttattagtatggatctgctggtggtgggatgattcagggagaaggagggtcacactatttgcagcagcaacaagcgactcaacagcaacagatgactcagcagtctctaatggcggctcgatcttcaatgttgtatgctcagcaacagcagcagcagcagccttacgcgacgcttcagcatcagcaattgcaccatagccagcttggaatgagctcgagcagcggaggaggaggaagcagtggtctccatatccttcagggagaggctggtgggtttcatgattttggccgtgggaagccggaaatgggaagtggtggtggcggtgaaggcagaggaggaagttcaggggatggtggagaaaccctttacttgaaatcatcagatgatgggaattgaaagagtgtggcacaaggaatcttaatgatgaagcagcagcagcagcagaagaagtagtagtaataataggagtcttgaagttagtgtgttttggttttagttgcttgttgaagaagcaaagaactctttatttacttctttttagttttgttattctctctatgtttgttccctaaaacagtgaacctctttcgtggtagtgtaccatgtaaatctgctggctccaagttgtgtcgtaatcttaatatgttatttctctgagttagactcttttgctttaaccaggactgaagttttgtagatcattgatgttacctatttggattctaaatcgttatgtaggctatattattgttttttttttctggctgttatacataattttattttatagttgataaagtccaaccggttcagtccaagactcatatgaccagccttagtggtcctcgcaaggtcccatactgctgaagaccggaccatagccacccgaagctgcactcaaaccaaagaccatattcgggtccatttaagatatagtctcgtgaagaaaagaggg

SEQ ID NO: 14271 - DNA, 551 bp, Arabidopsis thaliana
aattaaaatagctaaaaatagataaattttttttttttattgtttgcgaaggtctttaaaggtcggtactaccgaaaatccaatccgttggataatattaaattatattctccatcttatggatgaagaagtattgtttctgatcgatctctggttaacaaaggatttattaaaagagtcggttttggggcgtccatttcagtttaggaggattcgtggattccaactcaattcccgagaccagcaaaaagtaatggctcagttattgatccatgcctaaaagttcaaagtcttattgacactcgaacaaatttctggaagattgacttattaaatgagctttttgtcccagaagatgtttcactaataagtgctctgcacttgggtgcgtcaactacggaggatactcttggttggcactttacaaagtccagaaaatattcagttaaatctggatatcatacggcaaagctagaaactttggatgtaaatgtttcctttattgggccagacatcaaagctttaaaagctttcatttggaaagtgcagtg

SEQ ID NO: 14272 - DNA, 442 bp, Arabidopsis thaliana
  unsure (1)..(442): unsure at all n locations
gactctggcgccagtgtgctttaaaggctgctcgagctgaggaagaaaaacaagaactagctgaagttgctgagttcttcaaacatggacaatgattgacacaatttcgagatggtattgcagccggtcttcttttggagggatatcgggggacaggtaagagtttcgctcataagctagtccctggagaagtaggtgtttgatctcttactatgtgacgccgcgattcccgtagacatgtttctcggagttccagatagtcgtgttagccctctttctgcggatgncaaaaaagtagcccgagntatgatctttaccgacgaaattgatcatgctcgangtgaaagtggcgttggtctgggcgcacgtaatgaggaaagtgtccaaaggttgaatcaacttcctcattgaccatggacggttttgagggaaatgaagggac

SEQ ID NO: 14273 - DNA, 387 bp, Arabidopsis thaliana
  unsure (1)..(387): unsure at all n locations
tcctcggtgttaataagaataccaaaaacaaggcattaaaatagtgaatataaaaaaaaaaaaaaaaaaaaaaaaaaaaaaaaaattaaaaaaaaaaaaaaaacaacaacaacaataatggcgtcaatagcaacccatcttgttgttgttgttacaatgttgtttgaacgccntggcctccgcggngatgcttcaagatgtttgtattgctgaattgtctaaaggtattaacctcactaacacatttagaatcaatcaatttaaccttacccgtgaaatgttttcaactctatcaaaatgttcatcgacggtaacaacattttattgttttaccttctagatcccaatttcccgatgatattatggttttccgtcctcttctagtta

SEQ ID NO: 14274 - DNA, 488 bp, Arabidopsis thaliana
tgagtcatggggcagattcttctcccagatgtgtggtttgtcgcccaaggagaatggaaacaaacggagcttgaatctgtcttcactgacaccattgatttttgttaggttgcaaagcctatcgaattcatcaaggtggtcgagtggatcctcgattggtagaccatgtaattggttcccctgaatcatcgagatgagaccactcttaatctcgaagttgttgttctcgatagcaggaggtgcaattcctttcctctgacgatggtcccttggtgcatctccatcactacgttcttaagtaagacatgcttacactatttgtgtattttaactttcttttattatttgttagcaaaaaattgttggacactgggttagacgaggttgatttctacggagttatcatgaccgaaagaaagttctgactagattcagattatggatggctgggtgatgaagtaagttattgttacaatctgtctgagttt

SEQ ID NO: 14275 - DNA, 610 bp, Arabidopsis thaliana
tcaaaattgaaccaaatacatccttagcatctcaactaaatcagattagataaaaaaaaaacctatcatggtattaagtacatgtaatctagaatctagaatgttgtgtaatcttgcggagaagtacatgttggttaggatttgattatacttgctaggcatatggatttggttagaacgatcatggcaatagactagagaatgttgggagttcctgtgttttgcttgagggcaagcaaaagctaagtctgggagagttgatataaccctatttttaccggttttaactatgatttaggtataggttttagattctatttgttatttctagagtcttactaatcaatggaaggacgtttatactctagagtcttactagttagagaagagctgaaatcgctagaggaaagagagcgatgtcgagtagatatgagttgattgatgaggacatcgagactgagtatgagccacagtcatggcgcaaggagacaaagctgctgaacaaaccgacgaggttacagtggaggagtatactgcgcaaccatcacttactaatcaatggaaggcatttctccatttgactaatgaagcctagaaatcaagggataga

SEQ ID NO: 14276 - DNA, 463 bp, Arabidopsis thaliana
cccatgattcacgaatatgcgattgtttggcttagaatggttagcgaaaatatgcatgtcttgaccgagaaaaggatcgatctaagtctaagggacaaagacgatgaaaccggtacaagagttggttagaattaaaccaaggttagaaagacttccgctgtgtaataagagagcgattatagaatttagcctcataaaggcaattctatgttgaatcgcgaaaagttaagaggttcggccacccctacagacccaaattgtgttagtaggagttccggtggttatccagtatacgatcctttcggtgaacctcttggtaatcccgatggaaaggttcgaagttatccttgggatggattggttgtcaggatatcatgcccatttggattgcgggcggacgagagtagtgttcgaactaaggaatcgaccacgactcacttactgtggaatcaaccaagtaaga

SEQ ID NO: 14277 - DNA, 568 bp, Arabidopsis thaliana columbia
tccgagttcccccttgaattttgatgtcctgtgaacaacagatctcaagcgtcccactagaaataaacgattcaaggtcagtttgatgtaagcacataatttaaattcttaaatacaagcttgaagtgtatgatgcttcgaaggaaaggttatcacattgccaaaattttctttactatgtaatagatttatcaaagagagtgatgcataaacaaagtagaaacttacttaaagcagaggccaagagcctgatcgccatcttcaaatactcgcttgaaggaatctttgaaaacagaatggccaaaactttcagacagaacaacaaggccaccagttctttcaactgcaactttcatctcagcaacaccaacctaactatatccaaaatgcaacagcggaaataattataattagatatccaataatagttgacagcacgacaagctacaacaagcaatgccttatgttgactaaagacaactactggaagaaacactgtagaggaaaacatcatcaaaaacaggaaaatgaaggggtttacgattatgcctagattcatagactattt

SEQ ID NO: 14278 - DNA, 587 bp, Arabidopsis thaliana
gctctgtcgccaggctggagtgcagtggcacgatctcggctcactgcaacctctgtctcctgggttcaggtgattctcctgcctcagcctcccaagtaactgggactacaggcacccaccaccatgcccagctaatttttgcgtttttagtagagacggggtttcactatgttggttaggatggtcttgatctcttgaccttgtgatccacccaccttggcctcccaaagtgctgggattacaggcgtgagacactgcacctggccaatgcatacattttaaatgtttaaagaaaagccttctccttgccccctaaaatcctctcatggcccacacctgggaagtgctgtcctagaggccaccaagtgtccttcaatccctgaagtctgggactgaggcataaatggaactggagggtggggtgtccaacctgtgcagacacaggcagggctgggatccgaaggtggaaagctacccgcaacacacctgctttggctccgttggtcccagggtgatggggatttgttgagaaatcacagaggatcatggggatctcacatatggcggattgtgcctgtggggatggg

SEQ ID NO: 14279 - DNA, 746 bp, Arabidopsis thaliana
gaattggagaaacggcgaggtttcggagaaggatctgtaagcggcgattcggagaatcagattctccggcgtgattaacggtggtgatgattcgttgtggatgagtgagaggagagcttcagcgatgtgagaagctgctctttgaaacggagacttgtggttactactagtgttgagatggtgattgagccgcgccaatatcccttgcgcgagaacggtgtggtcgccgttgttgtttccggtggttccgattagctccgccgcgttgaacagctgctcgatgatgactgactggtcatcgccggccattcccggcgacggaaccggaaccatagccaccgccgtggaagaagaagacgacgggaattgttgttgctggttgttgtgataaaacggaaactgaaactgatgttgacgacgaaccgggtcgtgacccggatccggatccgataaagggaaaacgggttgatgaagagatccggaattaaaccgtttagccggtggagataacggaggattatagaacaggcaatgatttgaaggattgatcaaagcttctgctggattcgtaatctcttgaaacgggaagttacacagaagattcgaattatcactcaccggagcagacacaggcccggaaccagacccgaatccgaaacccgggtcgaaaacaccgaagcagaacccgggtccatgataagtctcaagatactctgctcttgaccaggagaagaagcagagagaca

SEQ ID NO: 14280 - DNA, 558 bp, Arabidopsis thaliana columbia
ttgtaggtactttacacacatctttagccttccttccattgtctgttaatggaggctttgttccaaacttagtcttgtttgtgtgtgttctcttgtggtgaggtacttaatattttctatttgcagcttatgtaatgcaactatgacctgcgagcaggattattttgcccatgtctatgggaagaaacaccaagagaaagcaaatgaggttgctgatatggactactcgaaacaacaatctgaacatccagcagttgacaagaacaatttaacacaacaacccgacttagatatatatgtcgggttatcaaacgactatccatggttctgtaggtaggtaatcttacattgtctaggacattattgggtaaacctagctcaaaatgtattgttgtttgtgtgttctcttgcggtgagattttatgaagacatgcattaaatatgatttatttcgttccagcttgtgtgacataaacgctaccagcgagcagactttgttagcacatgccaatggcaagaaacaccgagtgacagttgaacgttttgatgctgacaaca

SEQ ID NO: 14281 - DNA, 431 bp, Arabidopsis thaliana
tagtaacgaccgccagtgtgctttaaaggtggcgtcggcgcgtataatgcgccggttatgttaacggtacgcctgttttaaggagataaagatgacggcaattgccccggttattaccattgatggcccaagcggtgcagggaaaggcaccttgtgtaaggctatggcgtaacgttgcaatggcatctgctggactcgggtgcaatttatcgcgtactggcattggcggcattacatcaccatgttgatgttgcgtcggaagatgcgctggtaccgctggcatcccatctggatgtacgttttgtgtcgaccaatggcaatctggaagtgatcctcgaaggggaagatgtcagcggcgaaattcgtactcaggaagtggcgaatcagcttcacaagtcgcggcatcccacgcgttcgtgaagcattattgc

SEQ ID NO: 14282 - DNA, 820 bp, Arabidopsis thaliana
aaaaaaaaaaaaaaaaatttgtcggcaagcttgtccttgtcgttcacttggttcttcatgttgtacacgtatgtctccagggcattcctggcgtcgatcttctcctttaccttcttgtcttcctctgcaaactcctctgcctccttcaccatccggtcaatctcttcttggctcagacgacccttctcgtttgtgatagtaatcttctctgatttaccactcgccttgtcctctgctttcacattaagaataccgttggcgtccacttcgaatgtgacctcgatttgaggggttcctctgtcaaaacgagatcaggataattattttaatgttcaaaatgagactctgatttaccattactaaggggtaaaagaagtggaagcaaaccttggggccggtgggattccattgaggtcgaatttcccgagtagcctgcagtccttggtgagacttctttcaccttcaaagacctgaatggagacggtggtctgctggtcttggtacgttgtgaaaacctgagatttcttggttggaataaccgtgtttcttgggatcaactttgtcatcactcctcctacagtctcgatacctaaagtgagtggcgcaacatcaagaagaaggatatctttggtctcatcaccgccttctccgctcaaaataccaccctgaacagcagcaccataggcaacagcctcgtcgggttcacacccttgtttggctctttaccttcaaagaagtccttcaacagttgctgaacctttgggatcctggtgcttccaccaacaaggacaatctcatcgatctggctcttctgtagacc

SEQ ID NO: 14283 - DNA, 409 bp, Arabidopsis thaliana
accattaccaaactctcgactgccgtctacattctcatactcccagtcggcctccacgaccgcaacctcctcctcctttaatctcagcgatcactcactcttatacaaacaccttctcaaattccacttcctcacatccactcacttcgaagctcttcttatctttctaaccaacctctacttcacaactcgacctcgcagaatctatctcctcgagtcgcttgttacaaaccgactcttctctaatatgccacgagaacgttaggaagttcggtgcggaatccagagaacccgctttcaaccaagatccgaacgtccggtcttggacaaagacttattccggagctctcttacgtgtgcagctaatccttgtatgtctgtagcacaggaagaatgcgagacggttatg

SEQ ID NO: 14284 - DNA, 517 bp, Arabidopsis thaliana
atgccgttgacggaacaaaagacgatagagaaagaaggaggagatgatgattccgaaaatggaaagaaagttaaaaagagtggactcatcgtgtcacaactttcctttttgacgatatgtatctttctcatttcaatcaccgaaaggcaaaatctacaacgtgatccgataaatttcaacgtccttaacatcactctcgaagttatcaggtatgtttctatatctcaagattctttaaccaaaaccaaataaaaaaattgtttcagcaatatataaatctctatattacatatcatgcatccataataactaaaaatttcaaaatattttcaaacaaaatacgtcatctaggtgatacattattctacaatttgacaacccaagtattcgtaattcacctaacaaaaaaagaggacgtgaataaaatcgtataagaaacatatatacagtaaaatctctataaattaataatgttgggactgcaaaattttattaatttagagagattttttactta

SEQ ID NO: 14285 - DNA, 573 bp, Arabidopsis thaliana
ggtactgttggaggaattattattaacataattgtatgactaatcattaattcttttataatatgattcgaatcttaaccgtagaatgtaattgcatcttacaagctaagtgtctaaagtcttttggacgagggggatatcccaaaaatgagaaatctatttaagaagaagaagacttccttcattattttctcacatcaaacaaaatctttgaaatatttcaatcttatatatatggctccattgttacatagggtttccaactatggttgtggtaagcgtgtaactgtacgcttctgtgatgacaagatctatgataccaaggatggagagtctaggacaattaatgaagagattaatagtggtccatatacgaagatttatagagactttccagatgaagatcaaggttatctgctgaattatgacggttataatctcatgcttaatgataatcgtggtaagaataaaggtatcgaagattatcttgttcatatatggacagcgtacgacgatattaatatagatatagtttatgatgaaatgaagatatggtgcgaaattgatgattta

SEQ ID NO: 14286 - DNA, 549 bp, Arabidopsis thaliana
tagtaacgtccgccagtgtgctctaaagacgcgtctcgcttttgccgggttgaaatataaagatttgggttctttcgattatggtcgtaacctgggggcgttgtatgacgtggaagcctggaccgatatgttcccggaatttggtggcgattcctcggcgcagaccgacaactttatgaccaaacgcgccaggatatggcgacgtatcggaacaccgacttcttcggcgttatcgatggcctgaacttaaccctgcaatatcaagggaaaaacgaaaaccgcgacgttaaaaagcaaaacggcgatggcttcggcacgtcattgacatatgactttggcggcacggatttcgccattagtggggcctataccaactcagatcgcaccaacgagcagaacctgcaaagccgtggcacaggcaagcgtgcagaagcatgggcaacaggtctgaaatacgatgccaataatatttatctggcaactttctattctgaaacacgcaaaatgacgccaataactggcggctttgcaataagacacagaactttg

SEQ ID NO: 14287 - DNA, 546 bp, Arabidopsis thaliana
ccgtgaaccccctattaagtggctaaaggatgtcgatgtcgtatatgctccgatgaactggaatcatgaacattgggttgctttgggaatcaacctcaaagaacggcgaataactgtgtatgacgctttaatatcgcacacgcgtgagtcggttgtgaagtcgagaatgactcatatttgtaaaatgatgttgttcttagttagagcggtgtgccaggatgtattgacttctgcgtactcagttgaactttttgagtatgaacgttgtttcaccgttgctcaaaccccaaatactggagattgcgggtcatacacgatgaagttcttggagttgctcgtgtttggaaaccctttttcagacctgttcaacattcgggaaacagacatggtcttctaccgttagaaatactcggtggatatctacgagcacggaaagcgcgaggagggtactgtgcatttattataatcgcctgtctataataatatgtcctgacacttattattttgaacaaacctatcttagattgcaactacatttaagtttgg

SEQ ID NO: 14288 - DNA, 500 bp, Arabidopsis thaliana
gtatatacgtttaggataaatgaatatatgtagttttacatactgatatggatataaaacaaaattttcaattgctacttttgcaaagaaaaactagctcggaagataaatcccaaatgatagcatgggtggattaaagcaaaataatttttttcctaggttgatgtgttaaacaaggaacaaaaaaagagagcatgaatactatttctgaaagattgttttgtctaaatggatgtacagtataaaacttagtgtgaatatgtcagttgatcataccataagtcacttccacagtgcatcgatgcgaaatcaatggcatcgatattgtgattagctatgaaatcagctccaactgtgttggctgaaagtggatttagtgaattctttctttcaggagatgagtcaccatagaaaccttcatgaccagtagagaggagatggtttggatcaactgattttacaaaaagagccatttcattaatccaagccataagggtttt

SEQ ID NO: 14289 - DNA, 471 bp, Arabidopsis thaliana
tgacagagaggtatgagctggtagatgaagatgtggaagacgagtatatgcctaagcatactcgcagaccaccgaacttctgcacaaaccttatatattgcctgctgaggagtatatcaggctcttcatgctgaatgagttctggagcacaagatatccttgctcgactacgctggcacagcttggattactggaggatgttcaacacctgtacaagagttgtcacctggacacactgatggcttacccatatgtagcctatgaggaagaaactattaagttcctctccacacttcaagtggagctttaccaaggtatgacctctgatgattaggaatgcgaaggattggaattcttgcgattctctgtgtaaggtcaggattataggcgctatcaatcaaacgcttggaaggattgtttggtttcccaagtggaacgggtactacgcccagattatgacagagagagttg

SEQ ID NO: 14290 - DNA, 857 bp, Arabidopsis thaliana
gctatgaaatcagctccaactgtgttggctgaaactggatttagtgaattctttctttcaggagatgagtcaccatagaaaccttcatgaccagtagagaggagatggtttggatcaactgattttacaaaaagagccatttcattaatccaagccataagggtttttccacttctatccacaccgcatcgtggctcgttcataagctgccaagccatactggctggttcatctttgtatgcaactttagtaaatgtattcactctgttcaacatagtctacaaatagagataaagatatcatgggatatataaagggataaattatggtgtaaaatttatttttgttacgaatcttgagagattaaagaagatatatataaattttggttaatatgtatttttttttaccttgacgtggttcttgtagaaatctttaataactgggtttctgtagaaatcgtcattggaagataccatttcgcctttacttctagcccaatccacgtattgttttttccctccgtagtcatcccaattattgacaagggggattatcaattttataccgattctttttgcttcggctatcacaaaatccaaacccttgaaaaaaagaagacaaactaattaacaaaaagtaacatatatttaggttgaaaaggcttcacacttacctgaaacgtttgttcatcgtaggaaccaggggctgtttggagagcgcggtatatggcgccatcgcggaacccccaggtgcgggcgatggtcaaaccgagactagttgcgttttgaaacacattagtgatcttaaatcttgtggtcggatcggtagcttcgtacgcgagccagtaagcattg

SEQ ID NO: 14291 - DNA, 491 bp, Arabidopsis thaliana
ggttatagtttctcggcttctccagttattattggctatagatatagggagtttcgcggcacgccaccggttattccataattagagtttgagtttaagaatggttcaataacaatctagctttcattagatctactaaccaatagtttcctgagaataccctattcctagctctttattaaaatcgtttacaaccaaatcaatctcctgtctttttactttgttctcttttattctcactattactctgctagcttaatctcaacatttaactcattgtttgaacaaaagaactccgtgaattcgatcctaaaatactataattgatctcttatttgagagagtagttctaggtaatttgaaccatatcatctttgttgaggaagtcccgttggaagcggtatcaagaagcatcctaatcttatgaagaacacctctgtagagactgctgagaagtgaagcttttttgaacccgtgatgagggcaatttg

SEQ ID NO: 14292 - DNA, 601 bp, Arabidopsis thaliana
gatattttgttatctgaacaattccatctacgtttagtctctttcttttgctttggctaatggcaatgacactgattccacagcttcccgaaagtcttgattgatggtccatatggtgcaccagcacaagactacaagaagtacgaggtggttctactagttggtctcgggattggagccacaccaatgatcagtatcgtcaaagacattgttaataacatcaaggccaaggaacaagcccaactaaaccgaatggagaatggaacaagcgaaccacaacgaagtaagaaagagagtttcaggacccgtagagcttacttctattgggttacgcgtgacaaggctctttcgattggttcaagaacataatgaacgaagtcgcggaacgagatgccaaccgcgtcatcgaaatgcataactattgtacaagtgtctatgatgaaggtgacgctcgttccgcacttatacatatgcttcaatcactaaaccatgcaaagaacggcgtcgacattgtctctggaacaagagttatgcccatgtcgctaacctaattggagaatgtttcaagcgtatagtatggatcatcctacacacagttggt

SEQ ID NO: 14293 - DNA, 593 bp, Arabidopsis thaliana
cgccttccaaggtagtgtgtaaatagatcgactatgtgcagtagcatgtttcgatcgacactggtgttggtatcgatcgatactcactcctgcaagataatgaggaaacaagcgctcgagagtctcgatgcttggttacctgtgaacacttttaaaaaattctaaagaaataatcgaaggaacagtaggagaagagatagaggagtacatatcactgggaactgaagcagttgtgggctgtggaggaggtggagaagcatctgaatgtgaaacgcgatggtgtcgatcaacagggggtatggtgtcgatcgacactgcttctctacatctctcatctatgactgagttgtaacaagctttttagtcggctctggagttgaaatcggagcagccttaggaggtttgtccttgtttattgcaatgttactaataggcaatgtagattccgaaccatccatgccaaactccatctccacatcgcatatgttgagagatatcattcccttcttcacatcaatcctacctccaagtttaggtaggaaagctctatcaaggataagaggaccttgggttcttccttatatgccaagaca

SEQ ID NO: 14294 - DNA, 573 bp, Arabidopsis thaliana columbia
ctttacatgtttgggatgcatttggagattatggagcattctggagcaaaacagacaacttaagttgcagaagtagttcgcagaccaaaatccgggtaggtatcgaacacaccacccctggtgtcgagcgacactaatacctaacggcaattcgaagacgcaactaattgatgttttgaagatttctaaattcagctcagaactttctctattgtttaatgaaggcccaacacgtttttaagacatatatatagtttttaggtcaatgtttagacccaaagcttggagaggctaatctcttttttctcttttgtactttgggagcaaaatcatgtggagatctttcttactcttttctcttgttattttcatcattgatttcttattcagactatgatttgtgtttctttgatcatgtttgagtaatcacttgttaggtttagggtcctctttagggatttagatgatttactagattgccccttgctaggtttctgtaggattcttcatcttgattggtcttaatgcgtagtctagagtagctacgaaaacttgatattagataataggtat

SEQ ID NO: 14295 - DNA, 549 bp, Arabidopsis thaliana columbia
gcgtttgtgtctatgctccgagtgatcaattggtcgagtagatgtttcttcctctcctatctgtatgctcagatgtctggttgagtggagaatgaggaggatccgaagacgctttgatagctcaacaagtcttgtagagttggtcacccttggtcgagtaaatgggtcgagtagaggatcaagtaggaggggcgagtagatcaatctgctgctttatttgagcctgccttgatcgagtaagagggtctagtgaattgcagcctcctctgtagctgcctggatcgagtgaatggatcgagtagaatcctttttaactccttctgcacctgaaaacacaccaaaacatgcaatgcgtatgcaagatgatcctagatgcctaagtatgcaaaataagctaaaatggtgcaaaatgatatgatacaataagcaaatgcacagataaatgatgctaaacatatacctaaaatgagtaaaatacattgttatcagcagcttttactctttgcggcctcatggttcctcctcatcttcatcagatttaggcagcat

SEQ ID NO: 14296 - DNA, 575 bp, Arabidopsis thaliana
tagtaacgtccgccagtgtgctctaaagataaaacttaatcaccaaatgttgctaaatattaagctgattgttctggtcatgttggagtagcacaaatttctctgctgcaaatagctgtttgaagtttttttaatctttgtttgtggattctcaccgttggtgtaaatcccggttggctgtattgacgttttcacattctgttgacagattgtaggtcacgaggggcattttatggaggatccgcactgttacactgatgttaattagtacggcatccccacctcataacgttgacccgaccgggcaaaaaacaaaaaaggtcaggcagcgacaacccactgcaaagggttaaaacaacaaacatcacaattggagcagaataatgcgtatttccttgaaaaagtcagggatgctgaagcttggtctcagcctggtggctatgaccgtcgcagcaagtgttcaggctaaaactctggtttattgctcagaaggatctccggaagggtttaaccgcagctgtttcctccggcacacctatgacgctcttccgtccgctttataaccgctggttgaa

SEQ ID NO: 14297 - DNA, 584 bp, Arabidopsis thaliana
tagtaacgtccgccagtgtgctttaaagtatttgcgtgataaaaagctatttggcgggaattatttccctgctgcgggtagtgatatttttgaaaataacaccctcagaaattccagtcttcatcttctgtttcaaccgctttccccatcacataagaggagcctgaaccggaaaagaaatcgtgattttcatcggcattcggcgaaacgcggcgaggattgccggattcacttccgccatttctgcgggaaataacggttcgtagcccagattcatcaaagccttattggcgttgtaacagagaaacgctttcacatcgtcagcccacggggtttcggcgtacagctcatcggtgtattgcaactcgttgtcgtagagttccagcaacaaatcgaaggcgaaactcttcaactcttcacgttgtcccagagatatcttttccatgtttttctgatatttatagcctatgtagtaaccgtggactgcttcatcgcggataatcagacggatcaggtccgcggtattggtcagctttcgcggctggaaaaatacatcggcagccagaaacaggagatagacaaaa

SEQ ID NO: 14298 - DNA, 1220 bp, Arabidopsis thaliana
tgacggttttttcgtttcatgtttgcatatggaaaaagcgggtctgtctcaaggtggtaagggatcaaagtgcaaaaatactttttaaaaagaggaaattttgggagaaagactagcacggtcttcagggctattttacacgggaaggtgcctaaagaagtcaatatatcatccacagcagaagtaaagtgattgagttcagtgctaatgaacaattttgcaccttacagggagttcctctgtgtcgttacgaggaccatatgttccagtatccagagcaacattggagggaatctcctagttcattgtttggtaactcataagccatttcaacatcagtttctcgaagatgctcactcacatgtactgtgattaggctgcttaattgataaccataaaatatgtaaccacattaaaaaaaaaaaacatacttggggagaaatcttgaccagactcctgagctgcttcaaaccagttgtaagagaaagtaaaaaaagattggaaaaagactagataaattggaaattcaaaaaagctgggatcccgatcttttatatatcaaccttgttgtgaatttgcttcaagaggtgaaagatgattctggagattcgagattctagattgagcagaagaaactcaagacattaccacaaaaagtgctttgatttggttcctggaaatcttaaactcggcgttgtcatctgcacaaacttccaatagaacatccatcatgtctctatcctctccattgttgggattttcttcgtgttccttaataattttctccagcaattcatcgtacctctgcgagacctccatgatttccttcccaaacaaagagatcccgaccagcttggaaaattgaccaacaatgctagctatgaggaacttcttcgtcaaactaagtgatttggtcaccaaacccctgacttgctctgcttcaccgttctcctctgaacagctcctccccattgtcatcctgcaaatgctgttgttcgttagcttcatcatctctttaccaacgtcaacagtctcattctttgccgccttatcaaacaacatagcacggaaagtttggagttctttcccacggaggagccgtgtctgctcgagggaatgagacccgagaagttttttgactaagagcttcttcatgaatctccagtaatctccataaggaactgagacaaagccaaaagatccaaaaagtaatgattttt

SEQ ID NO: 14299 - DNA, 476 bp, Arabidopsis thaliana
tattttaagaatctcgggatggttaatgagttcggccattatccactgtattgtttgtgctgaagtatcagtgcctccaaggaaaagctcctacaaccacatgcacgatataaagacattgcatgatccttatgcgacagtcattgaagaaaaccaagaaagaaactcaagacattaccacaataagcgctttgatttggttcctggtaatcttaacctcagccttgtcgtctgcacaaacttccaacagaacatccatcatgtctctatcctctttcttgttcggatcctcttcgtgttctttaataattttttccagcaattcatcgtacctctgcgagacctccatgatttccttctcaaacagagagatccaaacttcttgagaagtcgaccaaccgtgttagctataaggaccttcttcaccaaactaaatgatttgatcaccaagtcttcgactttctctgcttcactgt

SEQ ID NO: 14300 - DNA, 611 bp, Arabidopsis thaliana
gggttattgaacggtcccagttatatacttgctacaaaagagaagctaacatcagaaatgaaaccatacacaaaacaagcataaacatcaaaagagcacaaaacttaccgcaaacgtttcataccatcgatcgattgtagcctttgatgtttgtgaccaattggcatgaggttctttaaaatctctttcaaagatgctgcggactgttgctgcaactgcagcgtcatcgtcaaacctacaagaagaccaaccagcccacacataaggatttctatatctttaaacttctaagacatcacaatgctaagtacaaccaagcgtgtctatttgtccattacgctctaaggcactacaacctaaggcactacaacctaattccattacgctctaaggcactacaaagttctaaggcactacaacctaagctgttctatgacaatgaatttaaccttaccagagagttccagaggacgctttgggtctagccttgtcaagccagcacgaccaggactatcaagaagcttctccagtgtgagattgttgagcagctcagcttgagaatcagaatgattgacagaaggctgagtggttagcgtggagcgatggtggat

SEQ ID NO: 14301 - DNA, 452 bp, Arabidopsis thaliana columbia
gtgtgctctaaagggtgacaatgcgctcaggcttaccgaaatcttcttcccacggctgttcgaagccaggaattcgcaggttggaaacggagaaaccaaccagacccgctttcggctttgcgccgcgcccggtggcaccttcatcgcggatttcaccgccggaaccggtcgccgcgcccggccacggagaaatcgccgtcgggtggttgtgagtctcgactttcatcagaatatgcgccggttcctgatggaaatcgtagcggcccgtttcgtggtcagcaaagtagcggcccacttcagaaccttccattacggcggcgttatctttataagcagatagaacgtgatctggcgtggtttcgtcagtatttaggatcatcttgaacagcgatttcggctgctgttcaccatcgataacccagtcggcgttaaaaatctttgttcggcagtgc

SEQ ID NO: 14302 - DNA, 558 bp, Arabidopsis thaliana columbia
ctgaaaattttaaattttggaagctaaacaaaaggaaaattaaataagaaatgtaactaaataaaattataaacaggtggatgggaaaaatgttgggaagaagagataacaccatgggaccaagggagagccacacctctcattgttcatcttgtcgacacttcctcactcccacttggccgtgctctggtccccggctgtggtggagtcagtcttcttctagcttacctctctctctatctttccatttggttatatatatatggtttgaattctatttttaaaatgaaaattttaatatagaaaaatatattcttaacaatttcagatttttgtgataaaaaccgaatctagtttgaattagtatgatacggttttggactcaacatcttttttttttatgaagacgcaatataacttcatttacatttcttaaaggaagtttaattttggtgtagtttttcttcatttattttggttgctcttcagttttgttattggttttttaagatgtgaatgtaaaaatattatttgtaattagaaaaaaaaaactattta

SEQ ID NO: 14303 - DNA, 582 bp, Arabidopsis thaliana columbia
cctttaatctgcagataaaaaccaaataaacttttaacagagattatatgtggtgattacgcacaaaaaagagcctggtaaatacctgcagcccgggaatgatgcctcgtgcagcatcaaagcaagcaccagagatccgtccatgctcactgagttcaggtcttggagcttcacctagtctaccctcaggatcagacccaatcacattgaaatatctgaagaaaaccaatttgaagacagaatgaactcaacttcagggcaagagaaaacaaacacagaggtcacacacacacacacataacagaattaactaacaaccttaggatcataactgccataatagaattcttggagaaatccaagatgatatcttctgccatctttttagcctttccatatggattgattggaacctgtggagtttcctctgttattggcattttctcaggctctccataagtagcacatgtgcttgaatatatcaaagtcttcacaccatgagcagccattgtctctaaaactaccaatgtgttcgatgtgatattgtgataatacttgcaaatgacagaacacaaaatatta

SEQ ID NO: 14304 - DNA, 554 bp, Arabidopsis thaliana columbia
atgattcattgggcaaaagagaaccagacaaattttcttgagactctgagtgaaaagcccatcctatcatactagagtcaatatcaagctcttccagagatgctgttttaccagaacttcgagctaagaatagctgtttaaacctaagtgtgacccaaaatctacacagcagaaagaacacaaaattccatgaataccaagcagcataaagtatcattcaagaagcaaagcgaaaaactgcccccagtactacaatactctcagatcaatatttggtaactaatgtgaacataagaagccgcaaaccagctagatttttttttttctttctttttttgaacaagggagcaatgtggccttgctaattaaacataaatgtgatctttcagtctttacaggttaaaggaaaatacgaacatgctcaatggaacatatttcatggaaaacaccatatttcattggtatttcgtaaactagaattaaaaaagtttgaagaactatcgtaccttctcccaggttcatcaagacttgcatagacagacgtagaatgtggg

SEQ ID NO: 14305 - DNA, 660 bp, Arabidopsis thaliana
tgaaaaacttgcagaaacaaactgtgtaaacgtttggtagtgatataggaagcgtcggtttttggttttggttatgggtagggataagtacggactatttaaactcgagctaagccattttgaaaactatgtgtaaggactggttagtttacaatatcactgtagctttgaactttataagtagtaatctagccttttgtaagttcaattctcagtttatgaatttgttacattgaccgaaaacagtttgatgacaagataaaccaaactgaataacaatagataaatccatggatcataaaacagaaattattctactacaccaaactttttatgtcgcaatagttttctattaacattcttcttcttgagtagatccaccggggagagcttcgaattagacggctctgcggaaaacaaacaagaacaatcaaatcaagttttgtgtccatgtaacgataaagcacaaatctaaaccaagaactcacagtttattaggccaagctaattgtcaggatcctgctgctcaggtcctggttgttgccacattggctgacccatatacgggttcggcggataccgcccgggttaccataaccattcccgggttccaattggagctgtccaggaggcaagtatcatacggataaccgcagctgt

SEQ ID NO: 14306 - DNA, 612 bp, Arabidopsis thaliana columbia
taataaattcaactacttctgggccatcatcatcaatcttgttcgtcttccttttgatcttatcaaactacagtcaaatcactcagagaaagctactaggtctctcctcgacatttgctttcaattcgatccagtaattttcttctcatcggagagagaaaaaaaaaatggaagacccgttgattggtagagatagtcttggtggtggtggtacggatcgggttcgtcgatcagaagctatcacgcatggtactccgtttcagaaagcagctgcactcgttgatctggttctcttattctcttacaccctaattttgaattcgttttcctctttgacttttcaaaaagtttctatacatggatcacatcgcctccaagagagattctatgtattttatcagttcattaagtcagtgtttttgttaagctgagaagatgaatcgtttcttcttctgagtgatttcttcgtataaggattagtcaatgcttttgtgtgtatacctcacgaaattagcattgtttgaaaattgggaatggagatatctgttgtttcattgtctctaaagtcttatgtcaagaggattgatggattgactatgatttgtggtatgt

SEQ ID NO: 14307 - DNA, 621 bp, Arabidopsis thaliana columbia
ggggatctctatgacgcgcgcagtgtgctgtaaagggggcttcgtaactgagcgtcaccttgcggcagtttggaggcaaatggtcggtgattgggttcttgatgactttgagaagcttctcttgcgagttagtggaacggatggagagtcggtgcaaaagctgaaccatgagaccggcgacgcttgaaagttcgaggaatgcgaaccgaggggttgacctcaattaaaagcctttgcagtgtgaatgtagatttgcagcttgccagctttgttgacgggagagtcaagaagagtgagaagacactgtatcagacgaggatggtcagcgatcaagtgttatcagaatgtcttcgctagagataagatggtccaacctgatgagtgatgtcgggacgcgcctcgctaatgtcccggttcattttgcgcatgacgccaatatgttcatcgctgtttagcaaagagtatttctcgtcgcgagcagtaccattgcgtccaccgtgagaagctttaaacgtctccaagctggcgtgtgacagaaccacaatcaaccgctgcgtctccttatcattgggagcgatgggaacatgttgctcagcgacaagttgtggcaattcgggtgga

SEQ ID NO: 14308 - DNA, 538 bp, Arabidopsis thaliana
cagggaaaaaaaatttacgagaaaaaattttggcgggaaaatttttttttggcgggaatttttttttttggcaggaaaaaaggtttggcggaaattttttttggcgggaaaaataaaatttggcgccaaaaatttggcccaaaagatttggcgggaaacttccagtttctaatttcatgttcttattagatgagggtaatttggtcattctgttcaagagaagagatattttttaaaatgatcaatataaaagggtattgttgcaaaagggtagtaaaaaaatgatagttttgcaaatctccccttaataaaatgatatcaagatataatattaacagggtagaggaatttataccgaacagttggcatccaaatctttcgaactaccaagcttcaggggaatcaactgacgaggagcgtcttcaacaacttcttcatccatcaacggaccttcttgaattgctggggctgcttgcaaaacaacaagctgaagagcgtataacagaccttgaacagcaacacaagtagtagcaagttg

SEQ ID NO: 14309 - DNA, 587 bp, Arabidopsis thaliana
ttcattccgcactcaaccagacactcgagcacaaggaagaaaaaaagactccagctattcactcgaccacccactcgaccacatgggtcgagtacagttcttaatccgtcccaatactgcgttgttttaagtattagggtttcggaacatttggctataagtatcatgtacttcacattttcgcagacaagttcttatctagttttattccgcagaccttgtgttctagaccttttgtaatctggatttctctttatctattcagtattcagtattcatcttttgttcttgagttcgtttactgttgttcattctgttatcatcctactgttacactgttgttatcatgttttcaacttgttcaacgtttacgcttactgttatgatgtctgagtagtgaataggtttctgaggatgggttaaagtagtgtagaattctcagtatgctaggtgattgagtattggttgatagatccttctgaattagttgttgttatgcctattgctttctgatcaactgaaatttgacccagacattccgcgccaaaaggtgtcgatgaatgttgaccactaattcagagatcgtg

SEQ ID NO: 14310 - DNA, 357 bp, Arabidopsis thaliana columbia
gtctctggtttaaacttgtgattttcacgccaaaaacgtaaacctgtgattttcccgctaaaaacgtaaacctgtaattttatcgccgagaacgtaaatccgtaaaaagtggaattcgtaaatattttaagtttgatgataatggattaataattattaataatgataattatttattattgtattgtgataatgattaggtgaatcattagttatatgagttaacccatttgacaactcaaggcatcagattaactgagttatgagttgaacctacacatttgaagataatgagttgggtcaatcataactcgtttagtcctaaactcatttgaatatgagttgagttgagttggg

SEQ ID NO: 14311 - DNA, 581 bp, Arabidopsis thaliana
ctctagtaacggccgccagagatttggagtatggaaagcaaaatggaggattttggatcgtaagcatccaaaatatgtttgacaaagtgaattaagcttgtaacaacgacgatggcagtacactacttcataagggattcacattggaaagatcatgatttttacaatggcaatgcacaaaagaatataagaagaagaaaaagaagaacgaatgaaccgaccggtgatagagcgatggaagctttgcatgacaacaacacaaacgaatgtaataaaggtcgtttattatataagtttttttagtgacttggtgtagtacttttaattattagtttactatttttgttttaattaagctcatgatgtatcacaaaattttattgttataattacataattagttaaaagcactcaccaaaaaaagttttaaaatattattactagctaaacaaaaaatgttatgcatgtaatatatttaaattactttttttattcaaaataaatttatatagcaccataagacctaaggtacaattgatgcagcggcgacgaaacgaacacagacacgtgcaaaaatgtta

SEQ ID NO: 14312 - DNA, 526 bp, Arabidopsis thaliana
gaatttaattgtcatccaatatcttgagtgtaaacagcgtttcctttgtcgtctagcttgaataccattaaagcttttgttttcagtttcgacatacctctccagacggccttcctataccacttaaccaaaaatgtttcaccggtggttcttgactccaccaagtgttcgcttttgtagcacgaatccatcagctcttgtttggtctttgtcagcttgggaaggtttttgaaccgcaatctttgaaacggtttttgattgtgtgtgtggagatcccatgatccaatgatatggcctccagatccgagtatgcgaaacatctcatctttcttcgaaaacatgacacgagaggagtagaagcaagggtttgcgattctgatgttgatcacttggagttactttgagcaggtctgcaaaagctgagttgaggtcccaagaacttgacagcacaacacattcctcatcctcaggagaagatgaggacaatgacacattggtaacgatttgagtttggcaatgaggcaga

SEQ ID NO: 14313 - DNA, 685 bp, Arabidopsis thaliana
tgtgtttttaattttattagttaaggatacaaatatctgtataacagctataaagtgtgttaaacatgaacaagaaaataaaggtgctttcataattaagaaaattttattttactgcctctattgacctaagtttgcaaaaatataggtctcactcacctaagttttgcagatgacatcatggttctctctgatggtaaaattcggtcaattgatggagtggtccgagttttcaatgactttgctctgtggtcaggactcagaataagtatggagaagtcgactctgtttttagcgggcacgtctgcaacagctcaccaaacgatcacctctacatacccgttttcagtgggaacattacctgtaaggtatcttggacttccccttgttaataaacgtctatctgcagctgattaccttcctctccttgaaaagataagacaacgaattggctcttggacagcaagatttctctcttttgctggtagattgaatctaataagttcagtactctggagtatttgtaacttttggatggcagcgtttagacttcctcgcggttgtattcgtgaagtggataaaatttgttctgcatttctttggtctgggcaggaaatgaaaacaacgatagcaaaggtgtcatggcaagagatttgtaagcttaagcatgaaggtggtttgggct

SEQ ID NO: 14314 - DNA, 608 bp, Arabidopsis thaliana
ggtgcgatgaaagctgcgaattgaaaaataaaagttggtcagataagacaagaaataaaataaagttcatatgcatgacctaacatctaccgggcttagtagtccacttcgaggggagcaagtccggaagatttccaatcgaagtagggctctttttgactaaaaaccacgggtgatgctcgttctcgtctttgttagggaggtgcgagatgaggtttctgttggcgttcggataagccgagaagtatccgactttcttcgaagatctcctcacattaagaagttcattcagttcgggaaccccgatgacatacccggcttccgccgcgatagtaataatccccagaatagtccagaggagattgggggttagttggggcaaagcgatttcaagggctgccaggtatcgaacgagggcttcgggaagaggaaaagtcaagccgcaacccttgaaatagatctcatacacgcagaagaacccagggcggtggtcctcggtgattcggtaggctccggtgtctgcaagtccttcattacttcagccggaatccgacagagctctccaatcgattaagagattggagtgtgcatgtggattgatagtgggg

SEQ ID NO: 14315 - DNA, 395 bp, Arabidopsis thaliana
aaaaaaaataaaaaagtctataaaaatacctcaagtataaaaagaaaaattgcccatcaagaatggaaatatggagatgcctgcagacttcgtaatgctaaacacggatgaagaacctaaacatcccttgaacttaggaaggccctttttgactactgctggtgcaatcatcgatgttctgcacggaaagcttgatcataatctagcgtagaattttgaaatgcagtttgatctcgatgatgtttagtcgatgcccactgtagaagaacagaccttctatgtttcggcagtgggtcggctcgctggtgaactgcagtggtacttgacgaagcaaatactctagatctgatttgacctagagtggtacagttaggtatttccctagtgatactttg

SEQ ID NO: 14316 - DNA, 506 bp, Arabidopsis thaliana
cgagtactaccacaaccacctacttgaccaatcactctaccacgttgtcgagtcccttgtcatcagccactcgattgtccactctgtcaccaagtcgagtctcaccatcatccaccactcgaccaatcactcgaccaatcactcgaccacctgggtcgagtagagttcttaatccatcccaatatgatgtcgtcccaatacagttcttaattcggcccaataagtagcatgtattttacattttcgaagacaaagttttattccgcaaactctgtgtgttcttgacattttgtaatccggatttctattaatctattcagtatttgcttttcatttcttttactaagttgttcatcctgttatcatcttgctattactttgttgctatcatgttttcattcttatcgtcgtttatgctttttgcaatgatgtctgagtagtgagtaggtttctgaggatgagttagagtagtttagaattctcattatgctaggtggttgagtttg

SEQ ID NO: 14317 - DNA, 587 bp, Arabidopsis thaliana columbia
ctctatccccctgacaaattttctgtcacttcatcaaacctcttgtacatccactctcgattaaaaccaccactattggtataattatagtttcccgccattataagaccaataataaaactaatatttatttttttcgttttttttccaaaaacgttttttcttttagatatattgtttgtgttgtgaatgaattttgtgtacgtgaaattttcattatatagacaatttttaagtgactaaaacgcgactatattaagtagtcgtctaaaatcggttcaccaacttacaaaacgctaaacatgtgctttttaattgaaacttacgtctattttgcgactatggttaatgacacgccgtaatagtcgtaaaatagtcgcttttttgcgactactacggcgggtcgtacttgtagtcgctgtttagcgactaatatacgactaactttggcgattactaaggcgtctcgtttgataatatcaaacagccaaattagtcatagattagtcgctaattagcgactactaaggcgtctcgtttgtgtagtgaatttagcgactaatgagcaactgtaaacgtattagtta

SEQ ID NO: 14318 - DNA, 543 bp, Arabidopsis thaliana columbia
ggctcatctaagatagttccagtaatagatacctatggtgggcatacgtattatcctaaaatcaagttctagttagttactctaaaactagcattaagaacaatctaagatgaagaattctaaaaatattatcctaacagggttttcgatctactaattcatccaaatccctaaacccaacaatagaactactcaagcatgatcatagaagaacaaatcttgattgaataaaaaatcaatgtaagaaacaataagagaatagagtttagaaagatcttctctaaagggagtctccacaaggtttttctcccaagtacagaataaataataagagttaggtctaaacaatgacctttaaaactatatatatatgacctaaaacgtgcagggacttctttacaaataggagaaagttatgcgccaaatttggaaatcttcaaaacatcaataagttgcgcaattgaattggttttaggtattggtgtcgctcgacacctgggggttgtgacgatcgacacctacgtcaatttttgtctccggatt

SEQ ID NO: 14319 - DNA, 531 bp, Arabidopsis thaliana
gcttcttattgttttttatgatggtgtaaaacgggtatttgtattacagactgtggggaaggaacactgttcttaatgatgctattagaagaaacatacctcttattactgatcgtccaaccatcatcatgggtgctgatgtgactcacccacagcctggagaggactcaagtccttctattgctgccgtaagtatatcttatttgacttgtatctcattatactactgtttcatcataaaaggtaattctcttatttcaactacaggttgtggcctctatggactggcctgagataaacaaataccgaggattggtttctgctcaagctcatagggaagaaattattcaggacctgtataagctggttcaggatccacaacgtgggctagtccactctggtttgataaggtaagagcagaacatctacaacttcttgtgttctttgattgtcacaagaataaatataatggacagtgtttgtgattgcagggaacatttcatagcattcaggagagctacaggccagata

SEQ ID NO: 14320 - DNA, 590 bp, Arabidopsis thaliana
tccgtttaaaaaaaaaaaaatcttacttgaggtttgttgagcttcttgaatcaatggcttcaggtttgtcgtccatttattaaatttatcagctattatctcttcaagtattagttttacctattatttccctcgttcctgaactccaaataaagacgggttagacttttcccccagtaatctctttgtctcttaccctctcttctattatttcattttatttagacacagggtctcactctgttgcccaggctggagtgcagtggtgcaccatcatagctcactgcagcctcaacctcctggcctcaagagactctcccatttcggcctccctagtagttgggactactcaaaggcacaggccacaccactccgagctaattttatttttttttttgagatggagtctccaggccgcagtgcagtggcgctatttcagctcactgcaacctccggcctccccggttcaagcgattctcctgcctcagcctcccgagtagctgggactacaggcgcccgcaccacgcccagctaatttttttttttttgtatttttagtagagacggggtttcgcggtgttagcgaggat

SEQ ID NO: 14321 - DNA, 575 bp, Arabidopsis thaliana
gttttgaaataaaaattccgtgatgctacaacaaaaaatgaattcccgattattttctaccattcacgtcattcataagaaataaatgaaaaacagttctgctatatatgtacacatgctaaaaatataataaaaataaaacatcattaatctttgtaaaactattttcgaagcattttatgttatcttgcaaaaaaaaattcaactgttttttgctctttcatttcatccaacatactagctatatatcacatatatgatattttcttggcaacagggtgttggaggagcaatcggttaccatgcgacttggctcataaactcggcatgccatatttggggttcgcgagcatggaacactaaggacacctctcgtaacatttggtacttaatttatagacctttaaaccttaaccgaatctgataaagcttcatcaaaattagtattaagtgaatgtggaatggtgcaggtggctagggcattcacgatgggagagagctggcacaacaaccgccatgcctttgaggcgtcggctaggcacgggctggaatggtatcaggtagacttaacgtgg

SEQ ID NO: 14322 - DNA, 555 bp, Arabidopsis thaliana
cttacaaaaaccgaaaaatcttcactgctggcgaatttcatagcccaaacagctttagcaacgaaatcaacacggcgttgatctttataagctttcaattgcatttcatctgataccttttcacggatcttgcttccgactttcaaaatccaccattcgttttccacatctccgttctcatcgtcgtcttcatcatcttcatctcctttgttagtcttgacgaaacaataagcagtcagtttctcagctgtgacccatttggctttgggagtgttgccattgatgtagcggaaaagccgagctgagttctgagtagacggggctgattgcgtcaatgggtatttcagcttcagggcttggagttttgcctcaacgtcgtcgagtgatgatgaaggagatttaggccggagacgacgaccaccggaggaagatatacctaacgtatcatcccgcgagtcctgaaacgtctcttcctcttcctctccctctcttccttcttcatattcttcatattcatcttcatcggaggaacagatctctagatcttcatgactg

SEQ ID NO: 14323 - DNA, 968 bp, Arabidopsis thaliana
ccaagtcaaaaccattaaaagatgaggaatagtttggaaaggtggtagaataccttgggccacctcgacgtggaatgtgaaaccagaagccccagctttagccatctgtgcaacgtaatccatggggttcgtcaccataaggtggcaatcaagatatgcactatgatgaaggaaaatggataaagttttttagtttcagacatcacttaacttgaacatgatgcaaagccaaagagaataagcaaaggagagcgttacttagtgtgctttcgcaaactctcgatgacaggagcaccaatcgtaagattagggacaaaatgcctgcgggagaacacagagttattataccaaactatcttgaaacaaaaatgttacaagctgggtttggatgctaataagaatccacaggtaaggcagcaaattttacccgtcctgcaaatggaataacaaatgaattataagcatcttatataagtagagagaagaacaaaataaggtccttgtatgattgtatcgttgtaagagcagatacaagtttctttgccatcatgaaaagatgaaattgaataacatgttagtaaattgtaacgtaatatacacaagactcgatagtaaaacaacaacaacaacaacaagtgtagtttccattttgttaaaagaaatcatgattcccgcaagaccaaaataacgagccttgtgtaggatgatttcacgaattgtgtacgatgcaagttttggactcgaattcagagattgatgctacctatcgaaaaatcacccccagagtaaagaataaaaggtgggtaccataatatccatgtgaagccagttgggcccaaatcgatcatccgattggcctccgcgctagatttgcgaagtctgatgacagcatcgacggtgctattttcggcgacaccatcttcttctgcggactttggggactgaccgatgatggatggatagttgga

SEQ ID NO: 14324 - DNA, 482 bp, Arabidopsis thaliana columbia
caacttctttcaacatgggactagtctcttccctcgcgaacaatcaacgggattttctccatcataccttcccgtctcgtcaagaaccaaacgagacttgattttgcagagtctaaagttgctagacaaacccgtgttttgcctcatgaagacaagcttccccgttttgcataccttgtttccgggtctaaaggggatgtagaaaagctttggagaacacttagagcagtgtaccatccaagaaaccagtatgttgttcacttggatcttgaatcacctgtgaatgagagattagagctggcctctcggattaataacgatcctatgtactctaaaaccgggaatgtatatatgataaccaaggctaaccttgtgacatataaaggaccaacgaatggtggcaaatactcttcacgcttgtgctgttcttctcaagagaaatgcgaactgggattggtgtattaccttagtgcttcagatta

SEQ ID NO: 14325 - DNA, 525 bp, Arabidopsis thaliana columbia
tagaggatccccttgcaggtcatctataattactcaagatgtgaacgattacccgtattccgtaacttatcttccttgcatgctgacttcgacgactacaggtgggaaatgttgccagtctttctggagagcggccgaaactgaaatctctctctgtggtgaggatttattactgaaaccataaacttactctcttcttaatgcaaatactgaaagtatcacatactcaacttgtttcgtacacttggtcttacttgcagggatttagtaaaactccaggggaggagccaattagtattttacctggacctcagtgcaacctaccagctctcgagtttgttgacatactaaagccaatggtagagaaggaaacagaattgaaactaatgagttactttctggagaagtcaacaatcctcaagaaactaacactacgcttgggtgatttcagaggaaatgaagaatctgccttgctcaagaaactccttaccattccaagactctctagctcatgccaagttgtag

SEQ ID NO: 14326 - DNA, 611 bp, Arabidopsis thaliana columbia
tatgccgctttcccatagcctttgtcggcatattctcctgaacccatttgagccaccgtattcacgctcgacaggtttcggtataatacttcgcctccccattcaactgccgtcgcataatctgataaggtcgtgaaaattacggccggccagtatccaatgggcactaaatttgggcccagagccagccaccaatgtcctgaaaacagatcctgcaatttttagttatttgttagcaaacatatggaaaataagaacaaattaaataagtgttttataccttccagatctgaagtgtcatgtcaaactgggtgcctccatatgtcgaggtgcgaccaatggcagctccgatggcgatggtactgctagtctgcacaaatccaggaaggtcgaggccataacacccggtcttgttatatccatccgcctgcaaggataacttagtctaataaacatgtaataataggtctgttaaactacattatattcactatgatttaacctttaccgtaacagtgagagcaaaatataggctatggccaaactataatttaatatcctggtttatactgggctgggctgtttaatatatgctatggcgcgaccaattt

SEQ ID NO: 14327 - DNA, 568 bp, Arabidopsis thaliana columbia
tcataggttccttcagcagcgttcttcaagaaagcaacacctacaaaaaaatggccacaacattgtttataaaaactgatctcaaaagagagagatgaaagcagagagcattgtgtaccatcgccaatgatgaggttgacacgaggatcctcgtatccaactgctacattagggaaatactgcttagccacctgaagaaagatcccataaggtggaagaaaacatattaaacttaagtaaaggttcatcacaatgcacttgcaagatgcataataataaatgaaagaaatctgacaagtactcacatcaaccaccattttatctatttcacaaatgtcaatctgctcaacagaactatgacgtgccacttccctcaggactcctccatctcctcctccaatcaccagtacctgcagaagaaacatttccataagaaacccacttggttactttacagttataccatccaatagcaagagggaaaagactcaaaacacttcaattatagacctttctcaaacacaaactcaaaactaaaactcccttaaaggatcatcgttttgatgta

SEQ ID NO: 14328 - DNA, 594 bp, Arabidopsis thaliana
ttattttatgccaccctgaatgctcttgcatacttttacatggtacgacctgcgataattcaccattttttctccttttcctcttcagtattattttctgctcagtttttacttgttttttttccatcattaggtatgttcatggggaggttacaccttcattatcaatctgataccaatgcacgtgcttttgtgcattgtaactgggcgatactctccccgactgtacattgcctatgctcctttggtaagaatcttcttccttctggagacagataaaaattattataacaacctataccagtagttgtatatatcacgtaggatgctgaaagatagctaaaattacataatactgaaagttattgacaccaggtttgctcatgcgtatgcaggttgtgttaggcacgttgttagcggcattggtgcctgttgttggtttcaatgcggttttgacttctgaacattttgcctcgtttttggtgagtttttctcaattattctcaattattttgttatgtatgctcttcatttagtgcttagtttattgaatcggattttgcgtgttgactgaccatggattagtcttttggt

SEQ ID NO: 14329 - DNA, 502 bp, Arabidopsis thaliana columbia
aaagatgctctttccatataaacattgatatttgtgtatataatacatgtaagtacgtgattgtgagggagtactctaataagacgacctctgtcaataactctcttcccctctcttctctcctctggttcagtggttctctcacaatgatggacgcatacaacaatccctcggcggtggagtcgggtgacgccgccgtgaaaagcgtcgacgacgatggtcgagagaagagaacgggaacattttggacggcgagtgcgcacataatcacggcggtcataggctcaggggtgctgtcgttggcttgggctatagcacagcttggttgggtggcaggaaccacagttttggtcgctttcgccatcattacttactacacgtccacctgtctcgccgactgttaccgttcgccggactccatcaccggaacacgcaactataattacatgggcgtcgtccgatcttaccttggtatggattcatataacaaattcattttgtg

SEQ ID NO: 14330 - DNA, 493 bp, Arabidopsis thaliana
tcctctagcgccagtgtgctctaaaggctgatcaagcaagtatccacaaacagttttggaggatcaatatgggccttagaaatgaattaagatcatacttcactagagaatgtgcactcaaagaatgtgttgcgaggtttcatcgttaaatttgcattaaaggtaaggaacttgaagatcccatagcaaaattccatctctttggtgaagtcgttgtctagttgtcaccgaagctataaaggcatacttggaaatccttcatttgaaccaaattatttgctgccaggctgccagcagtgcctgtcttgtgaaaaatgaggctcaaaataactttttttttatgggtttatagaagaattttttttttttgagaccaaatcttaaaatgttatgaaaatgaaacctatgtattcaatagaaaatagataaaaattaaaaattgagactaaatctaaaaaatttagaaaatgaggcaacaaatatttttgaggta

SEQ ID NO: 14331 - DNA, 528 bp, Arabidopsis thaliana
tgcagctgtgattgcatggatgcatggtaatttctctttctcgaaaagacggcatgcgcttctatttgcatccacatttacaacatgcaaagatgttccataagttacttgtacgcgaaaagcatcaatcgtttgtacatccataagtcttgacacatgcttattagacagaaggaaaaaaaaacaaagacgttatggctgagttattcttattatgtcttgtttatcattatttgaggactgagttatacacatagttacagctgagttacctgtaacagtttctcaataccatgtgggaggtgagtttgctccgtgctcgcatcatctctccgttcagcaaaccatcttgtcatcatctatcttatcgcttctaacggttgaactatgggaagatttatggctttagaaggtgttgtgttcattgattccgctatatacgtagtcattaaatagtatctatcaccgggaaaatgacacacgcccacatttgaacaccgctctttggaggtatgcatgtagttaagg

SEQ ID NO: 14332 - DNA, 1120 bp, Arabidopsis thaliana columbia
ctaaacctataagaacttctatccttttggatcacgtgtcgcgaacagtgcttaatgactgtgccggttgactctgcaacccttgattgtgcggaatcggttgcctgattctatgcctggctttgacacttgaaggattagcaacacgggtagatgatgaacaaggccggatctcaacatggtttttccgaagcaaagtgtttttgggtacccgtaaaatacttggagtaggttttgaagatggtgcggtaggcatgtatcctgtcctgaagtattcacgttgattcttccatatcttctctttatcattagcatgacaatgatctatggaggagacagcgatacaccagtatggacacggagcacggatgtcacacacataacaatgacacttgaaagagaaaccaaatgaaaaggatcagccaggaaaagaatccattaacgctccgtgtagaattagagaatatttagatacttaccatgtcacagtacttctcatgtgatgttgagttgaacgcatacttagcacacgaatgtcgcggatgagggaaatctctacatgctatctacaaaacaaaaaaaatgctttttcatattaggaaaacttaagtgaacaacacttgtataaagatggaacacaccaaagaaaaaaagttcatcaatgttacaccgattaaattacaataacacaaaacagttcaataactatccattcctaaaacagttccatcaccaaagaaaaaaagttcatcaatgttacaacgattactttacaataacacaaaacagttcaataactatccattcctaaaacagttcctcagagctaaacaacactaacgcatacataatctgaaatgagaaactctgcctttcacaccaattcgaatgaagaaaacgaaagagaacttagaaatgagaagggttcagtgaaaacatacctcacccttttgacccactacaagcacatcatcatcatcgtcgtcgtcaactgaagtagtctccctcgtcttgtcgggatcacagtccaaaatcacacagtcgtcatcatcttccaaagcttgattcgacgagtttggcttccgatactgagaatttcaccacctctaacctcagaaag

SEQ ID NO: 14333 - DNA, 428 bp, Arabidopsis thaliana
agaatgaagtataaaatcaacttggcaaatcaattaaagctcttcgatcagatcgtggagtagaatatttgagccaagtctgtagtgatcatcagagagtgtggaatggtttcagagctcactcctccgggaacaccgccattgaatagtgtgtccgaaaggataaatcgaactttattggagatggtttgatctacgatgagtcacacagatgttccaccatccttttggggctatgctctagagacgtctgcgtgtatgctgaacagtctgtccgtcaaaatcagttgagatgataccgtatgaggtgtggatcggaaaggtcctaatttgacttttctgaagattttggcgcgtgaagcatgtgtcaggtgattgattactgatatgcttggatcgccagctgataagtgatacttcgtaagtta

SEQ ID NO: 14334 - DNA, 655 bp, Arabidopsis thaliana columbia
ccgattcagcattcgaagtggacgcttcatttttgtcgtctaccttgggttcattcttgacacaattcgaggggtcgatgtcctcttcttcgtcgtcctcctcgctatcggatgggaccacctcaacatgagcattcacgagaccgagaacttgaccacgagcgcggaggtacatccaaagcatagtcgggatcttggcaacgcagtcgaagttcctcaactcccattgaaagggatcactctccatttccctcaccttcctctccactcgagcgattcgggcctcgagcgtttgccttttgaggcccagacgttgcctctcatcgcacaagcggcgatgtttgtcgacaacctaacatggaaaccggtaaatatataaaaaaaagatgaagaatcgtaatagagggaagaagaatgaatcccgaccttgtccatatagtcgtacgcctcctttttatctttcggaggaaagtggaaagcggtgtgtggaaagagaacgccggcaagttcgaaatcatcgccggacagaaacaatggactgccagggtcgagaggacagacagtggaggctccttcgttttccatctcgtggtgtttacaagtaaattctagaacatacttgggggaaatcggtgatagataacttttattatag

SEQ ID NO: 14335 - DNA, 522 bp, Arabidopsis thaliana
ttttaacaaagcttgcccgaaagacagcttcccattaccgctcatcgatcgcctcgtagaatcaacttctggaaacaagttgctatcattcatggacgctttcgccggttacaaccagatcatgatgaaccccgaggatcaagaaaaaaccgcattctacacggaacaaggcatcttttgctaccgatcggactcaaaaacgctggggcaacttatcaacgcttcgtcaacaaaatcttcgcattacagatcaagaagacaatagaagtttacatgctggtgaaatccatggcagaggaagaacacgtgtcccatttgcgcgaatgtttccagcagctaaacctctacaacgtcaaactcaatccagccaagtgccgcttcagggtaagatccggagaattcctcgggtacctagtcacgcaccgcggcgatcgaggcgaatccgaagcaaatcgaggcattattaggaatggcatcacctcagaacaagcgagaagtacagcgcctaaccgaaagagttgc

SEQ ID NO: 14336 - DNA, 531 bp, Arabidopsis thaliana columbia
ggatcatataatttttgaagaagataatatatcacattattaaaaaagtgaaaaaatttcgttacttaggtagaaaattgacgaaatttaacaagacgtcgacaaatatctagtaacatacaataatatgaacgaattgaaaataggtgtattaaaaacgaaacaaagaaagaaaaaaaagaaaatgaggtgtattatttgttttgttttgattggcttaatttttattgatgtgctggaaaaaaacattttaatattattatttttttttccacaattattatttatattaagttatcgggaaaagactctgcgctaaagaaagccattcaagaaccgatatgcttatatggaaaaatgctattttgaacccgggcttttttagctaaacaatctgctcgagtattagaactacgaggaaaatatataatatggaaagaatgatttttcgaaccctactttgtatattacattttaatattattattttccgaaattgtgggcttctgcggctaatgatttaaatgacgt

SEQ ID NO: 14337 - DNA, 558 bp, Arabidopsis thaliana
  unsure (1)..(558): unsure at all n locations
ctccttcggattctgtattgacttcccaggaagtcctgtaactttaggtgcagaggtagatgctgattggccttctaagtattgactttggtatttaatgcctccactttggcattcaggtcattgtagctgcagtacagcttatagtgcaattcagataatttcttagcaatttccatggagctagatgcgtgtccctgtagcagctgttgtaccatatgtttcatttcagcatcaggagcagcaggacctttgttttgcggaggtgcaaacccaggtggtggttgttgctggtagttccccaaaaattgctgtttgggaacgaaaccgtggttgtaaggaacaaaaggtttgttctgaccttgttgttgctgtggaggatacacatgatcctgaggattagcaacgttggtgttggggtaggagagcttaggatttttggttttgaagttgttgtatcctttgtagccaccttggttgttattgttgtagcagacttcttccaacatggttaccctcccatcttggacttgaaacctgtncgcatcaacaaggaag

SEQ ID NO: 14338 - DNA, 568 bp, Arabidopsis thaliana
gccagtgtgctttaaaggctgatcaagcaaggtttggtgacgcctaaggtcttgctttagagcctcatttatgtcttttggcggaacttgttcatttccacccacccaaagagccaggcttggattgtttctcagaagtttgacagtatcacgagcacataagaggaataattcatggtctagtggtccattcggatttgatactggaacacctcttccatcaacatcgccagtgatccaaaactcttgccacacctgagaataaataaggtatacttcagaaatggcaatgaattttggaagaagggtgatagcgaataacttaagattcataccaacaagccgtagatatcacaaaagtgataaaactctggcctttcagccaacccaccgccccagcaacggatcatgttcatgttcatatctgcatggaattttatgtcggttctgtaacgttctttagagagacgtaacagtccatctgatagtatccaattgccaccacggatgaagatcggctctccgttgatcttgaacagcctggaaaattaacaaaacaagttgtaga

SEQ ID NO: 14339 - DNA, 491 bp, Arabidopsis thaliana
aattgtcagccgtgtttttgaaggagtattccattcttattgataaaagcatttcggacaccgatctttggaatttgtcacaagggccgagtgaatcactttggactttcatcaccaagttcaagaatgtactttcaaaactcgcaaggatttcacaacagtcagctttgtctgccctacggaaaggtttgaggcacgattcaagattcaaagaggatttaatacttcacaagtcggacataattcatgatgctcttttccgagtaaacaattggatggaagtagaagatgaaaaagaaagctttgcaaaaaggaataggccagcaaaaccagcggtcgacgtccctaccaagagaagtttgggtcgcaacctttcaacaataatgtcgggaaagaaaaattaaacacttgggtccgggacaaaactctgtactgcgacatacataggataaccggacatctaaccaaagattgtagtgtcgttaaaaggc

SEQ ID NO: 14340 - DNA, 541 bp, Arabidopsis thaliana columbia
  unsure (1)..(541): unsure at all n locations
cccatgttggaacttagataaggggagaggaacatattctttttatcacattggtctcaatatcaggtatcaacaaggagtcaagatttatgaatactaactacttgaagaggtaaaaggaagagcagtgagattagctccagccttagtggctgagttggaaactaggatatccttaagtctgttggtttgccatctagattttccaatagtcagattgactcgaacaagacaaatatagatcatgattcctaactaaactaaacaaaacgttttttttaaaaaaatttagaaaaggaaataagagaaataaccaaatgaactgcaaaatgaaaaatgataagaaacaaaaataaaagccatattagtatgaaccccccccccccagacttaaacgacattgtcccagtggcattcaaatccagagaaagaggggaaaatgaaacaaaaataaaagagcataaaagaaagtgaaaagataaatcanaccagtgggttgcctccactaagcgctcgttttgagtcaatagcttgacttggt

SEQ ID NO: 14341 - DNA, 956 bp, Arabidopsis thaliana
  unsure (1)..(956): unsure at all n locations
gatcataaccaccaaaatatgattcagtacactaattcttctaatacttcatcatcctcgtcttcattctcttcttcatcttctcaaccatcaaaaaggctgcgtcctgatcctttagtctctactaatcccggcctaaacccgatccccgattcttcgatggattttcaaatgttctctctttacaacaatagccttgagaatgacaataaccagtttggtttctctgttcctttgtcctcatcatcctcgtctaacgaggtgtgtaatcccaaccacatccttgagtacatctccgagaattcggacacaagaaataccaataagaaagacattgatgctatgagttatagttcattgcttatgggagatcttgagataagatcgagttctttccctttaggactagacaatagcgtcctagagcttccttcaaaccaaagaccgacccattcgttcagttctagtcctattattgacaatggtgtccatcttgagccaccttctggcaatagtggactacttgatgccctcttggaggagtctcaagccttgtctcgaggcggactcttcaaggacgttagggtttcctccagtgacctatgtgaggttcaagataaaagggtgaagatggactttgagaatcttttaatagatcatctaaactcttctaatcattcatcattgggtaagcacataaaatttcccatcattttcatttataaaattctttttgttataaccgatgattttaattaatttactcaaaagtagtatggatctttggtagtatcgaagatatctactggatcttagggctaattgactctttcattttaaatagtgtttaatagtacataactttgggttcaatgcacaggagcaaaccctaatattcacaacaagtacaatgagccacaatggtanaagtacggtggatgatgatgatgaattat

SEQ ID NO: 14342 - DNA, 688 bp, Arabidopsis thaliana
aatctaatattaaattatattcaaagaaaaataaacttttatacatgtaaatgcaaaagacttttcttaaaaattaaaagagatattatcgatggtgttatcttgtcaaagcaaaccacgtttggatcccgcctttgtatttctcacaactccctctccttgttgtccttaactggtttctaatgtttttgtctatcaaattgtactttttcgattgcttatgttcatataaacacacttctctccacgtcgcaaggtttgagcctgaacgtctgcgatatgttgttcatcttgtcgaacatagagccgctttggaagctcgcagtcactgctttgaaacccctctccgcgttgtttaagtaactagagttgtatgactcagctgcttttgaattgtggagccgatattgaggctcagaatgaagttggacatacttctctaagaattgctcttcaaaaatgaaaatctcgatctttcaagtaaatttgtttatcttttaaactttgttgtgagtctttgtaaatgaaaaataacatgtttatgtcctcttgattgcagcttcttcttgaaagaggtgtcaatctgaatgcttttaatttttatttgcataaagcttttaagaaaccatctttataaatatagcccaaaggtatgttattatcaaatggtgttggtgacatgttgatg

SEQ ID NO: 14343 - DNA, 632 bp, Arabidopsis thaliana
taacggccgccagtgtgctctaaagtacaagcacggccaaggctgctccgataacagggcctacaacaggaatccaagcgtaagaccagtctccgtctcccttgtttggaattggcaagatgctgtgcatgatacgaggtccaaggtcacgagctgggttcaaggcataacctgttgtcccacctagtgatagaccgataccgacaatcaaagttcccactgcaaaggttccgatacctgcctgaaaatcgtaaagacccaaagcaaagattgtcaacaccaaaacaaaggttccaaggatttcgctaatcaagtttgatacagtatccttgatggctggtccagtactgaaggttgccaggatattgcctgcattttcttctgcctcatagtgaggtttgaattgcaaccaaaccaaaatctgacccagcatggcccctgcgaactgggctaagatataaggcaaaacggaagcccaaggcaaacctaccttttaaggccacacctgatggtcacagcctgggtttaaatgagctggactgagcttgccagatacaaagactgcaacgcaactgcaatccccaacccatagtaatccaatccacctgagctattgccttggttttaggaga

SEQ ID NO: 14344 - DNA, 953 bp, Arabidopsis thaliana
tcacatagagacttgaactgtgttatcgagattcttctagtaacaaaatcatcttcaggctcgtcgtctatctccatggaagattcagtctcggatgcaacaatttgaaaaacagacctcaccatgttcttcaacagagtgattgaaacaaccgtgttcatcaccagaagtggtagtactccttctgacgctgttggaaaatgcgagagacccatttttttataactaagattatattcacagagatagaaactgagagtctttgaaagttttgagacacgaaaaatccttagaagagaagaaatagagaggaagtatagccgccactcatgttccggtgggcgattgggtttattaagcagcggtggtctaaacacgtgtcaccaagagagaggttatcgttagagactcatctcccacaatttgattgtgactcaataataggttggttcgtcttttataaccagaaaatttaaaataaaacaaaaactctgttttttttttttttctgtggtctgttttgttgttagacttctgacacgtattgtgatcagccaaccaagttgtgcgttgtggagagctccttgttctcccgaggtcgattcttgatcgacacgtggaagactcaacgtttcacagttgcatgccacgtcactagaccagacatgctgacacatgaaaaattggacaaatctttgtcaaagttcacacacctgttctgtttcagctcctcacaatctttttgtgattaaaatcattcacagtcctgtttctattattcaatggaatctgatcgttgtgcggatcaaagagattggtatctctataacctataagatctatatgtaaatgttatatagcaccttaaaatatcctggctacaactagtattggtaaggtactaatgagaagttgttgaattggatgggcttcaacttgtaacgatctgaaat

SEQ ID NO: 14345 - DNA, 548 bp, Arabidopsis thaliana columbia
  unsure (1)..(548): unsure at all n locations
nnnnnnnnnnnnnnnnnnnnnnctaaaggcagaatgcagccgttttcaccgctgccgacaatggtgttataggacggatagcgcgcaccgtggcggttaaattcgtggtgaatttcgccttccagatggtactcgaacattcccggacggcatttttccatcgcccgtgtatgtgccatggcggtgatttctcccgcgcggcggagtacggcaatctcttctggcgatttgaacaggcgcatttcatgaacaacaggacgccagtcgatcatcgttgccggtgcggtgagattttgccgcgaacctttacgcagtttttccagcgcactgttcacgattacatcagcatatgcatattcgccctgggcatggtaaaccacatccaggccgttaagtagttgataaagttgctgattgatttcgctgaatgccagtgcgcggtcaacgcccagtttctctggcgcggcatcctggcctaagcgacggccaaaccagatctccgccgtcaggtcgcgaacgcggttaaacagaacgctgtggttatgagt

SEQ ID NO: 14346 - DNA, 783 bp, Arabidopsis thaliana
tggcaaccaaaatttacaagcagtctatggcagagaactactttgcagagaattttattctgatgggtctaaaacgaggctaaagatgaaagactcggcttgagaggcaaaaatcaatgctaaagaaaatatctcaactttgaagaggaatcaattcattaaatgaaagtctctggggaaaacctgaggtaatgggtacttccatgtgttaagagcagttagtccaatagtattggaacttccaccatgataagcatttctcaaggaaatcatctcaaggctaccagtgtaaagcctagccatcatcattgctagctcattagcttctgagccagaattcacaaagtacacaacctgcatccaaatcatagagcatgctgattcctcgataaaccaacaagagaaacctaactacatcattcagacttgtttgtttaaaactctcaagtaccttaagatttccgggcatcttggcagccaatgcttcagcaaaatcaccaatggcatgatgcaggtaaatagtagtcgcgtgctgaagtagcttgctctgttccgtaatcgcattaagaatatccggatggcagtgaccgcacgacacagtgactattccagcaaaggcatccagatatcgcctaccactctcatcatacaagtactgcatcttcccttcaacgatgttaagctgcaacataacatcaacactgaataatcagagatccatggatcatcaagctggcttctaagtccacaaatcctcttagtcttcgggagctaatgaatcga

SEQ ID NO: 14347 - DNA, 530 bp, Arabidopsis thaliana columbia
tctccaaacagataggcgattcgcgtcctgttctcgccttcaccacatgcaaactcgtctccaaactcgccgccgcgtcgaattttaatctcccggtggttctcatggacgactaccacgttccttcgcaaagttacggtgaccgcgtgaaactagtcgggaggttagagacgatgattgaaacagaaccgagtgagtcacgagttaagcaacgagtcaaccaggacgacacggcggctctgttatactcatcaggtacgacggggacgagtaaaggagtaatgctgagtcaccgtaacctaatcgcattggtacaagcataccgggcccggttcggtttagagcagcgaaccatttgcacaatcccaatgtgtcacatcttcggattcggtggtttcgcgacggggctaatcgcgttaggatggacaatcgttgttcttcctaaattcgacatggctaagcttctctcggcggtggagactcatcgttcttcgtacctttctcttgtaccgccgattgtagtagctatg

SEQ ID NO: 14348 - DNA, 600 bp, Arabidopsis thaliana columbia
cagcgaagggaaagtcattgcttatgcaaaaccttcatatacatgggtacgtagttattaaatcctataactagtcaatctttaacttgtggctgaccatattgtgcctaaactctgctctgtcataaacatagataaagggaagtgacacatccactgcagagtcaggatctgacgctgaagatatcggttctccgaaggctataaagagtttctctcatctccgcttgacacctgttcgtgaggaggtaacttttttctctttctttctatcttctagttggggaagtagtagatgtttatcctgaggctttgcaggcaaagatagctggtgaaacaagcttggctggtagttttccgggttatgacgagtatgtacctatggtggacaaagccgttgacgccacctggaaggtgaaacccgccatccagagagttgcctcaagaggttagttagttagctgctatatgctttacgtaccagtaggctccggtttagaccagatactgaaggaaaagaatttacctaatccttgtgtacataggatttattttcttattaggattggtttggagttggttataaaacagagttttttg

SEQ ID NO: 14349 - DNA, 559 bp, Arabidopsis thaliana columbia
  unsure (1)..(559): unsure at all n locations
tnnnnnnnnnnnnnnnnnnnnnnnctaaagtatccggtgcgctatcgcgactacaccctgcgccagttgtgtcaggagatgcacgatctgtatgtcagtttcgacgtcaaagacctacaaaaagcgatgttccgccagcagagtttcccgtcagtggtgatgaacccccaggatgcgcatagcgttatattcgcggtgacgtggagttggtgcggattcgtgatgccgaaggcgaattgcggcagaaggggcgttgcttatccacctggcgtgctttgcgtggtacccggggaagtctggggtggggcggttcaacgttatttccttgcactggaagaaggggtgaatttgttgccgggattttcgccggagctgcaaggtgtttatagcgaaaccgatgcggatggcgtgaaacggttgtacggttatgtgttgaagtaagaataaaaaaaacgggtcaccttctggcgacccgtttttctttgcgtaattagtggctaccgtctgtgtgcctgtcgggacacgaacgtgtttatatttgaacatcgccatgaacgcg

SEQ ID NO: 14350 - DNA, 628 bp, Arabidopsis thaliana columbia
ttttggtttttaaaactctgtttcttgttgttgtgaatactatttttgggacagctcggaggagcggtagttccgataccgacagggatggagagacgggagagtctcaatggcagcaaatgtcagaccaaacatcatagataccgatttcacagttgataagatgatcaatatcttttcctctaaaggcttatctgttcatgatctagttgtcctctcaggtacgttatctttcttgatattcaagaaagagagatctttctttaaaacaaaccttcaattttcgatctattacgggtctcaggagcgcacactattggagctgcgcattgtaacacgttcaacagcaggtttaagcttgatccaaaaggcaacttagaactaatagacgcgtctctcgataactcctatgcgcaaacacttgtaaacaagtgttcatcgtcactagatccaacgaccacggtggttgataacgatccagagacatcgtcgacgttcgataatcagtactacaagaatctgttggctcacaagggtttgtttaaacggattcactctcatggaagatgatcggacgaggaagattgttgagattcttgcgaatgatcaggagagtttttcgatagat

SEQ ID NO: 14351 - DNA, 518 bp, Arabidopsis thaliana columbia
catcgtctcgagggtaaatacggtaaatccttctcgcaagcccttcagcgaagtaagtcgcgactttcctcatagcaccagcttgagaggacgcgagtaaccccacgtgcttcacgagcgcgtcggctaacttcaaattgttctgttgaacagcttcagcacaagctaatagcgcgtggactaaacgcactccagtttcttgagaatccaaaaccaccacagagcgcgtagaggataactccgattcaattctcgtcctcttgctccgacgagtcacgtgctcgtcacgtggatacactgcagagccaggaatagctctaagatcgtactctgagtcaggcttttcttgaatccgggtcgggtcaagatccgagagcatgctttcgacccaaccagagagatcagaaggattgtaatgaacagtttcatcagaaagattcgagattccatcaccaagaaccatctctaactgttcaagcttgtgtgcacgtcagccatgtcggatgatcgaactttgt

SEQ ID NO: 14352 - DNA, 865 bp, Arabidopsis thaliana
ctggatggttcaacaatttaggcctcttgattctaaagaaattatccagagatcatgacaactgtgggaaaattggtaacacgagagggcttctccctaagatcattgacttcacgcacacagacgcaacactcttgaaggatgagaacgcagatatggttctgtcacgagtccttacagtgaaacggtcgctgcagctagtgaaaatgttagtaagcacaagtggcaacaccgggaaatgtctcaggagggagatctcagaaatcgtcttcacaatcagcaacttgagagacgtattgcggcatggagtgagataccgaaattgcagaagctcgggattgagattcttagcttcctcgcgcttgagactgatgggcgggagagaattgccgttactggaggtgtcttgaaagagctgttcagcattttcctaaaaagtcaaatacatggggatgagaatgaaaagcgggtcaggatggctgcaggtgaagctatagggatgcttgctttggagagcagaagcaactgcatccaaattctaaagctcggagtctttggaagacttgtggaggcacttgaagttcctttgatccgtgtcaatgcagcgagagtgttgagaaacttgtgcatatattctggacatgaatgctctctcgacctgaggttcattaaaacagcagcgcctactgtgagtatgtctgtctgtcggtacaaatactgcgttgaacccccaaaagattaaaacttgttctgttctcttgcaggtactgaagtcaataacatcaggtgacaataaattgctggaagtgatgctaggattggcagcacaagtgttcaaattcatgagttcagaagaagcaaacat

SEQ ID NO: 14353 - DNA, 593 bp, Arabidopsis thaliana columbia
atccccctctcgattaactccaggacatccttactactaagcgtaacatcaccaaccagagaaatagagctaagtcacgagtaaataaaatattagacttccggataatctttatgatctatcctactcaaatagttaccacgtaataattttacctgatggctttgagtttcttcaatgagcggttataacgcttttcagaatctacagtctctctcgaaatattagcaataggagacgtgtgtcctaccaataactttgttttcttgtcaatggcaaaccttccatccaacttgcttgatctggttctaagccttttactccttctccctgcattattaccaacaacactagtctgagtgagaacatccgcctgcatcaaaaaagtgtaatatataaaataaatcaacgtaatcataatgactatgagttagataccaacctgaggctggacaattgccatctgggaagcatttccgtaagttggaatctgttccatataacttttagtttagcaatccaattatactttaattaggtcggtcctaaaataatatttcaaccattattcaaaatggattttacttaataga

SEQ ID NO: 14354 - DNA, 384 bp, Arabidopsis thaliana columbia
tgccttcatgctgtgcctgtgcaggtttaagcacattgagtatttgtttttagttttgttgatttgtttctatgttctgctgattaatgtggggttgttgttgcagtttagctcttcgtttctagagggaattgtcgattatgtcgatccaggattaccgtttatatctcttagcaaaggtctggagcttaatactcttaggatgatgtctcagatcattcccattgcgcttaagaatccccggcaaccttttgttgctccttctggcccgtcatttgctctggagctgatgaacaatttaccaactggtttgtatgactcttgtacttcttttgtgtaaatcgaatagcattatagtttactattgctgaatgatgagcaatg

SEQ ID NO: 14355 - DNA, 1018 bp, Arabidopsis thaliana
caatatataattgatagagaaatggtagtatcgaagtaacgaaggttgacaatttcaaaaagcccatacaatcagtttgagagacttaaaagagttgaataatgtacagcaacaacgagtcaaagtcatgcttgtgtgttacgtgttctatatgtgtccatgattataacgcaatagcaatatcatgtcggtgcgctaacttgttttgactttttggggtcattaaactaaaacatcagtttcaatatacatatacatgacgtcataaacgttccattcaatcgctatgccattttaatataatagaattttgcaacttttttttttcctcaaggtagaattttataactatagattaaaattggataattaaagttctttgttcgtttatttgattagtttttctgtagtatagggtcaaacaaggcaatgttaaaagtcaaccatcttctttatttatatttgttcctagttaattacacttaacactgtttgttaattcattgaaattgttttgtcatgtactaactattgattattcagtcaccgtcccatgacatgataatcccaccaaggtaccaacacgtccaaaacaacgaaataggaaattattatttagaatctaatgggctaaaaataaggcccaaataaaaagcaaaggcccaatatatactgtcacaaaaaccctcaaagaacagtgaagctctcatcacgatcgcaacaatggcggctgctgcgaaggagatcctacggcgaccagtggcggcaacaataaggctaaccgttccggcgggaggagcgaggccagccccaccggtaggtccggcgctaggtcagtacaggcttaacctgatggctttctgcaaagacttcaacgctaggactcaaaagtacaaaccagacactccgatggccgtgacgataacggcgttcaaggacaactctttcgaattcaccgtcaagtctccgacggtgtcgtggtacatcaagaaagcagctggagtcgataaaggaagca

SEQ ID NO: 14356 - DNA, 569 bp, Arabidopsis thaliana columbia
cataaataaatatcactacaccttcaaagtactattgttgttgtggtggccttgaaacaggataatcgacatattgcagcgtcaaaaattatcacaagcaatgaaactaagggggagacagaatcacgaaaactaaattagtgtaccaaataaataatcctcagcttcttataacaattgaaaactagcgttaaagacagatttttgctaacatctataaccaaaaaacttgcgttaaaggtctttacaatgggaacttcttatttcatggggaagtctcttattttgaaacctagacagcaaacgcacagtaccagaacaaacgtagtagagaacgtaagtcttcaaagaacatcatccaacgttagaggagaacctctggtgaccaacaactttgacttctctctctccataagagcttctatatctgagcacttctgcttaaaaactttcatttcttgcatacgagtttcaccaatctgttcttccttcttcttttccttaacttcctccagcttcttctccaaccaatcaaccttaaagccagaaaacttcaggtattgtaacgc

SEQ ID NO: 14357 - DNA, 624 bp, Arabidopsis thaliana
tagtaacgtccgccagtgtgctctaaagccagtagtcagcaatacccgcttctacagcaacgcgtgcagtaaccgctttcggcagtacggattcacggtaagcagcatcctgcttgtcaaatgcgtcggtagacggcatggacaccacgcgcgctttcacgccttcggcagtcagtttttcgtaggcagcaacagccagttcaacttctgaaccggtagcgatgaaaatcagttccggctgaccggcgcagtctttcagcacataaccaccgcgcgcgatgtttgccagttgctcttcagttcgttcctgctgcgccaggttctgacgggagaggatcagtgcggtcgggccgtcctgacgctcaacaccgtatttccacgcgaccgcggattcaacctggtcacacggacgccatgtagacatgttcggggttacgcgcagagaagcgacctgctcaaccggctggtgagtcgggccgtcttcgcccagaccgatggagtcgtgggtgtaaacatcacctgacgctgtttcatcagcgccgcatacgtacggcgttacgtgcgtattccacgacatcaggaaggtggaggtgtcggcaggaagcacacgtgcaggagatccgt

SEQ ID NO: 14358 - DNA, 579 bp, Arabidopsis thaliana
cctcgcccagaggctcctacgagattggttcacgacttattgggttaatgaatacaatcagtcggaaaatcaaaccaaagaggttttctttcaaagagaccgcgtatcaacagtggatgaacggtacggctggagaactcctaacgcggaagaagtggataacagatgtggatcacttgtatcttaaccaccaaccggaggtaatcatttggtgacccttcacgtgaacttgcttacgtctcacatcgattgctatgattgcatcgctaagagcatacagacgagagcgatggaaaaatgctggaagcttgtaggccgttcacgaggatgattctacagatgatgaacgaaccgattccttctgaagtccgtatgccacgatacgaccaattttcattccggcagagggacaagaaaaaggtcccgcaaaaacatatcagaggggactacagcgcttacacgttaaagattcttgaatgtttattgcttggtgtttgttttgatggcattactgatgcaaatatccaggctctatgggttaggatgcaacagagatcttcgatgaagcacgaaaaggat

SEQ ID NO: 14359 - DNA, 616 bp, Arabidopsis thaliana columbia
ttaaatccctatagtcttaatgctaatctaatcacctaaagggtatatggagctgttcccttttggtgattgtcttgtttcttgtaatctcaattttgagtttgtgtgttgttacttgcaggtggagtatcttcctatatcatcaatggaaataggcacaaaaggtgatggaggagttcttggagatatggaatgaagctctggctaaaaggtcgttgccgggtaagtttgtgaacatagatctcaactttggggagtttggacttggagacatctacactccacaacacacagctgttcgttacgctctcgtgatggctcacatgattgctaccgttcaagctgtgagaggctaaaccaaaacataacttagtatttctaggtaaaattatgtgctttgcaatattagtgatttctttctttggtcatgtttatctataagaagcattgagaaaaaatgaacttataaaagactttgatagaacaagttgcaaactccagaaaaaacttgagattatagcagattgtgatttgaatttcgattaattgtgtactcattcgcatattttttcatttaaacatgtctatgtcatatgcttttagtgacagtcaaata

SEQ ID NO: 14360 - DNA, 609 bp, Arabidopsis thaliana
taggcggagtagagttcatcggttcgagtaacgcttggaacgaaactaatattatacgatgtggtttcgggcctggaaggattacaagtttcgatccagaacttcctgatattaaaaaaaaaaaaaaacagagatctcaaaagcctaattcataatagttggctaaatagttatacggctgaacaacaattgagattcaacgcccaacgcccaaattagataaacataatggcacagttttaaaatacaagaggagagaaccaattcgttttattcaacaacataagtcttaccattattacttgactccatagatcttaccattgaagagaaagataaataaacttgaacataaaatgaaaacgcaacagaacattttggacttgactccatacgattgacataactccagcagatacgaacttcaagtctcttactatttgtttgagtcatcctcagctttctccaccttcgtcacgaatgtaaccgatttcctcgggtgctcatttacggtcaagtgtaaacatctggtctcgagtaatgtccaaccgaatcgaagtataacttggctcttgctatatcgcgaagatcttgatggaaaaaaaaaaa

SEQ ID NO: 14361 - DNA, 545 bp, Arabidopsis thaliana columbia
attgtttttcattattttttatttgattcatgtcacttcttaaaatttcatggttttcctgaattttatgtaatattttatgatgtactggtatctttccgtttaacatactatatttctgttttacatatgatcttttaatatgtcatactgttgtttattttgacatgctattgttcaaaaatacataagattttgtacaaatactgatgagaacatgaccaatgcaaccaaacaacttgaaccacaagaagatgaggagcagtttgaagccgaggagcagcttgtaccggaagaagcattaatcgttccgacgggttctctaacaagatcaaaatccaagaagttcaaccaagccatcaatggactactcaaggagctaaagaagaatcaagaagacgtggctcaatcctccttcataatgatcacggctcgagagactcggtaaagggttaagtgttgcttatgcactctttttctcttgttaagttttgtcccaatgtgttttcttgacaaggtttttaatgaggcctaagtacactttc

SEQ ID NO: 14362 - DNA, 479 bp, Arabidopsis thaliana
tagtaacgtccgccagtgtgctctaaagcggaaagccattattatcaacgactgtggcggtgatgacgctgccggagctgttctgcggggtaccggcgattatgctgtctgggacaggcgccaactcgataatttttgccgccgctgtgtcgccaataaaatgcacagttttgttgtcgctggcaccattattagccagtgatgcagtaaccgtcttctcaccaaaggcaacgcctgcgagagtggcctgcgcgatgccagactcgttggtattacttactcccggggtcagggtgagtcctgaagaggctgagctgaatgttaccggaagattattcacctcattgtcgaactgatctttaactgttgcaagttagcgttgcgctatcgacgccattacctgtgatctcatcttttgatatctgcaggacaacctgagcctgaggctttgtccgcacaaatgttaccggctgcgaatc

SEQ ID NO: 14363 - DNA, 418 bp, Arabidopsis thaliana columbia
ctttcataatgctgcttcatgttgtttccgatcttgaggttgttcctcgagtacgtgacctcatacaagattgccctttctcagtttcctatgcgcgccctaaggcattgtatggggattattgtgcggactatgaaacaaagacaaatgttatgctcgggcacctgaagaactacttagagattcactgaactccgagtccgattgataggtactacgcctcgcttgccaagaatgagccatatattgaccacttcttatttgtggcccccgacgactcttctcttcatgaggaccttctcgggaaaatcatgtcgagatggggaatacttggtagatggtttgtcaccgagcctcctactcttaatactaaccctagtctatttatcttctacagatcgtaccttcaaggtccttg

SEQ ID NO: 14364 - DNA, 419 bp, Arabidopsis thaliana
tagtaacgtccgccagtgtgctttaaagcaaaagcgatgagtgatgaataacgaccattacagcctctgaatcagttattaatatcggtagaatgacaatcgacggctttagatactgatatctacgcattgaacggtatttaacgccgtcagaaatgtcatcactttgttaaatatagatcacaattttgaaaccgctcgggatatcagcgaaaacataagcaaaagtgaatgttttaagaacattccgtaagcggctaataaggaagggaaattgacagggcgcacggctaccgcgccctggaggcaagaattaatgctcgcgggtctggtggaactgaacgtccggataacgttcctgtgccaggcgcaggttgaccatgctggtaacgatgtaagcgaggttatcgccgccatca

SEQ ID NO: 14365 - DNA, 566 bp, Arabidopsis thaliana columbia
gtgtcctccatgtcctcctccgtatccgtcaagtccgtggccccctcctccgttgtgtcctccatgcccgtggcctcctcctccgtagtggcctccccctccgtgaccaccatgtcctccgtgataaccttcaggttgcacagttgcctcactctctggcttcaccatgcctgcccaaaaccacatgttatttcaaagacattctaatcacgttcaaatgtgaattcttcttcctgacttcaactttgttttcgaccttaaaatgttttttcaattataaataagtacataaactcgaactatagtttttaaaaatatacgttcgaaacatatttacacaaaactacaaggattccacatcacttaggttaggtgaagtgtgttctgacttttaactaaagtaaaaaaaatggaagtacgaaagagttggataaatttatcaaatggtacgttaattagttcaaattcaattagctagactgaaatgtaaaaaataattttacatacccgactgtcttgcggcagaaacttcggagccaccagaagaattgcgaagagaccaacag

SEQ ID NO: 14366 - DNA, 610 bp, Arabidopsis thaliana columbia
  unsure (1)..(610): unsure at all n locations
atgagcgaatgggttgagagaccatcaagcaatacgactctggacgagatattgccttgtacagacaatgtcacagctcaagaatccttgatgcgtacgagataaatgcccgcgggctgacccgtatatccgctgggctttgcgggccgagcttggacactgataattttgtccgcggtcctaaacaagccaacccgccgcggcccgaaaaaagaaagcccactgcggggcgggctagatgggtgcgggccggcccgtctgacacctctaaacgtgactgaaaaataaacgctaattgtgttttggccataggtaatcgtatagttgtcatttgggtcttaaaaccatgggctgctcatatccatttaattatgatcagtttttagacaagcccaaaaaactgaagggtttattttggatttgtccaaaaactgaccataactaaatggatacgggcagcccatggtttttaatattaaactgaattattgaacttatatttagtttatgaaatattgaaattatatcattgtgtgaacacttaaaacttaagtatggagttttgaataaatgtngtcatgacatcatgtattatttggatcgatgaatt

SEQ ID NO: 14367 - DNA, 577 bp, Arabidopsis thaliana columbia
atctaataaatatacattggaaattttcaaaattcaattgatacatatcatatatacaagagaaaaagacataaatattcattttcaaatgaataagaataacaaaaaaaaaaaaaaacattatatattatcaatttcaagatcgtgttagatgatggtatgttgtggtcatggtgaaaagagttaataaagtattggattttgtaatgtctctacgtcctctgattgcatcgcacttagcttcttcttcgcatagattgtgcagactatagtcgcgctcgcagttacacagaagccaagaacattcacgactatctccacaaccgaaagtgtgtgtctcgtgtctgatgcaactgctagtgtccttagcattatacccctgcaaatatccaaaacagaaaactccagtcttaagattctgcagaacatgccttaaacattgagacaagagacatagagaaagagagagaggcatgtacgtgtaaattgagacaaagatctcaggaaccattccaacaagagagcctaagatataaggccataatgaactcagtcgctaagcgcagtagttgtaaat

SEQ ID NO: 14368 - DNA, 303 bp, Arabidopsis thaliana columbia
tcgcaaatttgcgagccaatgattccccgcaaaaacgtcgcaaatttgcgagggctttgcgggaaactgagttcccctacaaattgcaacgcacttgcgacgataacttattctgtggtaaattttttgatggagttgcgagtcttcgcgggttagatgaacacgttttaaatttccttactatttgttctatgttttggttatcatttacagtaacattcgttaattctcttattataaatatttgaagtttatataaaactaagacaaaatgatgtttaatttcataggacggggttatat

SEQ ID NO: 14369 - DNA, 568 bp, Arabidopsis thaliana
cgtgaaagttaatatacacaaatagtgtaagcatgtcgtatttaacaacttattaaggtataaagggccataccagtcgagacttgataaataagccttaaatttccgcactttggccggatcaaccggtgctagaggatcatagattgctcgtgaaggcagacaacccttcctcatgcagctcagcccgttgtctccaattactggaaaagtgttagtggtcattagatcgggtttaatcattgacctcccatccggggccagcttaacagtttttctcctcgcatcttttactctctacagcctctcggtttcctcctcatcttcatcagactcaggaagcatttgattatactcagatataacctggtcaataacatcaagtatagaatcatcatcatcagctaccctctcaccgtcagctttttccttggcttcctcaggcttattcttggggacagaagaagtatcaccgtcagctttttccttagcttccttaaggtgattttggggtttttattgtaatctttggcccctttggaggcacctttttaggctcctttgtagc

SEQ ID NO: 14370 - DNA, 545 bp, Arabidopsis thaliana columbia
ggtaattacaaactatcttaagccgtgtctttgtacttaagatgtatcaaacacacaaaatgtaccgtttactcttaacaggtttgctatgatgtgaaaatattattctacttctgtcgaaggcttgttagcaaatatttcagaagctaaaatggatcagagatttcatacataccatttcgacaaaaaaaagaaaaaaaaaaaaaaagatttcataaataccatcagaaaacttaaaagctttgtttgcaaacaaaattatgtttggactcagatgatgctttgtggtttgcagaccgagttgttgtgtgatggactgatgaagatgggcatcctgaaaagtcgtagactgtatcaccagctgaatccgacctccataggtatgcattattgaacctcgatcacattaacttatttgcaatttttgtcgatgaaatacaatcgactaaggctgattgacgtgtagatggtaaaatccttgttattgcccgcattatgctgtataaaagttataatataccaaaatatactgtatggttggggaa

SEQ ID NO: 14371 - DNA, 476 bp, Arabidopsis thaliana columbia
atccccgaaattttgcaaataaataacaaagccattagtttagtgcttttactagtctataagataaaacttatgacttgtctaacatgttacatgtatatattaaaaatatatactaatctatacttatgtgaggccaaacagaaagaactacaaatttatttaatacaacataagaattctttaggtttgccaaataaaagtttaggaaagggcatgtgactttaaaagaactcgtgcatgttcgtcattgataaaaatttgtaaacaaacgtagttcattgaaacatcttactcatgacttaatgttaattagggctacttgaaatcgccggctgagcgggtggtagtggcggaggaggtcgcttgcgcttctttttttcatagctgatcccacgtgctttagcctgcgagtcacgtacttcccttaggtagagtcgaacggctcgtgcaccaaaagggttcgtctctggtga

SEQ ID NO: 14372 - DNA, 496 bp, Arabidopsis thaliana
catcacggtttcaagaaggctacctgatcccgaaacttttgtagttagtgtcaccattaatcatgattcattcccaagagctttatgtgatctcggttctagtgtgaatcttatgcctcgttcagttgctatgcgtcttggatattccaatcttgagcctacctttatcactcttgtgctagcagattgttctacccgaatttcggatggaattcttattgatgttcccgtgatgattggaaagagtatgattcctatagactttgtagtcttggcttatgagaaggaacctaaggatccattaatcatagggagatccttcttgcatacagctggagcaatcatagatgtttgacaagggaggatagggctgaatgttggcgatcttactatgcaatttgatatgaacactttggtcaagaaaccgatcatagaagggaaaaccttcttgatagattctttcacttcctcagcttcagatagtatttcagagatg

SEQ ID NO: 14373 - DNA, 433 bp, Arabidopsis thaliana
ctccaaccatatttcatatgaatgaccaccaattaacaaaaccaaaaaggaaccggaccaaaaaactccatatgttaccaaaaacttcccaattgattgtaaaaagccatagcgtcaaccgaggggattcttgcatgtaacgcgattgtgacctacacctccacatctcccacacttattaggcgttttagactttttattcccctacagcagacataaattatagttaccttgggctaatatagaaatctgtcgatgtataaaacaatattttacctcgtattccccaaccgagtgaatccgcaacttcggaggtctaccgggaggtctttttgttatcgggggcattaaacagagaacccttatttcctcagggacatcaacctcagacgggtcgcgcacagggaggattggttgttggaccgttggtgac

SEQ ID NO: 14374 - DNA, 562 bp, Arabidopsis thaliana columbia
cgtgtatgcttctatgtagtgttgttcttatattccttgattgtgtttttccagtgaaggccttccctaaggatgatccaactaagccttgcagactcacctccttcttgggatacaaagctgggatgactcacattgtgagagatgttgaaaaacctggatcaagtgtgttctcactctcttctcttatcaagtcttaatttttgcatgtggttttgtacttaactttttattaatattgttgacagaactacacaagaaggaaacatgtgaagctgtgacgatcattgagacacctccaatggtggttgttggtgtggttggttatgtaaagacacctcgtggtctgcggtctctatgcactgtgtgggctcagcatctgagcgaagaattgagaaggaggttctacaagaactgggccaagtcaaagaagaaggctttcactagatattctaagaaacatgaaactgaagaagggaaaaaagatattcaaagtcaattggagaagatgaagaagtactgctctgtcatcagagttcttgctcacactcaggtatgccat

SEQ ID NO: 14375 - DNA, 197 bp, Arabidopsis thaliana columbia
  unsure (1)..(197): unsure at all n locations
atggattctccactaattgatccantattgggtgacagtttcagcagaatcgaagatgacactaggaacgaacctcagtcagactgacattccacgccgatcgctaactctattgaaagccgtctgaggagaggtagccgcatgacagtccagtgtcgtgatctctgctagatcttgagctatctcccgaaccggca

SEQ ID NO: 14376 - DNA, 500 bp, Arabidopsis thaliana
aaataacattttcttgaaacactaacggtcaaatcattgatatgtctatagatgaactccgatacggccacggtgagagacgagctagattttgagttcttgggaaacagaagtggtcaaccttactcagtgcaaacaaacatatttgctcatggcaaaggagatagagaacaaagagttaatctttggttcgacccatctatggattaccacacttacactatcttatggtcacacaaacacattgtgtaagcttttctctaattgtactttcaactagaatcaacatttactgtttcaaaacaaaaaatcaccatttactgtttaaaaaaaccttagtttaacgtggggttgtcttggttactcagttttaacgtagacgatgtgccaataagagaatacaaaaacaacgaagccaagaacatagcttacccaacatcacaacctatgggagtatactcaacattatgggaagcagatgactgggcaacacgtggtgg

SEQ ID NO: 14377 - DNA, 555 bp, Arabidopsis thaliana
catgtttaaatcaatcacagggcttttccttttgaaaggtcgcccggttgaagtggcctgaagttgattccctggagaattcaaatgcaagtccatttttcttttcttcgaatccctacctccactagatgattcctcaacaacaggcctcctcctattcaaatcttcgtcaacatctgattctagatcgttctttccaaaattaccaatatatctaagtttctttgatggaactaaagtgaaaagggatggtctcaagtctagcaagaataatctttttgaatgggctgagtcaaccagttccaccagctgcctaaatagacaaaggccatgtcttttttctcttttagcataacttgatctaagaaactccctcaaactgattccaatagaagatttactatgattcccatcaccatgtgataccataccatttcctttgggacttgattttagaggtaacacatcgtgaggagtaggcgacttgctaatatccaactttttttccttgcttcctaaatcttgatcagagacaaattcaggaggagttcctgg

SEQ ID NO: 14378 - DNA, 822 bp, Arabidopsis thaliana
  unsure (1)..(822): unsure at all n locations
atcgtaaaagaagttactaacttttgaaaaaacagatcttacccactttttactactaaaagaagaaagtttacaaatttggtcaacgcttttcaatctttccggtgaactcttggtcgccggaggacatccgtggtgctcccaggtgagtctggcgtaggaggtgcccctcactctgtggtctccttgctttctatcttgaggtcaagagaacaacttctttattcagccctctagttccagacatcctcaacgctcctgtactacatttccaatggtgtatgctcatgctaggcgcccacctgtagcagtaatacttggtctggtaacttcctgcttactctcttgatacttctctctccctgaactatctcacttttgtgaagaactatcctttttttgagaacattgtagtgaaactttcagcctccgggcaagaactatctcaccttgtgtgaagaaccttttggaacgcttgtttacctctagtgaagcctttctccaactcctacgactcaaagaatggagagaagaatcccatactacctgaaaaggaaagaaaaaaagaatgagttctctccactccctcgaaagagaataagagcaccaaccttggataatgctgaccttatcagggagaactctctcatactcatgggaaggctcacaaacccagagatccaaagactctgngtcctcatctctttcctctcaaactgttggaacttgagagacaaagcaacaggttctgacctaggcagaggatgctttcaattccggtttgactatgaggaagatctacagaaagcgttggataataga

SEQ ID NO: 14379 - DNA, 458 bp, Arabidopsis thaliana columbia
tctctttctttagcttaccgttgtattgaatggcatgcctaataaacctttcggggttcctttaggcattggccataagttcccttatccctcgcaagaaatcgtctgtgtgttcttggtgttcccacctgcctcaaaaaacgtttagatatacaggctaaatacccaaataaggcataggcttattctcatgggtttcagatacagatttctcatatcatgcagacctactatcaccatttctacaatgtgcatgtaaaatagtaggggaataaagaacaagcctaacctccttgaacgtaatagatgaactgagccctggatacaattttgtctctagtctctggattattctagctgccacatctacccagttcgcctcatactctagtggagggagtcctagtaccagaatatagacgaattggttaacaaagatgagcaaatcaataaaaact

SEQ ID NO: 14380 - DNA, 636 bp, Arabidopsis thaliana columbia
  unsure (1)..(636): unsure at all n locations
tnnnnnnnnnnnnnnnnnnnnnnnttaaaggataaatatgaattaacccgcacacactctgaagtactggaagcggtgaaagtggttaaaccgggtaaaacgctggatctgggctgtggcaatggtcgtaacagtctttacctggcagccaatggttatgatgttgacgcatgggataaaaatgccatgagtatcgccaacgtcgagcgcattaaatccattgaaaatctggataatttacacacccgagtcgttgatctgaataacctcacatttgatagacagtacgattttattctttcgactgtggtgctgatgttccttgaggctaaaacctatccccgggttgattgccaatatgcaacgttgcactaaacctggtggttacaacctgattgtggcggcgatggataccgctgattatccatgtaccgtcggcttcccgtttgccttcaaagagggagaattacgtcgatattacgaaggctgggagagggtgaaatacaatgaagacgtcggcgagctgcaccgcaccgacgccaacggtaatcgtattaaactgcgtttcgcacgatgctggcacgtaaaaaatgacccggtaacacaaaacgcgtgaaaatcgnacgctgagatgat

SEQ ID NO: 14381 - DNA, 561 bp, Arabidopsis thaliana
agatccccgggacgaaaaccacggaagaaagggaagaatcgttggtcaaacactcgtagtgtctcattttctctcggaagataacctcaagcatgaattggtttgtgtagtaccaagaaccggtctcgatggttaagactcgagtggtatggttatgatcttcctccaagatacgtggaccgaagccagagttaataaggtacttacatttgtttcgtaattcgatgtatgcctcacagctcttgatcagatcttcgttgaatctgcttggaagattgtgcatatacacgtatcttccggcacaagtatctgttccaccttgtttagttttcacagtgatatttagggtttctttgtcggaaagagagagataggttgcaatttgactgatgtgaagcagaaagagcatggagaacaaaggtgttggtgagatttcagtcaaaacctttagagctcgtttcttcacagtcttttccttttttggattgaatttgtccattttgattatggagaaacgaaagtggtactactttgtgaagataagatcaaaaagataagtga

SEQ ID NO: 14382 - DNA, 410 bp, Arabidopsis thaliana
gttccatatttgccaatatatatatatatatatatatatatatatatatatatatattttggtgtggtatgtgttgagcctgtagagctgtgacccagtatcacacacactcacacacgctcacaacgcacacacgggctgaggagattgtgttacctacacgtagtctctgtgctatatgtgcacgaatgtcggtagtgtgcaggctgcaattcgatgagagcgatttgcgatcttccacgggatttggtagcgcggatactgtctagggttcccttgatatctctgcgtagtgtgcgattcatatgcttgaggtggaacactatatccctagatccgagctttgcgtagacgcagtttggtcaagcggcgtgacagtgtattatgatgtctctctcgagggtttcgtt

SEQ ID NO: 14383 - DNA, 582 bp, Arabidopsis thaliana
tagtaacgtccgccagtgtgctctaaaggccagccggtcatcagcgacaaaggtgttgttggtcaggtggtggccgtcgctaaactgaccagtcgcgtgctgctgatttgtgatgcgacccacgcgctgccaatccaggtgctgcgcaacgatatccgcgtaattgcagccggtaacggttgtacggatgatttgcagcttgagcatctgccggcgaatacggatattcgtgttggtgatgtgctggtgacttccggtctgggcggtcgtttcccggaaggctatccggtcgcggttgtctcttccgtaaaactcgatacccagcgcgcttatactgtgattcaggcgcgtccgactgcagggctgcaacgtttgcgttatctgctgctgctgtggggggcagatcgtaacggcgctaacccgatgacgccggaagaggtgcatcgtgttgctaatgaacgtctgatgcagatgatgccgcaggtattgccttcgccagacgcgatggggccaaagttacctgaaccggcaacggggatcgctcagccgactccgcagcaaccggcgacaggaaatgcagct

SEQ ID NO: 14384 - DNA, 480 bp, Arabidopsis thaliana
catctagcaggactagaggaatcttacatttatcaactggatctagcagtttcatctatgtaccaagtcaaagtcatatttttaggataggttccacattccaaaccagttaaaagtgctcattatcttaatcctaacttaataggatgatcaccgaataccatctacatctcatatcatttctttgtaactaactgacggcatattaacccaagaacaagtttaccagaaaaagatggcttgttaacagggatcctaaataggtccctaaatggagactctagaaggaacgttatttctggtattcccttaagcgcatatgctagatgactaaggtactccggtttagagtacgcatttatcttagccttggttgggtagtggtcgagtgcaaacaacctctgtggtaattcaccaggatccttagaagtacttcctgaaagttgagaaatacgatgaagttcttaagacgtacactat

SEQ ID NO: 14385 - DNA, 498 bp, Arabidopsis thaliana columbia
ttttgaaaacgtaagtgagtagtaagtgacttgaaaacaatatacccaatggcgaacaaggagaagcttccagctctgggccgggcctttatcaattttgttcttggtcacccaaatcttaatcttcgttgttacatggcactgcttcaacaacgaaaaccgatcttccgatccctaaaaaccctaaggacaagagcatcgcatgcatggttctccccacttggtaggtcacaaaacttaaagaatcgttctctcgagtaacccaatacaaacttccattcaacgatacaacccttaagtaatagttaatggtcacaagttcactatattttgtttcgtctaaatcttcatctttccacgtagtcggtagagtctaagtcctccatataaaccgaaagggtcttgtaatcaatttcctcaaccctctgactcttattattatcataacctatgccaagaaaatccaaacgtaggttcgttaacctcggggctcgatgc

SEQ ID NO: 14386 - DNA, 545 bp, Arabidopsis thaliana columbia
tgaagctctagcaataaggccacacaataatcgcttctagcttaagtctattccaactaaagatctctacttcagttatcaacaaccattgaccaaaaaatctgcctttcatcatttaacacaacaagcttgccaagttggtcaaaaattctaaattgcataagattatcgtcgaattgaacctgcaagctgagtggtgacggagaggagctcgtatgtgttcgccggagaatgagacgaagagagagatattcgcggcgcctgttttcgttggaaagagagaagcttctctttcggaaaggctcgcggctcacctgtgtttcaccgccggaggaagagaagctgcgaaattttcgcctgagtttgtcgtcggcgactcgtttgtgaacaatgaagacgaggtcggaactagggtttttaattttaatttgattccggttatctaggtgcataccggaatcaaaaaccgaaattataagaacatgaaccggtttttgtttggtttaccaaatttgaattgaaaacagaaacagcattgtttatga

SEQ ID NO: 14387 - DNA, 528 bp, Arabidopsis thaliana columbia
gggttttgagtacaatacaatctggaggatcatcttaaatttgggagtaatcttctcacttttaaaaacattttgcaggtctacggatttttgaagagctacttgaagttgattatcttgtatggaagtgattttctttttcattttttatggcataatttcctcctgattacatagtaatttcatttagtcaagcaccatcatttacggtgctaagcatgcagccaagaagctgcagcagggctatgaaggctgttggtgttgtagaggccacatgtgaagagatattcgagcttgtgatgagcatggatggcactcgatatgagtaggtgtttctccatcttctgtattctgatttatatcatcctttttggtttttctttccctcattttcttatagttatatgctttgttatttggcaaaatttattggatatacgattgtggtttttatcttttctgtttcacatcctacagtaattttctatcaatactatgttagcaaaagtgtgtttgttttcatgtgtg

SEQ ID NO: 14388 - DNA, 514 bp, Arabidopsis thaliana
cgatcgacaccttcgagagcagaatgaagacgcgattggtgtcgaacgacacaacagaggtgtcgatcgacaccaaccccagattcctgcaggtattcctccagttgcggaaccatgtcgtactcttggggatttcaaaaggcttgacctgttctatactaatcgatcagcgatcgtacccccaaccttccagaggaacagttatgagctgaagcctggctagtttgctttagttgccagcatcctctccgtgacttatctcatgagtagccaatggaccatatcgagcgctttgaggaccttgttctgagcatcaaaactagtggtctcagaggacaacctactatgcaagctcttcccttattcacttgctggggaagccgcttcttggctggaacaatttaaagcaacttccctcaagacttggagaagcatcaagatagctttcttaaacaatttctgtgatgacgctaagtctaaggagttgagaacaagttttctacttcaccaaggt

SEQ ID NO: 14389 - DNA, 475 bp, Arabidopsis thaliana
taacggccgccagtgtgctctaaaggctgatcaagcaaactttcaaaaaccgtctaagatcccttacctcgaaacaactggtatgccttctagaattctccttagaaaacgccgtttcaagtgctatcactgttcaaaaatgatggttactgagactcccctggtaaagaaaaatcaccaaatccctcgtatcatcaaccaaaaaattgctcaacagttaattgaaaaaatttctatgactgatattgcccatcagctggccatttcaacttcaactgtcattcgaaagctcaatgacttccactttgagtgtaattttagaaatctgcctgagattatgtcttgggacgttgaaacagtccggggagtgactgcgtcaatcgggagatggagatgagcttcattgcgcaagattttaacaatgtcaatattatcactgttcttgaaggcagaacacaagctgtcatccgaaatc

SEQ ID NO: 14390 - DNA, 549 bp, Arabidopsis thaliana
tagtaacgtgcgccagtgtgctttaaaggatgaaaaagggaatgcgcgtaacgcctcctcttctggcgcgatggataacgtcgccattaccgccgatgaacagactaactctctggtcattaccgctgaccagtccgtccaggaaaaactcgccacggtaattgcgcgtctggacattcgccgtgcacaggtgctggttgaggcaatcatcgttgaagttcaggatggaaatggactaaacctcggcgtgcaatgggcgaataaaaacgttggcgcacagcaatttaccaataccggattaccgatttttaacgctgcgcaaggtgtggctgattataaaaagaatggtgggatcaccagcgcgaatcctgcctgggatatgtttagcgcctacaatggcatggccgcacggttcttcaatggcgactggggagtactgcttaccgcgctggccagtaacaataaaaatgacatcctcgccaccccaagcatcgtaacgctggataataaactcgcgtccttcaacgtggggcaggatgtgccggtgct

SEQ ID NO: 14391 - DNA, 420 bp, Arabidopsis thaliana
aagatatccccataaacctaccatgcaagctttggggatatgtagggatgttgactacctcatggagatggccaagttggagaccttcttctcctacaagtgtgaaggataccaaactgagagctgccaattcctagccactttgaagcttcatttctatgctgaagaaagggagagagaactgcataagggagttggctatatcacattcatggtgtttgggattcaatactccctttctattaggcagttggatgctgttttcaagttctccaccaagtatgggatccgccaaaacttcagcaaggacgagctcctagatctatggttgacaatcgccggtccactcccctacaagtaatctagggccaagagttcgttgataaggagcccggtgctaaggtatctccacctttgcat

SEQ ID NO: 14392 - DNA, 1357 bp, Arabidopsis thaliana
tgctaatctcgtaacatcacggtcactcaaatgtgggaaaacgatgaccggataaagtgtctctgatctgcacaacggagagacacgagatccatgtgtgaataagctcttaagagtgatgtcaagtcaacattcataatgtgtcataccagcgtcaggtttatgttctgcagcatcatcaaagtacttgtgtgtagaatacttcaagtaacacccagttataaaagctctagcttcatgtccatcacaagctctcaagctcgatctagcattaaccaaacactctcgacacgtgttctcatcaagtgtttgccaacactgagccaatgcatacacggcctcggttttaatcactgaagctgcaccaaaccctccatttttaacagcctttaaagttacattcaccaaagcctcatcaagaaatctccaaaattctccaaaccctgtccctgtttcctcacagttagctttatcaaatgtaggatcaacaaattcctcagagaaatctcgatcatcaaaccgtaagaagcatctatcactatggattcgaccaccggaacccgaacattttctctcgagctccaatctgctctcgttgaagcaatgtcgacaatcggaaacagagagatcttctctgcactgtagaaacacatagataggtggagatacatcggtgatggaagaaacgacccaaagcttgtcgttggttatgaaatcattgacggaagacattgctctgaggaaaccaagcagacgactagggtttacaaggtggtgatctaaaggttgacaatttaggagagattccgaagaagaagaagagcccaccgtcgctaatagtacaaggaatgaaacccaagcgaggaattgagcgatcgaagcacaaatttgcatcagaaatcggacgacgtgtgatcatgaatcgtgaagaagaagtctttccatatgcaaatctgcaatttttgatagagtataacatcgatgaatcctctgtttctgctctcgtcttcttcttcttcctccacccactccaactccgccgggtgtctctccctctccacaacggcgagtgggtggagaaggtggattaggtactttgtcgtaaaaggagataagaaaaatcgaagaagacgagtcaatctctctgtaatttcggttcattgtgagctttgacagattgaaaaacctttgttttgaattcagagaagagacagagagattttgcttctcttgtgcttgcatttgtcttaatttagggaatttttttttgactaactcattctccaatggagttctaattttagtcccgaagccgattttgtaggcaatcacaaaagaaagagatttatgtacaatc

SEQ ID NO: 14393 - DNA, 638 bp, Arabidopsis thaliana columbia
ttgtataacatcacatcagtatttatatgtgccaatcagttttagatatagttttaccagtgacggcttgtcgagccacatttgtctgtctataccgggaaagtgcaagcattacagcatcctcaacctatgaggtgcaagaaatgatatgaatgagatgtgtattttctgggaaacagttttttttagtaataaacagatcaaaatgtgtgcataaaccttcaaggatgctatctctcgtaatcccgtttcaacagcaagcatactctcaatgttcccttctccattcaaatcactgaaattactgatgactttgctccaagtgcgatcgctaccacctgcgagatgtgattttaccaattagttttatatactcaaactaaatgattatgtgggaaatattggcaggatagttgaagatcaaacctgtctgccaggaatcttcagacttttgggcagcggaaaggacaacttcagagggaagaggagctaaagctgaccaatgttcatatcttgatgtggatatacttcacatattcctaagagtgcccaatgaaatgcataagtaacattccaaataagggcaaatgatcactagcggggatccatagttgtctccagcagtatcagttagtggc

SEQ ID NO: 14394 - DNA, 579 bp, Arabidopsis thaliana columbia
gaagaaccggtgtgaagctgcgttgactgtgatcttgatccaacaaattgtaaatctcagctaaggaaggcacatgtttcttcatgatgatttggcttctaatgacggcatatgattcattcaagccagccaaaaactttatcacacgagcatgttcagctttcttatccatagctttgcaacaatcacaacgtttacacaaagtcacacaatcagaaccatccaattcattccagagagtcctcaatgtcgtatagtaagtagtaagatccatagtcccttgttgaagtgaccaaatctgttgagttaacggataagatcttggaagattagtaatgtgataacgagttgaaagatcattccatatctctgaggcatcatcgaaacgaaggatactcttatatattggttttgacaccgaattcaagagccaagacttaaccaagctgttacatcgggaccaaattcgaaacataggatctgattcaggaggtcgaggaacagatccatcaatgaaaacaagcttattcttcgcatctagagcaatcttgatcgaaattttccaatcatcataattcg

SEQ ID NO: 14395 - DNA, 423 bp, Arabidopsis thaliana
tgaacatgagaccaaaccaaaacccaccactttgtagtataatagcaccatcatataactcaacagctgacaactctcgtgaactcaaaacggcgtctgtgttttcttgtgcgttttagtttcttgggacgttaagtcttgctcggaaatcttcttccatgagagaaagtctttcttttagcttcacctttggctcacagcccaacacttctttggccttactaatgtctggtttcctctgtcttggatcatccggtgtgttctctatagagaatgatgattcttattattcatagtaatgggaagtacatatatatatatatacagactaagaagtgattagagtaaaactaatttcataaacacccttaattaagtgttaacatatatatatatatatatatatatatatatactcttata

SEQ ID NO: 14396 - DNA, 574 bp, Arabidopsis thaliana columbia
ggactttctaagatttaggagacatggtaataaccaaactacctaacatagtaaaagtcactttgattcagctttagttttagtttgtattcaatgcaaaggaaactatttttacaatcacaacttgatgagctaagatcagatgccaaaaatgtcttgtaacagggcataaacaaccatctgtgcaactaagccgtttgattttcttcggcttagcgtgtccatcttatgaacagatataatatgacaagtgttgcgatcataccggcatatttgatccaagtatcaacacgattgcgcctctcaatgagcctcagtaccgaattggagagccctactgtgttcagaacatccaaagctttacgctgtgcactctgagaaaccaaaaaccccaatgtcagaaaacgttaatggcaccaaaacaaaattcacaagaattttaccttcaaacgatccctttgttcagcatatttggagaggatacaacaccactagaaaacgactcttcaagcattctctttgagttctcacagagctcatagcttgagcttcctcacaaatatctgaaaatgtg

SEQ ID NO: 14397 - DNA, 488 bp, Arabidopsis thaliana columbia
agcagagaaagctgaaacgtaagaagaaagcattgtctaacggcaaggattctaagacgtctaagaaccattcttctgatgaggatataagcccgaagcatgatgagaatgctctagaggtggatgaggatgaagatgatgatgatggtgtcgagtggcaaactgatacttcccgagaagctgctgagaaaagaatgatggaacagttgagtgctaaaactgccgaaatggtgatgctctctgcaatggaagtagaagagaaaaaggcgcccaaaagcaaatctaacgggaacgttgtgaaaactgagaatcctcctccgcaagagaagaatctcgtgcaggatatgaaagagtatctgaagaaagggtcaccaataagcgcgctcaaaagtttcatctcgtctctctctgaacctcctcaagacatcatggacgcactcttcaatgctctctttgatggtgtgggaaagggattcgcccaagaagtg

SEQ ID NO: 14398 - DNA, 616 bp, Arabidopsis thaliana
ctcatactcagtctcgatatcctcattaatcacctcatatctacttgacatcgccctctttcctctggcgatttcagctcttctctgattacgtcgggctgcagagcgtttgaattcatccctgaagctctgtaaaacatgttgctctctcgatctagcggaccaggactcagcttcatccacattgtagtcagggtccatagagaattctccactgtagttactcatgatgaaacctgaaaacaaatgtaactcaaaaataaacgttaatacgttagttccaacaaaaccaaaaacacaaaccaacagagtaaaccggtcgagtgtaccaaaaattattatttatatttttaggtttggtgaacttgcggtcgagtgttttcggaaggccgagtggaggtagaggagcggtgattcgagtggttgaatcggtggtggagaaacagaggtgctcttggcgtgaagtcgagtggagttatgagctagagaaagctgtgttgaggttgagtgtatccttggagaggagaacggctgtttgttgagtaatgagagcagagatagatggtgagacgagtgataggcaaggtcggtagtgatcttggccgagaggtgatga

SEQ ID NO: 14399 - DNA, 650 bp, Arabidopsis thaliana columbia
ctacttgatgagagagtggagctaaaagtatagctagttcaaggcctacaccatttgcatgtagataactgaggaaagatgagaaaatacttacatgaacaatcacactctcatcagctgtaatcccttttagcaaattcctttcagcaagttcctcggatgatagaacaaatgcatcattttgaaatgtagcttcaggctttgagtcaaggctggctatatcacgttttacaacaatagacaaatctccaacatgatcctcaagaaggatcgagccagcaggtaagtcagtagtcccacttgtttgttgattagtatccatcacgttgcaaatggctctaacagctctttgcactgaggtatcaataaactggctatgaagcaaaaaagctttcttatctcgaataactctctcctcctcagtcttgcaaggaagcgtacgtaatacagaaaactcagccgcccaaggtcgatgatcatattcaccatttctcccctgacctccaccattcccgccccaatgttcatcctctgttggtaaaggagaagcagactcagaaacaggagaaggtacaagccatgtgtttgagcgtaatccaaacgggaggttgccgaactgaaaagccaatgaaaccaaacttcaaattgtt

SEQ ID NO: 14400 - DNA, 469 bp, Arabidopsis thaliana
gaggatgctccagagcagaggttgatgcaaattgactctccacatacttgatttttgaattcaaagcttcaaacttgacattcagatcgttgtaagaacaaccgatcttgttatgtaattcagctatcttcatgtcaaaagccatggctccagtagcttgtccttggatgatctattgaatgagttgcttaatttcaggatcctgagctgttggggctggttctggttgttgagtgaaccctggtggtggattctgctgttggtagcctccattaaactgttgtttagggacataaccttggttgtactgaacaaaaggcttggactgattctgttgaggtggatacacttgatcttgggggtcagctacattagtgcttctttatgagaggtttgggctgggatcgtagttgtagtccccttgtagaaactcctttgttctgaatgtagacaactctacagtttgatc

SEQ ID NO: 14401 - DNA, 598 bp, Arabidopsis thaliana columbia
  unsure (1)..(598): unsure at all n locations
nnnnnnnnnnnnnnnnnnnnnnctaaagtgaccaggccagtaacgttatcagaaccccattacagccagcataccctgaacaagtatgcatcgctgatggcgcaggggaacggctatcttgggcttggcgccagcatgaagaagattacacgcgccagaggcgagggatgtatctggcggggctgtatcatcgggcgggaaaaggtgaaatcaacgaactggtgaacctgcctgatgtcgtggggatggagattgccataaatggtgaggttttctcgttatcccacgaagcctggcagcgtgagtctgactttgccagtggcgaattacgccgcaatgttgtctggcgtaccagcaacggctcaggttacaccatcgccagccgtcgctttgtttcggcagaccaactgccgctcattgcgctggaaatcactattacgccactggacgccgacgcgtcagtgctgatttcaacaggcattgacgccacgcaaaccaatcacggtcgccaacatctcgacgaaacccaggtgcgggtgtttggtcagcatctgatgcaggggagctacaccaccaggatggacgcagtgatgtggca

SEQ ID NO: 14402 - DNA, 587 bp, Arabidopsis thaliana columbia
  unsure (1)..(587): unsure at all n locations
atctatgatatatccctatttttaccggttttaactatgttttaagtataagttttagagtctatttgttatttctagagtcttttctagttcttttcaggtcttaacatgtttgggattcatttgaagataatggagcattctgaaagaaaacaaagaatttatgctgctaaagcaatccggagacgaaaatgcacgtaggtgtcgaacgacaccacccctggtatcgagcgacaccaatacctgacggcaatttcgagacgcaacttattgatgttttgaagatttacaaattcggccctgaactttctcttatttttaaagaaggtccatcatgtttttaggtcatatatatagttttaaaggtcaccagagcaaaacccgcgccaangccgcggttttttttttaatgtaattttgttaagttgtatgtaagtattaaatattatttgttataatatatgtagaataaaaagattcatttgaaagtgattgtgaacacaatgcatttgttgattttttttattaatatagcctttataagttttagaagctaattttttgctttacgaacatttattttgaag

SEQ ID NO: 14403 - DNA, 727 bp, Arabidopsis thaliana
taccgtaaggaattacgaacaaagggagatgaagatatacgattacatgaagagctgtgatagcagtgactattgtgtaccatgggaaattgattttgaaaagttggagtttgttttagaagataagcaaaagggctttgtggttcttgagagggatggtgagactgtgaacgtggtgacgaaagatgatatacagagggttaaaggatatcccaagtctggaccagggactgtgggcccagacggtgagtggatggttggtgcagcgataggtacgagggagtctgataaggagaggcttgagcatttggttaatgttggggtcaatgctgtagtgttggatagttcgcaagggaactctatttaccagcttgagatgatcaagtatgtgaaaaagacttaccctgaattggatgtgattggtggcaatgttgtgacaatgtaccaggcacagaatttgatccaagcaggagttgatgggttgagagttggtatgggatctggttcgatatgtaccacacaagaggtttgtgcagttggtcgtggacaggtaaattaaaaagctctgaatcctaactgtttaatcttttaaaaggtgtaaactttgtgactatatgtgactaaacagatttgtctttttgtgtgatttggacctgttaggctactgctgtgtacaaggtttgttcgatcgctgctcagagcgggattccagttatagcggatggtg

SEQ ID NO: 14404 - DNA, 596 bp, Arabidopsis thaliana columbia
cagtacatagatacgtaacaccgaattctccacgacctagctctctccccaacgtgtatttagactcgatctcacgacctgttggatcattcaaaacgataagcttaagaggtcttccacctccatctccaccaccgtggtgaagaccgtaatcaatcgagaaagggttttgcttcttccttccttttttgggtttgttatcgttttgagccaatgatcctgctgttccgcaacaattacccatgacttttccgatcaaacccaaatcaaaaccgatgaaacttgagagattgaggacgaaattccaggaaagtaggaaactttaagagaattctggaagagatggatgagaaaaaaacgaaggaggtgaagaacaatatatgaaagggtggaaattttcaacgcgtgaataccaagaagaacgtcaaatcatttgttcgaaaattaaaattgcgaaaaattaattacagagagagagagagagatgatgatggaaggaaggtcaagagaatcttcttccctcccttcttctccagctgctctatgattgtatttatttctttttttgtctgtatctttttttcactttaaatttt

SEQ ID NO: 14405 - DNA, 521 bp, Arabidopsis thaliana columbia
tgaaaagaaatttttgttttcgtatgcgtgtccatagcggtgacggtgatggtggctgagatgggaccatcaccggaatatgccaactctccagctgtttatccgtctagcaaacaaaaacaaaaaatgccgtagaaaaccaaaattaggaaacaaccaaagatattgggcccaatgccagactgggcctagctcaaatattacaacaaccacacataatttttatactctgctccaacggctactaatcaccgtagtcccttcaacggtccagatctctcaaatattttctcctatatacaacatgcaaagatacatacactcgagcattcttcactcaacactcactttttctctaattccttaattctctcaactaattacaaattatgactcgcaatattctcttgacggttacattgatctgcattgttttcatcaccgtcggtggccaatctccggccaccgcaccgatccattctccttctacatctcctcataagcctaaacccacatctccc

SEQ ID NO: 14406 - DNA, 753 bp, Arabidopsis thaliana columbia
tacaataacaaatctgggcttgtgcattttgagaagatgaaagatcagaggttgcgaattttctgtgttgaattgtgaaacactacatacacaacgatatactcgtaagagaaaagatattgacatatcggatcttccaaattaggaaacaatatatttacacagctaatcttgtggagagtcacaaatctcaagggattgagataatactctcgcagtttcatgagcaagttattataaccgagatcaaacatcttgaagagatataaccacaacctaatcagctaaacaagaatgtgtgccccctaccccctctaggtggagcatacagaattttttatgccagcttgactcgaaacgatgtgaagccatccctgccaataggttttatgaagataacagctagttgagaagtcgtagcaacatgtcaaggttgaatgcggaattatgcggaattgaacacataatcgtgcaatgttacatgagcctctctctttctttttctttatcgagtcggaggatgatttatcggtgcgacacgttttgaagttcattttcacggtaggtcgattagtcggacacgtcgctgtggaggttgagggaatcaaaggtgaaggaaaaacctctataattgaattttgattaagctcagggacgatcggaccaatatcggagggaagagatgacaaagcgagatcttgtatagcctgcaccattccttgggctgaaacccatgtgttgggccttgatgaa

SEQ ID NO: 14407 - DNA, 1159 bp, Arabidopsis thaliana
taattagagccgttcgtcgtgtatctacgtagagaggtaagtgacattaaggcgtggatcgttgaaggtgtccaaaacataaaaaaatattgtatgttatggatctaataagggtgggaaagaattatccgtggtagaatcgcctaggtaatagttctcagaatttacaattaataatagatccagacgttaaaaaacaaaatctagaccaagttgaacacttgatgaatattatgaatggtaaaaagtagagggtgaccaagttgttttctattcatcccctcaataatttgggtaaagttcaacctcataatacatattttgggtaatttggatagtttcaaaaaaatttgaaaaatttccagaaacttaataattttcagaaattttttaaagtttaaataccaaaataaataattcaagtattatatttaacttgtttttctatccgttaaaacaaaataagtaactccaatgaataattatttataccaaaacatttagaaatatgaaattttgacagatacaagttatgttggaaaatctactttcgttggacacacattccggtttagctcattaaatggtggttaactttcttcaaaattgtttgagcttggttataataacttgctcatgaagctgcgtgagtattatctcaattccgtaagatctgtgactctccatacaattagatgtataaatatattttttcctaattgtaaagatctgatatgtccagatcttttctttttcaaatatatagtcgtgtatgtagtgtttcacaattcaacacagaaaaattgtctacctctgatatttcatggtatcagagcttgaagctctcttgtaaaaacaaaaagggtccttttcttttctgatcaacaatggtgaaaaaagaaaatccaggaaatctgaacgacaacccatccgtgaacctgacctttgctgacaactctggtgccgtgaattcccatcccttgctgaaagggaataattacgatgagtaggcatggagaatgaagacatcactatgctctcgaaagaaattcggcttccttgatgggatgatttaacaaattgaagatggatctccggatctggaagactggtggaccattcaagcacttcttgtgtcttggataaagatgacgattaa

SEQ ID NO: 14408 - DNA, 804 bp, Arabidopsis thaliana
ttctttgtatatagatgggcagccatagcatcataccttccagaaaggacagacaatgatataaagaactattggaacactcacttgaagaagaagctcaaaaagattaatgaatctggtgaagaagataatgatggtgtctcttcatcaaacactagttcacaaaagaaccatcaaagcactaacaaaggtcaatgggaaagaagacttcagacagacattaacatggcaaaacaagctctttgtgaggccttgtctttagacaaaccatcatccactctttcatcatcttcatcattaccgacaccagtaatcacacaacaaaacatccgtaacttctcatcagctttgcttgaccgttgttatgatccatcctcttcttcttcatctaccacaaccaccactacaagcaacactactaatccatacccatcaggggtatatgcgtcaagtgctgagaacatcgcccggttgcttcaagatttcatgaaagacacacccaaggctttaactttatcatcttcatctccggtttcagagactggaccactcactgctgcagtctcggaagaaggtggagaagggtttgaacaatctttcttcagcttcaattcaatggacgaaactcaaaacttgactcaggagacaagcttcttccatgatcaagtgatcaaaccggaaataacaatggaccaagatcatggtctaatatcgcaagggtctctgtctttgtttgagaaatggttatttgatgagcaaagccacgagatggttggtatggcactagcaggacaagaagggatg

SEQ ID NO: 14409 - DNA, 589 bp, Arabidopsis thaliana columbia
gtgtaatttctgttgttatacactttcatgtgattcatactgttactcagtgtttgtccatttcactaatgttcgatagctttcgtctatcttgtaagttgtaactacgccttataatggtgagtgtttcttcaaataaagctacaggagccgtcgaatacaaaaatattcaataatcacctgactaaagaattaaaaacaaaaaacaaaaacagaaccttaccctgacacacactttgacacacacagaaccgtaccctaactcagcttatattcccttgcaagatgagcgcaaaattccactactggtggcgtcaatttgcgaaattaaaatattaagaacataaaagaattttgttgttttgaagcaaatgataaaaaaaaatagctcactctgataaaaactctactaatatattctgcagcttctctccccaatgtcattgcaacttccacatctgatacaccaaattgcaccatgattgaatccgtatctccataaataacctaaattcatcattgtcagtatcaagaagatttgtccgatctaccacctctgaccatttcttgtggtttgcttgaattgtag

SEQ ID NO: 14410 - DNA, 545 bp, Arabidopsis thaliana columbia
caaatcctcggcatgcggcagtatcttcaccggtataaccataaacttcatcggatacaataccaccgttctccttaatgaactcaaaggcccatactgctccaccaccagcacatccaaagttgtcgttccctctatcgcagtcaatgagttcttgttccgataaagatactaattctccggttgtgatctggtttataccttccaccgctccagtcgcggcaaacgcccaacaacttcctatatatataaaaaccaccaatctcaaccacaagcacaatcaaaaatcaaataatgcagcaacgtgctgttggcccagtggtaaatctcctaggtggaggtgctgggttcgagacacagacatttgggtctgaacttccagatattaaaaaaaaaaaaatcaaataatgctaaggatattgaaaatcataccacactctccttgtcttttgactcttggaacaactgctcctctctccctccaatcaacttcatcaggtaaaacatctccttctttgtactgatactctccgctacatctgata

SEQ ID NO: 14411 - DNA, 166 bp, Arabidopsis thaliana columbia
gcgctactgaccgctgaccgttacctgggcaccaacttcttcacgaacgacctcggcggcaatgccatgttgtacgtgaacctgatctggatctggggccaccccgaggtctacatccttgtgctgccggtgttcggcatcttttcggaagtcgtgtccacctaca

SEQ ID NO: 14412 - DNA, 577 bp, Arabidopsis thaliana
tgtgaagttcaaagaagaatatggttctgatacattccgtcgcatacttcattcagtctgcccgtctatttatggccatgaaattgtcaaaggttatacttctgtccataacaagatttgatgattacaattagaagcattgcatatcatgatacgtctgttgtttgttttcttcttatcatttcaacagctgggataacactatctctttttggaggtgtaaggaagcactcgatggatcggaacaaagttccagtcagaggagacattcatgtcattattgttggtaagcttttgaaccatgtttagcttgagctgaggaaagggtatttgtaactagtttgtagcacgaaattgtgattgatgattttcgatgcactaataggtgacccaggattgggcaaaagtcagctcttgcaagcagcagctgccatttcccctcgtggcatttatgtatgtggtaatgcgacgactagagcagggctcaccgttgctgtagtgaaagattccatgacaaatgactatgcgtttgaggctggtagctcataccctctcctttatttagcccgcacaaatc

SEQ ID NO: 14413 - DNA, 522 bp, Arabidopsis thaliana columbia
  unsure (1)..(522): unsure at all n locations
nnnnnnnnnnnnnnnnnnnnnnctaaagaaggtaagataatctgatttatcaatattattgtgtgatttttatgtgagcagaagatattcatcagcaacgattacattagtcattttattttgccgacggctcattgtcgaaagataagcgtacgacagtattatcagaaaagagtgattttttatccaactacacttcagcgcactgcgtgtaaaaaatgcctctttcttatgcgggatatcatcatttcatcatgatgtctttggtgagcggtgaacacaatacacctgcgctgtctcttcaggatgaatccctggtctggtgcctgcgggctgatgttgcagcagagcttaggtcacttagacgctactatcatttatccaatggcatggaatcgaaatcagtcgatacccgcagtatatatcgtgaactgggtgcaacgctgagttacaacatgcgcctggggaacggtatggaaatgaaccctggctgaaggcggctgtcgcaaagaatttgtcgat

SEQ ID NO: 14414 - DNA, 885 bp, Arabidopsis thaliana
tggtttcttacatccaagaacatggtcctggaaactggagatctgtgcctactcacacaggtatcttcttctatcttaatattatgtttttttaatgaacaatagtaatattttaatttcaattgttaacccctatactcttcagaagtaccctttaatgttttttgtttttttcttgggtttgtgattgttttgttctggcttccacttggttggtatgatcatttaatgaaaaggaaaaattgtaataatatccgatttatggcaccagcttttttgtccatatatcacaaattaattactcttttaatgaaattatcttgttgttgttgtggtgatttaggtttgaggagatgtagcaaaagctgtagattgaggtggactaattatcttcgacctgggatcaagcgtggaaatttcaccgagcatgaagagaagatgattctccatcttcaagctcttttgggaaacaggtaaatacatacatattcacatgcacatgatctataaaagtatacaaattcttttatttttttgggtatgcataaagataaggttttgaactttaaataacttggggaccaaataattatgaaggtgggcagctatagcatcatatcttccagaaaggacagacaatgatataaagaactattggaacactcatttgaagaaaaagctcaagaagatgaatgattcttgtgatagtactatcaacaatggccttgataataaagacttctccatatcagacaaaaacactacctcacatcaaagcagcaactccagtaaaggtcaatgggagagaaggcttcagacagatatcgacatggctaaacaagctctttgtgatgccttgtctattgacaaaccacaaaacccaac

SEQ ID NO: 14415 - DNA, 461 bp, Arabidopsis thaliana
tagtaacgtccgccagtgtgctctaaaggagcaggaaacgtcgattttactggatattattcgcgatctacaacagcacggtatcgcctgtatttatatttcgcacaaactcaacgaagtcaaagcgatttccgatacgatttgcgttattcgcgacggacagcacattggtacgcgtgatgctgccggaatgagtgaagacgatattatcaccatgatggtcgggcgagagttaaccgcgctttaccctaatgaaccacataccaccggagatgaaatattacgtattgaacatctgacggcatggcatccggttaaacgtcatattaaacgagttaatgatgtctcgtttgccctgagacgtggcgaaatattgggtattccggactcgttggtcccggacgtaccgagaccattcagtgcctgtttggtgtgtgccccggccaatgggaaggaaaaat

SEQ ID NO: 14416 - DNA, 1599 bp, Arabidopsis thaliana
gaagatgttaaagatgatgaagacgatgatgatgatgacgaagaagaggaagacgacgatgctcaaggtgcttttgattcctccctcttttctcaccagtgtagctcggcttttagagttttgttcgtcatcaatcattacttaattttccagatagtgttctttagaaatgtcattgaatattaatcatattaatcattggccttgttcgttctcacatttgtagtttcgtgtatgcaaagagtgtcacatttcaagaattactgcatagttatgtagaaatggttgatttagatgtttctgttaacatatagagatgtgggagatgaatcattttgctgatagattgaggccaagatttatggatttacttgactaagtttcggagaatagagatcccaatatgtttatagcatagtgaattgttcttaaaattgaatgaagttttgttgttgtaggtgtaagtggaagttcaaagcagagtagaagtgaaaagaagagtaggaaggcgatgttgaagctcggtatgaaacctgtcactggtgttagtcgagtaaccatcaagagaacgaaaaacgtaaacctttctctgttttctcaataagtttagatttttttctgcgtgtgtgattctaatgatacactacattaatgttatcaggttctcttctttatctctaagcctgatgtctttaagagcccgcattcagaaacctatgttatattcggtgaggccaagatcgaggatttgagctctcagcttcaaacgcaagctgctcaacagtttaggatgcctgaaattggagccacatctcagagagcagagccttcgacagccactgtagaagcacaggtggaagaagattaaggaggaaatcgatgagaccggtgtggaggctcgtgacattgacttggtcatgactcaggctggagtttctcgtagcaaagcggttaaagcactcaagagtcacgatggagacattgtaagtgcaataatggaactcactacttgagagttaagagagattgagtctctatgctttattcacttgcagattgttttcaaatacttttggatttatcaggaaattggattattgttgtccttacgagtatctaatctagtttgtttgttatgatgcttatgcagtatctgagttgtactctgtttttcacgacaatgtattggagaaaatacatatcaaaattcgactaaacaaagttcgagaaacttccaaattctaggattagaaacatcacctactaacaaatagacagatatactaatatctaaatgacattcgagcagaggacagaagcacagacgttggagtcctatgcattgattctaactcctccatcttctgtttctcttcaccactgaaggttgaattcggtgagattcccgctgtttttaaatatttggagttttctagaatgtaccttatgatttttttctcatcttctcttccaacatatccgtcccactcaaagatctcgagatgcgacgacaaacatcttggaatagaactcggttgattccataaagctgggtcatgattccatctcggaatgtcggagtcgaccagaaaaacttta

SEQ ID NO: 14417 - DNA, 609 bp, Arabidopsis thaliana columbia
gtatagaggatcgataaatttgtagttcattacaagctttgccattgaaaaatagaaattatactttaaattaagaaaaaatatctcatcataaccaaaagggaatttgaggaaactcaatagagcaataacacagtgtacttagaaacaagcaaaacaatcatgtctctgatttaatcgttaaaaattgttggcaaagaaaaaaatcttgcttaccaagtaacatccaataggaattgtatcaagctagcagccaatcacaagacatggatgttgcatttggatgagcgtttaggaagaagagcaagaagatcatttgtgagttgcaacttgttctcgatctcatcactagtgttcactttcacctcttcaagattctccatttctctcaagaagcatttgacttggttcagttcctcaagtcttcctttatactcttgtatctcaaccaccttcaccatattcccaccatcaattccaacctcacagtcgcttataccgtacaaaccctcgaggactagagtttctagctttggagatttttcaatcatattgcaaagcaattgccaatattctttctcactaccctcaaaatgtagagtggccaag

SEQ ID NO: 14418 - DNA, 480 bp, Arabidopsis thaliana
atttttgtatttttagtacagatggggtttcaccgtgttggccaggcatggtgaagataaggcaacccacagttccttttattttcagtccttctctactcatccagctgcctcagcctcccaaagtgctgggattacaggtgtaagccaccacacccagcttttctggaaatattcagacacatggagaagagggtgctgcccgcagaaaacaacagcctgagttgaaggtgagaaatctcagccatatgtcagggatagtgatttgatcccttagtgtggctggatcgtaaggagcaggagtgcaaggaccaggagggcagattagagagacagggctaggacactgagaacctcgattgtctatgttatgtcctgggttttgtactgaagggttttaagcaatggagagatggggccaggtttgcctgctagaaaagtccccatagaagctggtatggagaagagattaaaagggag

SEQ ID NO: 14419 - DNA, 638 bp, Arabidopsis thaliana
cccatttctctgcttgtaagttagtccaagaactcgttgattctctactatctttatctacaaagctcacaagttttaaaacgtttttttcagggcatctttctcttgactctgatctcatctttcgaaaacttgagacctagaccgtgtgaaacaggctcaatcctatgccaatcgccatcaaaactccacctcggggtcttgtatgcagcgttacgtctagtgactgctggaacttctgggacacgggtggctttggcatctgctggtgcaaaccagtatgataaacctagagacaaaggaagcttcttcaactggtacttcctcacggtaaatacaggcgcgattattagcgcgacacgaattgtatatacacaggagaatgctagctggagactcgggtttggtctttgtgcagctgctaatttgatcagtttcatagttttcatttccgggaagagattctacaagcatgacaaaccaatgggaagtcccttcacaagccttatccgcgtcttagtcgctgctatactgaaaatcaaggtagtgacctctccaaagaagaagattatcacgggaagttgaaaagaaccaagacttgtattggaatgcttccaagagcttcaggtgaatataaa

SEQ ID NO: 14420 - DNA, 569 bp, Arabidopsis thaliana
caacttacaatatctcagtctctgatttatacctttccgcaaattgaaaagaagtagattgtacgttctcacatatctgttacatacgcagataaccaaatacatgcgacctgtgattcttggttgtatcttatgtgcttcacattctcgcacatttgctcttattaatggctattccgctcccttggaggtctacaaactactggagcatcatgatgatgcaggaccaggtatatccaattcgaactgaacttcttgatcattataatgctaagacgagtgaagatcacatctcacttttacttcaagaatagtaatttgccattggaaaaagggtaacaaagtccttttgacaaaagttttctaatcactgatgacttcttggttggttttgtatgtcaggttctgttctatgtgtgggaagtgaatggcatcgatacccatcatcgttttttgtgccccactacattagcgaagtacggtggatcgatgatggattccgcggtcttcttccattcccatttaacaatacacttggaggcacttcagcatcacctccatacttcaac

SEQ ID NO: 14421 - DNA, 579 bp, Arabidopsis thaliana columbia
  unsure (1)..(579): unsure at all n locations
tnnnnnnnnnnnnnnnnnnnnnnnctaaagccgccagcggatttatcccacgtccagactttcgcgggctgataagtattgtctgtcatagtgagttgccttctgagtggtagtgttgaagcagtgtagcaggtcacttgctgtacagaatgtgaattttttaaccctttgcgccagcgctgcgatgaggtgtatgattagtctgacctctgtccggttaatgtcgctgagcaggtaatcagagcacaacaattacgccaactgcttaggttgtattgttaaaggtaaagtgatgagcaaaggaacgaccagccaggatgccccgttcgggacattattgggctacgcccaggtggggtagcaatctactcttcagattacagttctctcgatccgcaggaatacgaagatgacgccgtattccgtagctatatcgacgacgaatatatgggccacaagtggcaatgcgttgaatttgctcgccgttttctctttctgaattacggtgtggtctttactgacgtgggtatggcgtgggagattttctcgctgcgcttcctgcgagaagtggttaatgac

SEQ ID NO: 14422 - DNA, 1408 bp, Arabidopsis thaliana
ggtacagttttggtttcggttcggtttagactggttatttgtttctgtttggttttggattcggattctgtttcttaaattagaaaaataaatccatttaaaccatatagataaagatgtagttcctttttaggatagtgaattttggttcgtttcggttcggtttcggatctaattgaatgttgatgaaatcggacggttaagaatcttactctgaccactaagttcggcgaggaagagacgacgccacgtggacaaatcataagcagctaaagcactataacgatttccaagcaagtcggcgacggcgacaaggagacggtttctgacgtggtcgatagcgattcctagggaagcgttaccggcgaggtcaacgtctttgaccaaagtgacttcttcaagaacgtcgtcggagtctttaggaacaatctcgccgactccgccaccgtccatgaaggagacaaggaatctccgaccaacatcgtcccacttggcgcactctcggaagaagccggagctttggtaagagaagacgtgtgtagaaggaacggctagctctaaggagatgaggtaagctattggaacggcggagataacgaggaagagcgcggcggtgcatcggccggagcaaaaccagggagacatttttttttgaaataagagaaaaaacgggtagagagaaataaattgggtacgacgaagaccaaaacttatggggaaacaagttggtgagcgaacgttaaagatttggtgatgcgcacgtagtgaaaactagtatttggtggcccgttaaatgtattattgggcccaggaagtgtactttaaaccactttaacatatagtagtgggagctttaaattccaattcaaacgtttttgtttgtttgcatgtttttgttcaattgttccgattttttaggtttgaatttctataaaatgcttaagggttccatttaaaaaaaaaaaaaaactggaaggaataatttcattaaattgaaatatataaaaatatatatagcaaatttcgaataaatcaagaaatttatgagtagtagcctttgaagaaatttgaatggaatgacttatgcttaaccaaataaaaatttgtttgattacaagaaattgtggtgatgtatgtgttttccgtaaggcccgtaacgcgagagcggatagatcgtcttgcctatcagcatctcgagtgaaagtgttggagatatcaggttacaaagatagtgacaaagatctgaaccaaatgaagcattttttggctacattaccgtgtcttgagctggtcaaaatatgtgcttcacataacctcaaagtgcccatcgatatacaacgtcttttgactcttccaagagcttcaccaaactgcaagttccaagtcattcttaaccaaaaaactagtg

SEQ ID NO: 14423 - DNA, 561 bp, Arabidopsis thaliana columbia
cgttttcttttgttttctcttagaatcctttgtaaattctttgctcacggtgcatgcttgaaaggggagcactgtgaattttctcatgactggaaggatcctacaaataatgtaagctttaactctctcccctatgtatgggggaaccagctttcatcaactttaaattcctttgtattgttaatgttctctaagaaacgaccatcctatcacagatttgcacctactaccagaaaggaatctgctcttacggaagtcgatgcaggtacgaacatgtcaaagcttccaggcctcatccatctgcttcatcttcgtccgctgtgcctcggccatctcctgcttcagcttccaacactcttgcctgtgcttttcttcctggtgtcgcggaaagagatttgagcccagttccttcttcatctttaaaaccaacgtggaatttggattctcttcaccaggattccgtagacgaggtcaaaacttctaaccctggtacagtcaaacctgaagaactacccatctgctcatttgctgctgctggtgattgccacgtgggaatgaatg

SEQ ID NO: 14424 - DNA, 588 bp, Arabidopsis thaliana columbia
ccttttttcaatcaaaactcccaacttcaaaagggtctttacggaaagcaacaagatttgacatttcacaaatctccacagcttcaaagaccaaaacccaaagagaagaaactgatgacaagatttacctgtagttagggttaaggtgaggaagtaaagagagggactgagaacagacatggcaaggaggatctgacggctggagtaagcatctgaaatcgggaactgcaccggagcagcctgttccaagaaagatcagagccgttccatcatcatcagattgattcttctccatcttctcaagattctgatcttctggttggtctagccaaagctgattaatgccaacggctatatctttgtttattgtattagttgagattatatgcgatcccttacacaaacttgtctttttcacagtatatatattccttttattaacataaaatatctaagccattactttgagtctttgacactgatatatgtagtcataatgatattgactactaatttttccaaacaaaatagtaaaagattaatgacttaccccacaaatccaccggattgtgattttttttgttatat

SEQ ID NO: 14425 - DNA, 626 bp, Arabidopsis thaliana columbia
tcaaacatgggaacatcttcaagacaagaatcatgggatcaccaacaatagtagtcaatggagctgaaccaataggtcatattatccaacgagtttagcttggtggtgagctcgtggccttcatcttctgttcaactaatgggcatgaactgcatcatggctaaacaaggcgagaagcatcgggtcctcagagggattgtagctaatagtcttagctacattgggttagagtccttaatacctaagctctgtgataccgttaagtttcatcatgaaacacgaatggcgaggcaaggaagagattagcctctaccgttcggcaaaagttctcactttcactgtagtatttgagtgtttgtatgggataaaagtggagattgggatgttagaggtctttgagagggttttagaaggtgttttcgctttgcaggttgagtttccttgttctaagtttgctagagcaaagaaagcaaggctagagatagagacatttctagttgggaaggtcagggagaagcgaagagaaatggaaaaagagggagctgagaacctaacacaacgcttttctcgaggctagtagaagagttgacaaaggtgtgatacagaagaagaggttgtagataata

SEQ ID NO: 14426 - DNA, 716 bp, Arabidopsis thaliana
cgtcctacttgccttcccaaacaccagagcctcttaaaaagtatcgaaaagaggagctcgagaccttacaaggcaagaaccgcgaggaagttggtgaatttaccaagtttgagcgcatttacgactatgatgtgtacaacgatgttggtgaccctgacaatgatcctgaacttgctcgtccggtaattggaggcctcacacatccatatccaaggcgttgcaagaccggtcgaaaaccttgtgagactgacccctcttcagagcaacgctacgggggagagttctatgtaccaagagacgaggagttctctacagccaagggcacttcattcacaggcaaggccgtactggcagctcttccctccatcttccctcagatcgagtctgttctattgagtccccaagaaccttttccacacttcaaggccatacaaaatctctttgaagaaggcattcagcttcccaaggatgctggcctcttacctctgctccccagaatcatcaaagctcttggcgaacgtcaagatgatattctccagtttgatgccccagttctcattaacagtacttacgaacctctatcctttttctcattttagtatttcaattttctgtactgttgagactacaactaaactcactttctaatatcattcacattgattcaggggatagattttcatggttacgagacgacgagtttgctcgccagacac

SEQ ID NO: 14427 - DNA, 556 bp, Arabidopsis thaliana
gaggactagaggatcgtagatacaacatcaaattcagcatgctctcgtgacaagtatgtaattgagtactcaatggccctttcttggtaagctcatttttcatcatctggataatcatcttttctatactattctaatgtgaattcacatccttcttttctaaccataggaataacttcatcatttgggacgtccttgatgtcgagtggtgcttggttggctttcccatggagctctttgacttgatccttcagctctttcacagtgtgtgttagctctcttatagctctgtcatgccatttagacctctccttgaattctaaccaatcatttgatgccctcatgcttgactttagctgtttggttgagcactttagtcgagtatcaattgagccttcctcgttcaatgcaacatcctctctttctaacgcaatgacacctttaaagatctctgatcctggtactttgttgtgtgagtctattgacatctcatagctcaaggtctcactagagagaaatcagcttcattacttttggtcaaagcagtttgtaggtg

SEQ ID NO: 14428 - DNA, 390 bp, Arabidopsis thaliana columbia
cttctatccattaacctcaaagttgatataaaaaaagaaagaaagatagaagagctatagaatgtaagtaacttttttcagtttctaatttggattcttaattgtttgtgtggtctgatatggtttgagattttaagccacattatactaattaaccggattatgtatatgcgcagatttgatgattcaaacacagaaaaattgcgaaaaatggtatcgaagacgggagtcgaaaacgagatgttttatttcgatccaaaggttctcgattgggacgactattttttgaacacacatgttatagggctgcttaagtatgtcttctaataattttagttgtataatctttagcttattttactacaacgagtataaattatgtggacacta

SEQ ID NO: 14429 - DNA, 600 bp, Arabidopsis thaliana columbia
atagttaaaacggtttccaaatagccatcctatggtcatagctcctgcaactctaatgcgtacttgggaagacgaagtcaggaaatggaacgtaaacattccattttataacatgaatagtctgcagttatcagggtatgaggatgctgaagctgtctcacgtttagagggaaataggcatcataattccatccgtatggttaagctagtttcgtggtggaagcagaaaagcattcttggaattagctaccctctgtatgagaagctcgcggcaaataagaacactgaaggaatgcaagtgtttaggaggatgttggtagaattgccggggttgctggtccttgacgagggccacaccccgagaaaccagagtagtctcatttggaaagtgcttactgaagtcagaacagaaaagcgtatctttctttcagggacactgttccagaataatttcaaggaactttctaacgtcttatgcctggcaagaccagctgataaagatacgatttcttcgaggatacatggacttagcaagtgtagccaagaaggagacacggaagggtgaatgaggaaaacagaattgtggatctaaggctatga

SEQ ID NO: 14430 - DNA, 473 bp, Arabidopsis thaliana columbia
tcccctacacagacatattatcaagatgcacatacagctttgcgagaatgtcctgagagctaatagcttcgtcctttttggcagatcaaaaaaattccctcagcagcttcccagtatagagaggcttatgcttttcaacactacaagtcatattttggtgctttcaatcttgccttggaggagatgcagctgttgtttctctcgctgtacctgcaacaaccgagttttagacaactttgaagatgatgagagagttcttaatttgctgatcagaagcaaggctaaccattgggctggctttctccggtaggtgtttgtacagttgtgggttgtggcggttcttgagtctgagtttgatcctctgtttggctttcagcgggagacaaagcttttagctgctcttcagtgaacttgaggtaatcctcggatgtgtaaggctttggtgattgtgaatcatctgcttatttcaatga

SEQ ID NO: 14431 - DNA, 597 bp, Arabidopsis thaliana columbia
tggatcaaaaatcgcccaatgagaggaaacttgagtatcataaagatccatcccacgagactttccggaaccttctggaagcaccggacatcgatgcagcgagttagtaactgatcggattccaatgccacggattgtacggtgtgaccagcacggtagtcaagctcggtttcttcttgccaagctcaatccttcagtaactcagaaaacagatcataccggtggttcagatattgttctcactgatgatatgagtcttcaacatttcctagaagatttgcaatctctggcagtgaaaggctaggaaatgtggcaccaaacctgtaaaattggtttggattttaatcggtacaggtaatggttttgactaattgggttatacaaacaattaatattggtatttagtcattatctacaccttatattgtcaggctttctcaatcttatagattgatatggaaattctaaatgtatgatttggtttggacctgatttgttatacagaaaggttttgctctttgtgaacactactgtaattgccaatgggataaaagacagtttcaactcaggcaaacccgttgatcgtgactataagtg

SEQ ID NO: 14432 - DNA, 546 bp, Arabidopsis thaliana columbia
cgtctccaattactttagtgtcctcaacttggacaactgcgtccgcaccatcaggtataggtcctaaaggagaaacataccaaagaaaacaataggttgaaatcaaagaaacatatacgttcagacacttctccatgcatatacactaccaaatggaaaaatagtaagtagtgaacaagaacagaaaattagaagcactttcatatactctaaaatgcaggcacaaagttttcaagtcatcaaatgcaatatactcaccaccagttgtcacataagccacagttccaggagtaacagtcacacccaaaccatcattcccagctcttgattcagtaatcaccggatattctccaggaccatctgaagcaacaactgcgtacccatcctaaacaacgataatgtcaagttattaatcaaatattcgctgttgtaatcatcaccagattaaattgatcctattagtaaccttgacggaagcaggatatggaggtaaaggatcaggagctcgaatatcttccgcaacactttccaagtgcttcatacagc

SEQ ID NO: 14433 - DNA, 588 bp, Arabidopsis thaliana columbia
gtaacggcgccagtgtgctgtaaaggccaggttggcacggtgtcgatttgatacacgcaggtcatcatccagacgaaaatgacgccgagcgccatgctgaaaagtaaccagagtttccccaacgcttgcggcattttaccgatgactgccaccagccaccataatccgccaacggcaaaaaatatggaaccggcagcaatctcgttactcagaccagaagctccgattcgattcagggagttaaacgcccgcagtgcgatcccaggtgcatgacagaggcaataaacccgacgcccatcaacagccagaggaaaaacatgccacggacaatacgctgacggtctgcgtcatttttggcggcgaaccagccaattccgctaacaatcagcgcgcctactacgcattgacccaatacggtaaagataaccagtggccactcatgccatccatttcccattttacacttcctccggattagccagataaccagtggtatcgccggtcgggcggctgttggcgttaggtttgataacgatattgggttttgtgaaatgcgcgcgcggcagtggcgcgacggcagcaagagtg

SEQ ID NO: 14434 - DNA, 550 bp, Arabidopsis thaliana columbia
  unsure (1)..(550): unsure at all n locations
nnnnnnnnnnnnnnnnnnnnnnctaaagaaatttcccacctgataaccaccaggagcgatatcccacggttcagcaattaacttcacctgcgagacgaccgggcagttctggatagcggtaaacaacggcgcatcctgacggaactctggcgtacggcccatgactgccgccagatcaaagcggaaaccatcgacgtggcaggtttctacccaataacgcaggcaggcgctggcataatccaccaccgccggatgactcaaattgagcgtgttgccgcaaccggtccagttgtgataatcgccgtcttctcttatccaataatagctacggttatcgatcccacgcagcgagaataacgggccgtcgaggtccagttccgcactatggttgagcacgatatcaagaatgacttcgatacccgctttatgcagtgctttgattgcaatcgcgaaactcatccagcgccgtttctggcgagcaggcatacgccaggatgcagcgcaaacatcgccaccgggttgtaacccagtagttacttagcccatgcgt

SEQ ID NO: 14435 - DNA, 327 bp, Arabidopsis thaliana columbia
caggcaatttggcgtttgtcatcagtctcaggccgggtgggtaataccatccggccattttcatttaagccacttccagcacttcttttgtcgctttcacgccctgatgcatcaacatcattaacgcctcaagtacgccgccgccaatatcccgggctttatcagaaacgctggtgaaatcagcggtttcaccacgaggatcgatatcaccaattttaaaaccaccaaccactgccaggccgtcgttcaacaagccacgcaccatccccgtcaacggtgctttaatttcatgctcaccaatccaggcaatcacatcgccctctttca

SEQ ID NO: 14436 - DNA, 605 bp, Arabidopsis thaliana columbia
gcttgttttgtagcagctctcccacgagcactcttttgggtaatttgtctcatctttctcgatctccgtctctgtctccacctatgtctccggctaataaagccgctgctttttcacggttgaggaaccgcgccgcttctgccgtttccgccgctgcagccgctggttcaatgaactataaagacgttttgagcgagcttgtgaattctttggattccatgagcttagcggaacgcctgcaggcgagttcctcgtcgcccgttacaactccggtttccgctgcggctgccgcgtttgcgtcgtcctgcggtctgagcaatcagcgtctccatctccagcaacaacaaccaagtagccctttgcaatttgctctttcgccttccactccaagttacctaactaactcacctcaggcgaacttcttcagtgatgattcactcctcgccggagacagatgaacgatttcacggcgatgacggccgttatggagaatactaacattgaggatggttcttgtggtgaccctgatctaggatgggtcaatgatctcttgacttgagggattgacggtggagatcgccgggagagatctgacttgagaatgt

SEQ ID NO: 14437 - DNA, 597 bp, Arabidopsis thaliana columbia
ggttgattgcgcaagtctggattttgattttggtacaagacatttgcttgtacaaggaggaagggatttgttggtatacagtattgttattgcaaaggtttttcgaatgtcaaaacaagtttttggattattgattttggaaatctgagtggatggagaacgatgacatgtatcctgatgagcctgtaggttctgacttggaacctcaagagagtgatgttgtttttgcaagagagtcacctcttgtaggtatcatcactcaaccgaccaaatgctctggatctactgcaaagatactgaaatgcaggggtcttgagcaacagaagaagcttaatagacaggatagaatcgaattgggacggcttttccaaggtgctgttagctcacaggattggcaactttcagagagatttattcagctggctgatccacaaactttgaatgatctgttgtgtattagtttagattctatttggttcttgagcacagagcatgagttacggggaatcactgaattgattgctaagatcatatgtcatggtgctcaggactatactagagctacacttaggacttcctttcttgcttcttgtgggg

SEQ ID NO: 14438 - DNA, 523 bp, Arabidopsis thaliana
cacaagctaatggggatgtggatgcttcttcttcgaacgacatctattgagaagaagaaggaggtttggttcgttgttaatggaattcccatccgctttggtattagggagcatgctttgatctctggttttaactacaagccttatccagctaattatcagagtgctgatagtaaaacttcgcgaacaagtacttcaaaccgggataattagacgaaaagacgtgagaaccaagcttagtgagatggaaccggctagatctaaggataggttgcagatggcggttctctatttttaaacaagcatcattgtcgtgcttactaaaatcggggaaagggctagtccaattgatgatttctatctcagggctgcaagtgatcttacgttttgtaagacgtttcctttgagttcatgttaaaatcgatctcacacacattaaaccattttaatggtgtcgtgtcgacactcagtcaccatgtcctgtcccgatttctgtatccgcttgaggtaagtataatgtttt

SEQ ID NO: 14439 - DNA, 490 bp, Arabidopsis thaliana
tagatgccggctgtccaaggatgtgcagggtgaatttcaaaaggaccgagatgaaagggtttacccttgagcaaattaacaatgtactgggtacaacagatgttagtattttctaatattcctagagcaaatatgattttatttatttctaatattcttggtcaaagggcgtgaaattagatttgaagaggtgtacaacgaggatgtgcaggcccgaatggaagccccaacagaagaggaagttcctgcagctgttagaacgggacacccgcagttagttgatgtaatggagaagcttgatagcatcaatgacaagaagaatgaagcttttttggcgcttgcagatatggaaaaaaaacatgcatcgttcgaagcttttatgaatgagacgaaagataaggtaaatataggttatactggatatactgtaccataattggtaataccgcgtaatactagggtatagctaaattttttttttgcagatgtc

SEQ ID NO: 14440 - DNA, 523 bp, Arabidopsis thaliana columbia
tgatcggaaaaaaacgaagtacataacgtgaattgagattaaaagtaccttaacatttcgatggatgtgtcctagtccatgaaggtaaacaagagctttaagaatctcccgcaacaatatagcaattacaggttcctcaagaccatttggatagactgatttcattatgttcaaggaagagccgcacgacataaaaggcatcacaatccacaagctgctactatctatgaaagagcaatgcaccctcaatagatttggatgatcaattaagctcaatctatgaacttctttccttatggtttcctgaatttatctccaacaacagactaaatatcaatttccgatgatagatcctaaatatgaacaaacaaagaacaaagatgaagatacgaaccagatcgttggtgcatttttcaaggttccagatcttgatggctacaatttcatcaagtagaatgcatcgagctctgtaaacaccatcgcctatctcttctaaaatctcgtaatctttcgcaaccagagg

SEQ ID NO: 14441 - DNA, 534 bp, Arabidopsis thaliana
cacacaaatcccccactacttgaaggattacgacagaggagaagatgttgagctatgggagatcaaatatgtacttcgattaaaatcccaatgtctgatttgaatctcatttgcttttaaaaacaagttcaatgtatagctaatccacgttacacacaacaatcattatagagacaaacaaaaataaagtaacaagaccttcaaactaaaatgaaaccacaaggaacagacaataaaaaatatacctcctaaaaaatgtcgaaaggaagaactaaatatagaatcgtttgggggataatagcgaaactacaaaaagtggttccactaggtaaattaaaacaaaatcgatacaacaacaccatctcgctctcgtcattcatttaggtactaccttccgcgggattctcagtctccattgcttcggcagaagctggttgctctggctcactcttgccctcatccgcctgctcacctcccttggcttgtggtgcctctgcttttaccgccggctttggtttggtcattataggcctg

SEQ ID NO: 14442 - DNA, 559 bp, Arabidopsis thaliana
tgaatcttccctaaatgatggaatggcctcaaatgctaaaaactacacaaaatacatgcaaatttaattgttagcttgaattacgaaaatgtaacaatgataaaacatgtgatttccttacctcaagcggcacactgaatccgggaacaggccatggtgactgagtgttcgggacgacatcgttaaaatgattcaatgtgtgtgagatcgattttaacatgtactcaaaagaatatctcccccatggaaatgtcttacaaaacgtaagatcactagcagtcccaacacagaatcatcaattggactagccctttccccggtcttagtaggcacgggaatgatgcttgttaaaaatagaggaccgccatccgcaacctattcttagatctagccggttccatctccattagcttggttctcacgtcttcacgtgtaattaccccgattttgaagtacctgttggcgaagttcatactaccagcttctgataattagctgaataggccttgcagttaaaaccagacatcaaagcatgctccctaataccatagcggatggg

SEQ ID NO: 14443 - DNA, 544 bp, Arabidopsis thaliana
ggatcccctctgtgtaatactggtaattacgggaaatacttttgagaaatacagagtaatactatggcagtactatttacaatgagtgatatatgaatagtaggatctatgtaatactagtaatttcagggaatacttctgagaaatacagagtaatactattgcagtactatttacaattgagtaatataggaatgaatgtttgtttctttcaggatatggaggaagcgttggcaatgcaaccactcggtgtgtacttcacggcgtcggaatataccaagaagataaagttagcgacgaggtgttatatctcggaagtgttgaagacctacgctgacttgaaacatgctctaacggatagcgagaagaattattttaaggagcatccgagtttcaagcacatctaccatttgtcatccggatataccacaagttaatagggatgtggatgctttttttcgaacggcatctattgagaagaagaaggaggtggttcgttgttaatggagttcccatcgctatggtattagggacatgctttgat

SEQ ID NO: 14444 - DNA, 546 bp, Arabidopsis thaliana columbia
ccctgatcttttttggaatagatgctgggatcttcacgttcactaaacattgaagagcatcggaaagctgatcatcagcaatatcaggagatggaccttctcgagggtgcacatgtttttgctttctgaagggaattcgttgaacgagggaagagagtaacttgggcgtaacaagggagacaaaggaaatgtggatcgccacaagctgcaaacagagcgagcatgaacaacatcgaaacagttgtcccctagatacttcaagatacagtagctcctcagggagctcagaccagtctggggttatcgatgatgttgatgtcttcttcgttttgggttctgccatgtttgctaatggagacagaaaacgctgcaatctacgaatttgctaaaaaaattctaatttacatttgaattgattgtacagtaaaatcgcaacaaaatattggggaaaaaacccgaagattcatttggcataaagagatatgatcgtaccgtaacttggagcccaaggtctctggagaatttgaaggaagagagagtgatttt

SEQ ID NO: 14445 - DNA, 869 bp, Arabidopsis thaliana
cgaacatcgaccgcattctagaagagtcccacaacacaccattcacacacaggatctctaacgcgataatctcagatccaggaaaactaagaatcgaatacttcaacggatcttccgacctgaaaggacacttgaagtcattcatcatctccgtggcccgagccaaatttagaccagaagaaagagacgccgatctctgtcacctgttcgtagagcacttgaaagggccaactctggattggttctcgagactcgaaggaaattctgtggacagttttcaggagctatcgacactcttcctgaagcaatattcggtgctaatcgatcccggtacatcagacgccgacctgtggtcagtatctcagtagcctaatgacccgcttcgagacttcctcgcaaaattccgatctaccctagccaaagtcgaaggaatcaacgacgtagcggctctatctgctctcaagaaagcactatggtacaaatccgaatttcgaaaagaattaaacttgtccaaaccacagacaatccgagacgccttgcaccgagcatcggattacgtatcccatgaagaagaagtggaacttactagccaaaagacacgaaccatccaagcaaacgcctcgcatcgataccagtgctccaaacaacatagagggcgctcaaggcgggacattcgttcaccatgaaggacgaggccgcggtcgaggcgaggcgaggccgcccgaggcgaggacgagaccacggtcgtagagcggtcgagaatctacacttggacgaaggatcaactcgcaggaaacgagcagaaatattgtgagttgcataagagttacggccatcatacttccagatgtcgtagctcggagcaaagt

SEQ ID NO: 14446 - DNA, 800 bp, Arabidopsis thaliana
cgtatggcttgtttattcctttgtataataggttggtgagttggccatcttggaagtcatgttggggacattcacgctgataagacctgaaacggagccaagatgctctaagggactcggctggagcctgagtgaacgaagagatttgcaaacgaattgcctctgtcacggctacatagaagaagtgattcatgaatgcattctttgtatcagtccaattggttaatgaacctggttcgagttgacgcaaccatgatgttcctctactctcgagagagtgggggaagagtttgcaaagaagataatcagcgggtacaccttctgatttaatagaggaaacgatgtctttgaagacttccaaatgatctaatggtgattaatcgggagatcctctaaactttcctctagatacaagatcattataggcagggtgtatagcaaagtcttctctttcaaatggaggaagcttgaatgttgatcaatttgtgaagaagagatcagttctgttaaaaatcgcctaatgtagccgtttggttctatagagggtgtcgatcgacaccctgatggtgtcggttgacacaaccgtgaaagtctgccatgggaacttgattctcaatctgaaggtacctgaaacacaagagaccataagacaaagaaacacgtgaataggtggtataacagtagtatctagacttaaaatgacacatagtctaatggtaagctaaaagagggccacggcaacggcgccaaatttgatatagctcaaattgccttaagcttactccctcaaatgagagata

SEQ ID NO: 14447 - DNA, 677 bp, Arabidopsis thaliana
taatattggcataaagcttttcctttctaagcacttcgaaaaccatttttagatgctcaacatgctcttcaagactcttgctataaactaagatgtcatcaaagtaaacaacaagaaaatgtcctatataagctctaagaacatgattcattagtctcatgaatgtactaggtgcatttgtcagcccgaatggcatcactaaccattcatataatccttgtttagttttaaatgcagttttccattcatcaccttctttcatcctaatttgatgatatccactttttatatcaaccttagaaaagatgctagaaccatgcaattcgtttaacatgtcatctaatctaggtatagggtgttgatacttcaccatgatattgttgattgctctacaatcaacacacatacgccaacttccatcctcttaggtacaagcaacaccggaacagcacatggactcatactttcacgaatatggcctctctccatcagctcattcacttgattttctagttacttggtctccacgggattggtcttataagctcctggaacaaagtcaatttggtgctcaatgcctctaatgggtggtaaccttctgaatttcctcgggaaaacatctggatagtctgccaaagaacttaatactctcggcaaaccggttcaaagctgttatg

SEQ ID NO: 14448 - DNA, 870 bp, Arabidopsis thaliana
ttacaattgagtgtatatgatagaggatttgtgaatactggaatttcgggaatacttttggaatacagagtaatactgtggcagtactatttacaattgagtgatatatgaatgaatgtttgtttctttcaggatatggaggaagcgatggcaatgcagccacttggtatgtacttcccggtgtcggagtatcccaagaagatgaagttagcaacgaggtgttatatctcggaggtgttgaagaccttcgctgacttggaacatcctctaacgcatgttgagaagaattattttatggagcatccgagtttcaagcacatctaccacctgccttccggatatacccacaagttaatgcggatgtggatgctttttcttcgaacggcatctattgagaagaagaaggaggtttggttcgttgttaatggagttcccatccgctatggtattagggagcatgctttgatctctggtttcaactgcaaggcctatccagctagttatcagagtgctggtaatatgaacttcgccaacaggtacttcaaaaccggggtaattagacgtgaagacgtgaaaaccaagctaatggagatggaaccggctagatcaaaggataggttgcggatggcggccctctattttctaactagcatcattgtcatgcctactaagaccggagaaagggctagtccaattgatgatttctgtgtgaggtctgcaagtgatcttacgttttgtaagatatttccatcggggagatattcatttgagtacatgttaaaatcgatctcacacaaattggatcattttaacggtgtcgtccgaacactcagtcaccatggcctgttcccggattctgtgtgcgcttga

SEQ ID NO: 14449 - DNA, 602 bp, Arabidopsis thaliana
  unsure (1)..(602): unsure at all n locations
ccgttccaaccaggatcagtaatatattgtgcattaggcagccaaattattcttgaaaataatcaattccaagaactttgtttgaatggagctgaaaggtttaccatttcttgtcgcaatcactacaagaatttcggccattggtagcagatgattgtagcactaattcactaactgctagtaaaagtgataaaatcggatggcaactatattgtagcattaatttagtgctgagaaagaatttcattaagcggcaacccaaaaatcattacgatagaagaaaaatcattgtggaggcaaaaaacttagccaaaaatttggtttttttgccactctcttcacacttagacaaaagcattcctcacttagacaaaatagacaaaacacttcgtcgacgataccataaatttcgtttcgggtcactgatataggtcaaattgcattaagaccactctatcaaataagagatcgattgtaacacttaagggtcgaattttacaaagttcttggatcaaacaatagatcaagattttgaattaagctaagtanaatagtaatgagaatagataaatagacgacaataatagcaaattgtgaggttg

SEQ ID NO: 14450 - DNA, 544 bp, Arabidopsis thaliana
tttgccatcttgctgctgcttcttcttcatcttctgctttgacggtggattaggagaagcagaagtcggtggtaacgaagaaggagaagagggtttttgaagaagacagcgttgttgttgttgttgaagagctagagatttagctcgagttaaaacaccaagtgaagaagaggaagaaggtgaaacaacatccattaaagcaatagaggattcacctccacctccgcctccacctccaccaccagctccagctccagctccgtcgattttgctctttcttatgtatttccccattttccgttagcttttcatcagagagaaagaaagagagattgggaggtgtgagaaaaatcggagttagggttgtgaagattagtgctctttgtggggtctctctctctctctctctcgcgctctctctctctctctttttttgtgtgtgttattttttttttcaggtggctgcttcttcactactgtgagtaatgtactttgctatttttcactttagtttttaaaaaaaaaaatattttagaacttgagt

SEQ ID NO: 14451 - DNA, 542 bp, Arabidopsis thaliana
tgcttgtttttcctctatttccataagcaccaacaaagcttcattcagcttatcattgatggaatggagcttctccattacatcaactaacgtcgggtctcccggtccaacagctgtgggaacttcctcttcatttggggcttccattcgtgcctgcacatcctcgttgtacacctcctcaaatctaatttcacgcccttgaccaagacgcttcatccaactatcaactacaacatcgtgcttatcaacatcatcctctactcccgtgatttcagccaaaagaggtacttcttcagccttctctctaattatactctcaatgacctatggaaataatagacaatgaaatattagaaagaaataaaatcatatttgctcaaggaataataggaaatactaacctcagttgttccgagtacatggttgatttgctcaagggtaaatcctttcatctcgatcctcttgaaattcaccttgcacatcctttgacaaccggcatgtgcaccctctttttcttctatgaatctttccctaagtgatgg

SEQ ID NO: 14452 - DNA, 486 bp, Arabidopsis thaliana columbia
agaatctgttcatatcagagagtaaccaggttattaagtcacttaattacactacactataaccaaatgcgcagaaacttggatcaaacaaacctggacaagctggggaagctgtggtgaagatggtttggttggagtaaccagcatagacgcaatcacgaggttgtctgcaagaggcgttaagcaaagctccatcacattgtgaaaatggtgggcaggtttgccagttcgaaggcttaatctcagatgatgattgacagcttaaactgatcacaagatacaaaaccataaccatcagaatctagaaaaagaagaaaaaagaacaagcttatcctatgggacaaacacaacgagattatcaatcacttaacgtccaattcttcaaagcgtcacaagtacacttgacgcaattgtttgcagtgaagacgtatgagttgttagacagaagcagaggagcatccaacgagtccttcctcacagaagagc

SEQ ID NO: 14453 - DNA, 590 bp, Arabidopsis thaliana
  unsure (1)..(590): unsure at all n locations
tagtaacgtccgccagtgtgctctaaaggccactgcgcgagacntgattcgctacgaccatcgaaccagttcagccaccacagagtggcgttcagcggataatcgcgcacgagtttctcgcgctgcacacgcgcgttgtcctgacgaccacttaacaccagcagcagattatgcaggcaaagcacttcctgattggttgggcaggcgcgaagactttgttggcaaaaatccagaccagcgtcgaagttactattacgcgccgccagtcgtgccaggccataatagccaccggctttgctgttgccgctccagaccgcacgccagaaatcctcttcggcttgttgatattgtccctgacgttcgtaagcactggcgcgaatcaaactcgcctgtccgcactgcgagtttttgttcagcgcatgtgccgtttcagagcctgagtggcatacgccacgcttgcgggaaatctgcgcggttatatccagcatcgcagcgccaggttacagcgataatccacgggtccagcgcacgcgcgcaggtagtaatcgacggtgacggctgcgtgatgatattgctcagatgtgacgata

SEQ ID NO: 14454 - DNA, 758 bp, Arabidopsis thaliana
catttgagactgaccaaaggacttgagcgaagtcactacctctttggttttaattcaagctcaaggacctcatcaagatggataagtgattcatgagtgccctttttccctacatttaattttgtctcaatgggttttccaaaggaaggtttttaatgaggcttatgttttcacttcatataatccattttgatgattcaaggcccaagcccactaaaataaagagacaattttatggcctttgaagttgaagggttacttttgaatttcaaactttgtttttaatttctgttgtgttattgatatgtctattatttgcatgttttcagtgtccattcatcatcattttgagtttagttttgtatcattcatcactgtttgatatcatttctcatcattattgcatactttgcatgattaggatagttttgcatacatattgcatttcagagttgttttcaggtaatttggagctgtttgcgagcaatttggaagaaacgagcctgaaccagaagacatactcgaccaccaggtcgcgtgcatccatcaccatactcgaccccctggtcgagtgactttggagccattcttcccatctactcgacccccaggtcgagtaacctcagctcaggccacttgatgacgccactcgaccccctggtggcgtataactttgccacaccacctgaccacactcggccgttcactctaccaccttactcgaccccctagtcgcgtatcgtcactcaccaccaaca

SEQ ID NO: 14455 - DNA, 518 bp, Arabidopsis thaliana
gttgttggttgaacagataacaccctcagctataacttcatccaatttccaatctaaaactctgcatctaccaagttgatcatcatctacaccagtatcctatattagagtagtatttattagtaatcgtctgatggaacaagtgaacatatatagttatagttaaaatacattaccttgccttcatttgccgtttctgagtcattctgactctccaatccagtgtccaatataactttattaactggccatgcaattttgagtcctaacgcttgttgaagtaagaacacatctggcgttggcctccaaacagatgcttgtggaactgatacagtcgtgacgattacagctgcgccatattcacctagtggaatatgacctatccgatagttaggttcagcagagcaaaactctccttcaccaacaacaatatctttacttgaataccaatccagtatctgacaccttactcctttgctaacatcattgacctccgagttagaagtcaagtagagttt

SEQ ID NO: 14456 - DNA, 521 bp, Arabidopsis thaliana
caaagcttcattcagcttgtcattgatggaatggagcttctccattacatcaactaacgtcgggtctcccggtccaacagctgtgggaacttcctcttcatttggggcttccattcgtgcatgcacatcctcgttgtacacctcctcaaatctaatttcacgcccttgaccaagacgcttcatccaactatcaactacaacatcgtgcttatcaacatcatcctctactcccgtgatttcagccaaaaggggtacttcttcagccttctctctaattatactctcaatgacctatggaaataataaacaatgaaatattagaaagaaataaattcatatttgctcatatttgctcaaggaattataggaaatactaacctcagttgttccgagtacatggttgatttgctcaagggtaaaccctttcatctcggttctcttgaaactcaccttgcacatccttggacaaccggcatgtgaaccctctttttcttctatgaatctttccctaagtgatggat

SEQ ID NO: 14457 - DNA, 956 bp, Arabidopsis thaliana
ataataggagatactaacctcagttgttcccagtacatggttgatttgctcaagggtaaaccttttcatctcgatcctcttgaaattcactttgcacatccttggacaactagcatgtgcaccctctttttcttctatgaatctttccctaagtgatggaatgacctcaaatgctaaaaactacacaaaacacatttaaatttaattgttagcttcaattacgaaaatgtaacagtgataaaacatgtgacttacctcaagcggcacacagaatccgggaataggccatggtgactgagtgttcgggacgataccgttaaaatgatccaacgtgtgtgagatcgattttaacatgtactcaaaagaatatctcccccatggaaatgtcttacaaaacgtaagatcacttgcagtcctcatcaactggactagccctttctcaggtcttagtaggcacggcaatgatgcttgttaaaaactagaggaccgccatccacaacttatccttagatctagccggttccatctctattagcttcgttctcacgtcttcacgtctaattaccccggttttgaagtacctgttggcgaagttcaaactaccggcactctgataattagctggataggtcttgcagttaaaaccagagatcaaagcatgctccctaataccatagcggatgggaactccattaacaacgaaccaaacctccttcttcttctcaatagatgtcgttcgaagaaaaagcatccacatccccattaacttgtggatatatcaggatggcaggtggtagatgtgcttgaaactcggatgctccttaaagtaattcttctcaaaatccgttagggcatgtttcaagtcagcgaaggtcttcaacactttcgagatatacacctcgttgctaacttcatcttcttggtatactctgacgctaggaagtacatagcaagtg

SEQ ID NO: 14458 - DNA, 829 bp, Arabidopsis thaliana
ctatattaaattcttgtaaatccttttaaaatctttgtaaagtcgttaaaaacacttgtaaatcttttcaatgttgtaactagaaaaagatatagaagaaatgagtgtgttattccattgaataaagggttctttatataggagtaaaaggaaagggtaaaaccctagaaacatctagatgatgggcttagatgatgggtcttataatgggcatccatctttattcataacactccccccttgatgaccattgtagtaccataactcgtaaagtatttgaaatgctgcctcattaaaaaccttaccaggaaaacccaatggaaaaaaccatggttaagggaaaaagagtgcaacatacaattactcccccttatgagtatattcgtcgagatctttgagacggcgtaatccgatacgatagactaacttcttgaaagtagcagtaggtagcgccttggtgaataagtcagccggattatcattcgaacggatctgtagaactcgtacatcgccgctcttttgtagatcgtgtgtgtagaagaattttggtaggatgtgctttgttctatcgcctttgatgtatccgtctttgagttgtgcgatgcatgctgcattgtcttcgtacataattgttggagtcttttccctgcatacataccacaatcttcttgtatatggtgaactattgatcttaccatacacactcgcgactagcttcatgaattgctaaaaactctgcatgattagaagatgtggcaaagattaaaaagtatttgagaataagtccgccaaatcttctcttgaacaaatttttggataaagtacatcg

SEQ ID NO: 14459 - DNA, 566 bp, Arabidopsis thaliana
tccgcagttgctgtgtttcggctaaagaacttcacatccggattcaaatatttccaaatttctctaactctatcatactccacataagtaaatggcagatcgtgctggataacatgctgatttatctttctagcttgcaatcttgcttccgaattaaccatcatctgcccaatatcaccatttttaggcacaagcttacatttaagcaaatgacgtctaaatgtgtttgtaccaattttgtgagcattgtacgcataattcttcttgcaaatgcatgcattgtactcttcctcaagctattaatcttggtaatcaatgcgaaatgttcccaaacttctgagtattgccttctcttctttggttttgatgactttcccttgtcagcatcatcttcatcatcatcaataaacccctcatcatcataatcgtcgttatcaacatcatcatcaccatcatagacttttatttttggttttgtagatgattatggttcacactacttttctttttctgcattttaggtgtttctgatgcacactcactttcgttttctgcttttttgatgg

SEQ ID NO: 14460 - DNA, 873 bp, Arabidopsis thaliana
atcacgggacaaggcgacagagagttcatggctgagatggaaacaatcggaaaaatcaaacacagaaaccttgttccacttttgggatattgcaaggttggtgaagagaggcttcttgtctacgaatacatgaaatggggaagcttagaaaccgttcttcacgagaaatcatcgaagaaaggcggaatatatctgaattgggccgcaaggaagaagatcgcgattggagctgcaagagggctagcgtttttgcaccatagctgcattcctcacattatccacagagacatgaaatcaagcaatgttcttctggacgaagatttcgaagcacagtgtttcggatttcggaatggcgaggctggtcagcgctctagacacgcatctgagcgtgacgacgctcgcgggtacaccaggttacgttccaccggaatattaccagagtttccggtgtacagctaaaggggatgtttacagctacggagttatacttcttgagcttctgtctggtaagaaaccaattgatccaggggagtttggagaagataataaccttgtagggtgggcgaaacagctatacagagagaaaagaggagctgacatatctggatgcgtgcccagtaagggtttaatcaggcgatgttgagctgtatcatcatgagaagatcgcgtctgtatggaatgttgatgaagctgataaatcctaagatgacctctctagaacccttacacaatgctgttctggtgtttactgatggctcctctaaagagcgagctggatttcttataatcaacaggtaatcataaagactcctggcctatcagctcaattagcagaattaacagcagtactgaatgtctttcagtctgtgagtg

SEQ ID NO: 14461 - DNA, 506 bp, Arabidopsis thaliana columbia
cttcaaagcattttctggttgctttcccttgaacaattttccaagaataagaagaaaggtctcttctgtaggacctaaatcagagatcttcatttggcctaaaacctctaaagttttctcgaaatttacagcctcaaggaatgcatgaaatgtatcaactgttggactaaggttctcactaatcatggttgccaatacattcctggctacgtccagctttccagcctcacaaagggggcgtatcatcgagttgtaggtcactgaatctggctttaatccttcctcgttcaactttttcataagcttcatagcttcatcaaagcaatcctcacgggtcaacacataaaccaaggaattgtaaacttcaatccctggagccaatccccgtttcttcatttcatcgtatagcctgagagaatcaaaaaggttcccaactttagagaagcaagagatcatgtgactgtaagagtccttgttaggcgtgatacagtaatccccatctctcg

SEQ ID NO: 14462 - DNA, 525 bp, Arabidopsis thaliana
tagtgactaataatattacattaaacctaatgtataaatagaagccccatcttctacgcctttataattagcaacaaccaaaaacattcatttgtcattttgtctcctcttttgttttctctgatcactagtatggctgtattcagagtcttgcttgcttctcttctcatatctcttcttgtcctcgacttcgtccatgccgatatggtggtacaattttaacaaccaaatatattttcttatttgattttattttttcacaacttttgtctacgttctaatggaatttttttcaaaatattcatgcagacgtcgaatgacgcccctaaaatcggtaatatctctatcatataaacacgtacgttgaatttctatatacgtgtgtttaattgaagttttggttggaaattgtatgtatttgtagattgcaacagcaggtgccaagagcggtgcagtctttcgagtaggccaaatctttgtcacagagcgtgcgggacttgctgcgctaggtgcaactgcgtggca

SEQ ID NO: 14463 - DNA, 541 bp, Arabidopsis thaliana
tatttggcgtcaattagaattcagagaatactgtttttccggagaagaatgataaaatccgatttccagatttatgggtacaatcgtgatttggggttttttctttttaaatatggttgaaatcagtggaaatgtttaggaattttctagagtagtccaaagttgtaattcactaccgtagtagttgatctccaaggtcgagattatgggataactgtttctctgcatttgatgacattgcagcctagtcgcagtagctaccctgtggtgaaagcacaatctaacaaggtaagctccttttttagtgatctctttgagaaagtgtttatccagaaacttgttcatttctggactctccttctgcctttaaaggttagtactggtgcatcatcaaatgctgccaaagttgatgggccatcatcagctgaaggaaaggagaaaaactcattgaaggagtcgtctgcttcttctcctgaattagctacagaagagtctatttctgagttccttaccaagtacaactcttgtcaagtgagtaaag

SEQ ID NO: 14464 - DNA, 573 bp, Arabidopsis thaliana
gatcccggtcaggtggtgtggcgaagtaacagagaaatgaaaccgctgtatataataaaataaagatttgtcctattacaaatacaatgtgcctatctcaaaagctgatgtgtaagaaacatgcacttgaataagccatgcaaattgaaatgtgtcaactccatttattttttacagagtgaagccaaaattcattttcggatgaagtcataaatagcaatttaagtgaagtgtaaattgtacatagtcgactctatatacctggttcttatctcattcaatttatcctcaacaactttaatagaaaaatatcaaataaattccctataaatagcttcacataatgcaagtgagaaaccacaaaaagtaagaaatataagaaataacaaaatggctcgagtctcttctcttctttctttctgcttaacacttttgatccttttccatggctacgcggctcaacagggtcagcagggtcagcagtttccgaacgagtgccagctcgaccagctcaatgcgctcgagccgtcacacgtactgaagagcgaggctggtcgcatcgaggtgtgggac

SEQ ID NO: 14465 - DNA, 620 bp, Arabidopsis thaliana columbia
tatcaataaatgctttgatcttgagaaaaaaatgtgtttcttaatagagttacctttagttaaagcaagaagagaatcagaggatcttaacaacaccaagtctttagaaacagaatggttgtcctgagagattttagcaaggaagtagttgaagtaatgaaaaggagtgatcaagttcatcttccagtccaatgtggatagaatcaacagttcagttttacgaatgacatcgggtttgaaaacgaagtcatgatcttgagggtattgtgataaaccaggaacaatacgttcctccattttagcagctaatgataaacaagctactgataacaatcgcatcgcccatgtttcatctttctgcaactacaaagaaaccatctttaagctttaatctgaagataaaggtgagatttttatagataaatgaaactggagattgaaacttacaccgatgaatcttttgtggagaaacagatcgaagtatgagattgcaatgtaagctgtttgatgttggacccaaatcttgttcttgtctgagattaagacaaagaaccaatcaatcagagattaagacaaagatcgaaaaagggagaatctttttgagattacggacagtgaga

SEQ ID NO: 14466 - DNA, 902 bp, Arabidopsis thaliana
agtagtaatggtgtatgtctctgaaaaacttcttcctttcataactggtcaggttaggaggctctactccgcatgccaagtaattgacgtgatcaacataccatggagatcctccttcaacagcattcagttggtggaactctttcccactgtacctccttccgaagaattctacaaccatgagctgctcttctggcattgaatcgtctatcggaatgggttcttcaattctcatccttcatagatggttagctgcaccattttcaatgcctttcttgtatactatcttcatgtcaaactcttacaatagaagtatccatctcaatagtcttggtttagtatccttcttggcatacagatgcctcaaagctgcatggtctgtatagacagtgacctttgatccaaccaaatagcttctgaacttctcaaatgcgaatacaacagctagaagctccttttcagttgttgcatatcttccttgagttttatccaacgtcggctggcgtaatatttgacgtgaaccttcttgactattttctggcctagaacagctcctacggcataatctgacgtatcacacataatcttgaacggatagtctcaattaggagctcgaacaacaggagcagataccaaagctttcttgacggtgtgaaaggatttgaggcatgtcctcatcgaatttgaactaggtctccttgacaatagtctagttaacggcctggctatcttggagaagtccttaataaatcttctgtagaatccagcatgaccaaggaaacttttgatgtctttgacaatttttggtggctggaatacatcatcacttcgatttttcccttgtcaacctctttacccttctctgatatcttgttacccaacactatgccaggggtagagtc

SEQ ID NO: 14467 - DNA, 591 bp, Arabidopsis thaliana columbia
ccatataaatgtaacatatctgtaaagatacatttaccaagcagtatacactatatatatttataaagatatgtttctcacaagcaacaactttatagactacaagtgcctcaagctctgaacttaggcaaaagcaatttcaaagagctttgatgcagagtatctcaatcctccaaagctattcccagaaaatattctaagaataagttttttttttttgtctcataagttttattaaacatcatcatatcatacaagagcttaaacaaaagctccaactttggaattacataaagcccaaaaaaggcccattagataaccttctgcagaagaaattctatcggaactccatccatgaacacatgtcgacaaccgggatataccacgtcacacgctggatgaataatcaaaagttttccggcaacaaccttcgccgttgagctgattccggtgagatgattcttgtgttttgcaccagaatgaaaacatcaaagctccaaattaaagataacggcttaaggaatcgtgataaacgacggaagaatcttcaatccttcaacaaaagagaaaaatttctttgaaactattatg

SEQ ID NO: 14468 - DNA, 628 bp, Arabidopsis thaliana
tatcaaacccttggcgattcttcatggaaggtaaatggattaagactctttgtttgttcctttgtagatttgacacagaatcaaacaaaactaaaccttgaaatgtttgtggtgatgtagataatcaatgccagtgatgccatggaggaagtagagaagaagattcaacaagtggtattagatcaagtcaaagaatgtactgaaggaaagcctctgtctctcctatggtcgtcatagaacgttttcgagtcatagcacttgcaagtttagtgattttgaaggaacttttgttgaagtttatactatgttgtgccatctaagcccattaacaggcccaaaagtttagtttatgtcgtcactcatgacatcttaatcgattattttggtgtaaactaattgagcgtcattaagtaaaggacaaatcattaaacgatagtgcataagattaactaaacccaagttgaagaataatcagagtgtaattaacaatagtatcagtagatgaaatcattattgatatcatacaaataaaaaaagcaagagacagtatgtgagagcaatgtaaccaaacatagcacgcgctctcgactgtgaggttcccaacaagcctaacattgaagttatgttt

SEQ ID NO: 14469 - DNA, 574 bp, Arabidopsis thaliana columbia
gcaccttttgaacctgcaggaaaattttcatcaacaatttaagagttatcagcaaaatgatattttaaaatgtcagcaacaaatacatcaaatgagaagtttgtacctttcctttgacgaaaacatagcttccatcaacagctttgaaggacaaatactttgtaacatctgtatgaataagggtacgaacaagcttgccatttcccatcataaactggtcaatggcattgagagacaagagttagtaagtgacattgataagattagcataaaaacaaaacaaatggcagctagctataataccttaggcatcatgtcaacattgtaatcccggctagcgcctaaatgctcaggagccttctcttctcccctgaacttcttccaaagctgattgagattaagggaagttgattctccaccatagtagtcattcctgtccatgtgaagcacctactcgtcacatccacaaaaccaataatcagatcgcgggaacactaagaggtcaatgtacatatgtaaaagccccaaaacattttcaatcatctccatgctcaaactagacaatcaaatctca

SEQ ID NO: 14470 - DNA, 594 bp, Arabidopsis thaliana columbia
  unsure (1)..(594): unsure at all n locations
nnnnnnnnnnnnnnnnnnnnntaaagaaatgaaacattgttttatttttaattgaaaaccctagcccatgggcatatcatccctttatagagaaaacgaaacagtgtttcactatcgttttctattttcacgcttcactgattatcggaggttgatgtggacgtaagacagagcatccacagtgcgcacgcaaaaacgctggatacccaagggctgcgcaatgaatttttggttgaaaaggtatttgtcgccgatgagtacaccatggtttacagccacattgaccgaattattgttggcggcattatgccgataactaaaacggtttccgttggcggggaagttggtaaacaactcggcgtacgtatttccttgaacgtcgcgagttaggtgttatcaatattggcggtccggtacgattactgtcgatggccaatgctatgaaatcggtcaccgcgacgccctgtatgttggtaaaggtgcaaaagaagttgtctttgccagtattgatacggcactccggcgaagttttatacaattgccctttagagcnnnnnnnnnnnnnnnnnnnnnnnnnnnnncgactgcagcatc

SEQ ID NO: 14471 - DNA, 753 bp, Arabidopsis thaliana columbia
catagacttttcacgaggcactagtccagtgaggaatccaagctttacttgctttgtgggatcaacagacttctcctgttaaaaaggaaagtttgtaaggctagttttgtgagaacacaacttgaagaaggaaacgagtcgcagacttcgtacttcctgcaacagaggagcctccaggaggtcttcacccacttgttctgtttctatctcactctgttgagcggtacgacttctatgggctgaagcaaaaaactcaccagcctgaaaaccaaaacatccacatgaatatagcccgagatgcagatcaaacactatactataacagtataaatatgcatttttgtactacagaagaccctttacagtcactaaaacaccggtggaacaaggattttatattagagtggtagccttagaatctagttcaatatatttacagaaccagaaaactgtcaaatgagttacaacccaaatcagaagaatacacataaggcaatgcaacatttactaacaagtaaaatgaaaagacattaccttctcaagaacgagcttgtactccacaagttcattataagaccgctgcaacttgtcgttattagcattgatttcaacaagttcagcttcaagctcttcaagctttacctgaaaagggagaaagaagaaaaatataagcattgaagaaacgggaagcataatgaatgcccaaaatcaaaagcaggcactcctctcacgtctacatcatccaaatcaata

SEQ ID NO: 14472 - DNA, 362 bp, Arabidopsis thaliana columbia
aacgtaaagatcctgaccttccttagcataatttcgcatatccaaaatctctctggtccaaatcatacaaccagacccgccattgcgaatatccgcattagcgaacgcagtgcaattacaatcttctagacacctttctttacatactttcaacccaatttctctgtccacaattgtcgccgtggtatctggcaatttcatcctcttcaaccgggtatatccatctctaccgtcacagctcagcctcgtcgtcctcatgcaaccagcggacgcatctctcaagtcccacgcttgctcattcactggcttaaaccctttgatacaataacaatttggtaaaatgttcgagtcgcaataaccga

SEQ ID NO: 14473 - DNA, 442 bp, Arabidopsis thaliana columbia
acattttcatattcttcaagatctgtttctttaaatctctcctctcacaaatgtattgtaattgcaataacaaaaaggattaaataaaaaaagatgaactgtatcacactaaaaacatatcctgaaacactagaagttaagaagtaagaaccttaagttcaaacttttctcagtgctaaagagtaacattctgcattttgtaaactacttcagcttcgattcttgtgtccaactcggttaccctatgttcaatcaaactctgcagccttctgcatgatcctgataaagcttctgatgaagaattcttggaactcttaacatcagactcaatctcaccaatactttccctcatgttctccactgtttgtatcatgagaccaaactcttgcggcgggtagacacaagctccaagctcatcaatctgtacaccaattccttgaca

SEQ ID NO: 14474 - DNA, 492 bp, Arabidopsis thaliana columbia
ttttgttcgaattagctaaaaaattaggaatggaacaattttcctttgtgttcgtcaggttttgtactaaatacaattgacaattttttgggtccagagaggtttcattgtttatccttaatcttatgcttctaactcaaagttgttcttagttctgatttggattgtctgcaaggcttgtatatgatacttggtcaattgagacatatagttgattaattgcgagttatatactgtgaatgaatgaagttagatactactaccaatagtgtttactctcatactaactgcctctgctaatgattgcagcattgagattcctttttagtctattgatatcgtgtgttgattttgtaggttatctgcttaacggatttagaagctgattacttgacagcttttgacacaagtacccgtatcaatcgattagtaatacgtgagtttatgctccaagggtcactctgccttctctatctcctcacatggcattgg

SEQ ID NO: 14475 - DNA, 596 bp, Arabidopsis thaliana columbia
ttgcatgcaggtcgacacgatccctgtaatatataagtctttctaattcagagactcgtattaattaagcaagtttcttaattacgactttgttaatcacggacctttggaacgaggtagaaggtcttgaacatgtgtggaacccaccaaaggaaaaatatcagtagattcaggagagttgttaaattttgcctccacgagtttttttcttttcttcttgttgagtcgtttacgtcacgtcgagaattttctcttttcccgagaaaattaagaaaggatcgtttgattttctaagaagggaaagataaacagtgaattagaaagagaaggaagtttcaatggaatcgctaacatctatttctccttccataattcttcctccggccaccactactacgatccccgtttcaacttcacgatcagtgttgattcgtcttccttcacgccgttcttcttaccttttcggcttgccagctccgggagacggatttcgatttctagaagaagacacttcgttagctgtaaatcgaccggcggcggaggaggaggatcagataagcttggtggcgatgaagaagagagcgaggaagttgaga

SEQ ID NO: 14476 - DNA, 532 bp, Arabidopsis thaliana columbia
cctagatctacaaaaacataggaaaaataattgcatttgtcatctttagttttttatttcaccaaattgtcttaaattaattaattccgtaataaataccttgtattagaattgcagttgactaaaccctttattgattcatatataagtataaaccaaacaataaatgagcataaaatttctaacgttccaaacaaaaataaaccccaaaactttcaaaaggttacaaacaaccccctaagtaaagaaaatgacgatcaatttagtccctcttctcctctccctaatcaccatcttcaccatcttcaatccatccgcccttgcagaccagagtcaaatccgcagcacaacaagccaatggctccatttctcggaggacctcagccaatcaactattgaagtctccatccccaccataatcgccgccgttctctcgttcttcagccgctctatctccagcgccggaggaatcggcggcggtggactcttcctctcgataatgacaatcatcgccggtctcgaaatgaaaaca

SEQ ID NO: 14477 - DNA, 555 bp, Arabidopsis thaliana columbia
  unsure (1)..(555): unsure at all n locations
nnnnnnnnnnnnnnnnnnnnntaaagcacgcttcagctaatgtatatttatgcaatcagacagcatattgcataaataatcagatctgtatcaaagttttaactttaaggaaacacaagcacgccgcgcaactattacgtgacgttgccgtcaattgtggacttattatgaataaacacgcatcacagccgcgcgctatttactatgtcgttgcgctgcaaatctgggaatattttagcttttacggcatgcgtgccctgctgattctctatctcaccaatcaactaaaatacaacgatactcacgcctacgagttatttagcgcctactgttcgctggtgtatgtcacgccaatcctcggtggctttttggcggataaagttctcggcaatcgcatggcggtgatgctgggggcgttgttgatggcgatcggtcatgtggtgctgggtgccagtgagatccatcgtcattcctctatctgtcctggcgattatcgtctgcggctatggcctgtttaaatctaacgtaagctgtctgctcggcgagctgtatgag

SEQ ID NO: 14478 - DNA, 659 bp, Arabidopsis thaliana
  unsure (1)..(659): unsure at all n locations
tctcatgctctacgtatccaagatgattccagcctctgacaagggtagattctttgccttcggtcgtgtctttgctggtaaggtttctactggtatgaaggtcagaatcatgggtcccaactatatccctggtgagaagaaggatctgtacactaagagtgttcagaggactgtcatttggatgggtaagaggcaagagacagtggaggatgtcccttgtggtaacactgttgctatggttgggctggatcagttcatcaccaagaatgctacattgactaatgagaaggaagttgatgctcaccccattcgtgctatgaagttttctgtgtctcctgttgttcgtgttgctgttcagtgtaaggttgcgtctgaccttcccaagttggttgagggtctcaagaggttggccaagtctgatcctatggttgtgtgtacaatggaggaatcaggtgagcacattgttgctggtgcaggagaactccatcttgagatttgtcttaaggatcttcaggatgatttcatgggtggtgctgaaattatcaagtcagaccctgtggtctccttccgtgagacagtttgtgatagatntactcgcacagttatgagtaagtctcctacaagcataccgtctgtcatggaacaagaccatggaggaa

SEQ ID NO: 14479 - DNA, 526 bp, Arabidopsis thaliana columbia
  unsure (1)..(526): unsure at all n locations
tgagttcaaggaacaaaatgtatttaatacacaaatttcttgcaggtattgcttacttacatggaagtgatcaacagaagaagcctacaatagttcatcgaaacatctctgtcgaaaaaatcctacttgatgaacaatttaacccgttaatcgctgattcgggtcttcacaaccttctagcagacgatatggtcttctcagcactcaaaacaagtgcagcaatgggatatttagctccggaatacgtcacaaccggaaaattcaccgagaaaaccgatattttcgcctttggagtcatcattctccagatactctctggtaagctcatgcttacaagttcactgagaaatgcagctgaaaatggagaacataacgggttcatcgatgaagatcttcgtgaagagtttgataaaccagaggcgactgcaatggcgaggattgggataagctgtacacaggagataccanacaataggcgtaatatagagacattgcttgagaatataactgtatgaagagtgaatga

SEQ ID NO: 14480 - DNA, 969 bp, Arabidopsis thaliana
tgatgatctttcacttaccatcaccctacactgcgcagaggtaccgtgttgagaacttgtatgaaggtccccttgatgataagtatgctgcagctatcagaaactgtgatccagacggtcctttgatgctctacgtctctaagatgattcccgcatctgacaagggcaggttctttgccttcggtcgtgtcttttctggtacggtttctactggtatgaaagtcaggatcatgggtcctaactatgtccctggtgaaaagaaagatctgtatgtcaaaagtgtgcagaggactgtcatttggatgggtaagaaacaagagacagtggaggatgttccttgtggtaatactgttgctatggttgggctggatcagttcatcaccaagaatggtaccttgacgaattagaaggaagtggacgcacacccgcttcgtgccatgaagttttctgtctctcccgttgttcgtgttgctgtgaaatgcaagctagcgtctgaccttcccaagcttgtagaaggtcttaagaggctggccaagtctgaccctatggttctatgcacaatggaagagtctggtgagcacattgttgcaggtgctggagaactccacattgaaatttgtgtcaaggatcttcaagattttatgggtggtgcggatatcatagtgtcagatcctgttgtttcgttacgagagacagtctttgagaggtcttgccggactgtgatgagtaagtccccaaacaaacacaaccgtctttacatggaagccagaccaatggaggatggtctagcagaggccattgatgaaggccgcatcggtccatctgatgaccccaagatccgatccaagattcttgcagaagagtttgggtgggacaaggatcttgccaagaaaatctgggcgtttggacctgacaccacagggcccaacatggtggttgacatgtgtaagggagtgcagtacttgaatg

SEQ ID NO: 14481 - DNA, 533 bp, Arabidopsis thaliana columbia
tgtcatgtttcttctcatatgcatctatgtaccatctcgtgtctagccttctcattctccaatggtacggcatttctaaggcatgatacgccttctctcgtacctcaatgtttttagtatcttcatcatcaacaaattttcttatttgttctgttgcaaaaaggtctgatgactttatgcaatttagtatccgatttcgtggaaagatacgacgcttcgtacaaagaaatgataccgtttatattgttggtcttgaacgtattactttctatttggtcgatgatcacatcacatatatctgacatacacggttgtctcagttaatatatgatattgatcacacaacaaaattcattatatatagaaaaataaaatttcattatatcactctaactttctgagacatcgaaaccatgttgtctaagaagtcggaattagagtgaggttgcatgtaaatcttcttccttgtcacatttccagcaatttcttcccattttaagatgaagatctgtcaaagtatcgtttatttctat

SEQ ID NO: 14482 - DNA, 604 bp, Arabidopsis thaliana columbia
catgaccattctttttctgttaagagagctgagtctctgcagaaatctaggtctctgtaggcaccgcagttgctgcaacgagaaaagaaaagagaaaattaacaataggcattcacagctgtcttactgattactcctgcaagagagtcaagtctttgaaacacaataggtatgcctttgatagactaaaaaaaaaagtacaagtacattattgtctgggattcagtggttacaccacgatcacagaaaggggtgtgcaaggaagtctctactctctaaagcatgggatttttgttattctaataagctagtggctcgaagaaaagtggacttcagaaagctatttatctattaattagatgtagcaaatcacccacaatgcatacagctgctaagaatacctgcaagccacgttgggtaagatgaaggatggcccaggatcaataaattcggcttcagcagcacattcttttactttaatgtacttcaacagaatctttctcattacctacacagaagaaatcagttatccagctttactgctaaacatagtttcaagaaccaaagaaccaaatttccaaaagtttaggttggaatggtgaat

SEQ ID NO: 14483 - DNA, 735 bp, Arabidopsis thaliana
gtcctgtgatctaatttccaatggcatatctcactcggactaaccatcccaacggtccccatgaccacgcgaaacccgccacatagagacatatcagtgccaagattatatccgcatcaacccctgacaaatttccttccccgttgaatccaaatttccatccgatcatcgacccgaccgcgatctgaagccaaagcaaaacaaatcattgttacctacctcggttttagaaagcagagcaagatactctgttttgaaaaacagagtattttcattgttttagggtttgtacgcacctgggtcacgatcatctgaaaaccaccttgaagaaacaaagctcttcgtccgaatttgtcaacggagtagatggagacaatggtggaaaggacattgacaagaccggtgataactgcggatatgagagaggcgtcatttccaaaaccgatggtcttaaacagaacaggtgcatagaacataatgacattgatcccggttagctgctggaagaatgggatgaaggtacaaaacgtgagctgcggtcgataacgagcttgcattatgttcgtccatggatgcttaactttcttcgcggcttcacacgcgttgcaaagttcattaaactcatgctcaacctccatggttcctctgatcttctgcagcatctccttagccttttctttgtttccacgttcaaggattgagtttggcgtatctggcaagaaaaagcatccgaca

SEQ ID NO: 14484 - DNA, 589 bp, Arabidopsis thaliana columbia
gaagaagcttgacaacatcgacatgaccttcacaagcagcgatatgaagagccgtacgaccatcaagatcgatactattaacatcaataccttcatcaagcagatcctgaacaccttcaacatcacctctacaagccacaaatagaagctgcatagtagcgtcgagattatccggtacagcaagctgcggaccgttagaaccatcaggactccgacgaatcggatctaaagacgattgtcgaccaaaactaaatcgcatattgttccggcgaggatcatgtgaagcttgacgcgtgaattgacgactaagcgtacgacgaagcgatccagttgagaattgtctcgagattcctcgttttagctgtcccactacattcgccatgatttcaaatctctttctcttcttctctctttcgtcttcttctgcgaaaaaatcgaatggataatcacattttctttttctcgagaaaattgatctggtgattatgtgagatccgtctctagcgcgttgcttatcgagaaataattaattttaatttgacgggtgaagatattattggcgacgtctgtttccgattgactttgattt

SEQ ID NO: 14485 - DNA, 644 bp, Arabidopsis thaliana
tttgagtagacaatatgttataacttaaaactaataacaaatgaaatcttgtgccaacaatagtaatactgatgtgtgtgtatatatagataccataagaacaaaaaataaattaataaaaccaaaaatcaaatcatctaccaaaaagtaaaaaaaaaatgaaacaattgttagtctttctatttgtttttagcatttgcatgctagaccatgtatcaggcggcggaatcaggatctcgaacgaactcaaaaacaagaaacttctttggatgcggtgttattccaaagatgacgtattaggtccaaagataataccaatcggacaacattatgaaaatctttttgatattaacttttggcatacaacgcgttttatgtgtactttgagacaaggtcctaactttagacactatcagaactttacagcattcaagcttttcgctatggcagatgaaggaggtctatgggattggagagcaagagaaaatgggatctatttaaagaaagaagctggcgagaaagttttaacccaatttggatgcaaaagagtatgcttggatttattaaattattgcaaactatctaaaaatgaaaagaagagtttcttatgatttataccaaagaaattatcatgtatgagaaaa

SEQ ID NO: 14486 - DNA, 415 bp, Arabidopsis thaliana
caagtctactcacccctccatcggacgggtccttatctagtatatagttataaagtgtggcttaaactctaacctaccaatgaataatcacaatggagagaagataccaatcaaaactaaaatcaataaatgcctacaaactatggctacaacaaacggtaataggtgatgtcaactcacagagctaactgaatcttgaatcatcattatcttcttctccttcttcttcttcttcttctactttggtttcttaactcatctgctcccctatgagatcgagacccacaagaagaaaggtgagaccttggaacaataggaagtagaaatgtactccttgtgaggccaaaagactcctaactgctgcagtgagcaaaagaaaagctagcgcgagtgctttgtggaatatcttattggt

SEQ ID NO: 14487 - DNA, 449 bp, Arabidopsis thaliana
atttatttgattaccaaaaatgtgccaagattttgaaggaatactctaaggcgcctatcaaccagagcttgtctcgagctagacgtaactcatcactcccttagacgcaccacttgcctttggtggaggaggaggagaagttgaacctgcaccaggtgtgggtgtggtgggtgtgggtgatccgccagacggaggtgattccggtgtggtaggagttcccggagttgaagaaggtggcgtgggagtggccggaggtccggcagaaccggctacgacattaacggctagcttcatgccgccattggttctgcagtgaccaggtgtagaacagatgaaatagtttattcctacagtcttaagatcgattttggtgtctccatcggaatggttctcagtcgaggaggaggcgtcgcagccatcatatccggctttgtcaacacatccaccgt

SEQ ID NO: 14488 - DNA, 620 bp, Arabidopsis thaliana columbia
  unsure (1)..(620): unsure at all n locations
ccccctagttgaaaattgagaagccggccaagggtgatgaacgaaatgtgaacccgcttatggagcttggattaaaaatgaggcaagtattaattactctttacaaaatctatgtattgttcatgagtttaactagaatactgtactttcttacttaagactttatcatgtagataaatattaattcagatcagcatgaatgggagacttaaatggctggcctatggtccctggagtagtgcaaggtcatatacaggttatatagtcaatggacagcggtttcacacgacttcaatttctaagcaaactcagaatagtggagtcttctatgaggcaactgaaatgtgtagagcgagtgcaaaggaaacttcacaagtggcagatttagttacatactatgggagagtaatagacattatactcttggattataatgtcttttctattcttatatttaggtgtcaattggcagttagaggtaacggggttagagtagaagatgggttcacgttagttaacttgaatcagagtcaagttttctttatgaaagatctgttcatattggcactcaagctaaggaagtgttttantcgaaggagaatgatgaatctggttggtgt

SEQ ID NO: 14489 - DNA, 535 bp, Arabidopsis thaliana
acccctgagaagaaccacacccagctttctcatgcgtaagtctttggcaaaggaaacaccttttcctaattctttcataatcagaagtcacagagactatttcacccgttggtagctgaacttccttgaaatttctcagagggttcctaacatcaagtataacatgaactatgatataatcttgcgcttgagacttctctaagtctagctcaacctttaaaacatgtccaacacaagatgcaatctctttaattgtctcctctgtgtaatagttaacaggaatattcctcagccgaatccaaaccggaagaaacatcagatactcttccgtcggtttctctatccaacgatccatcacaacacaccattcatcctgagtccaaactccggtttttaagatttcaattaaatcatcctctgatttgaagaagaattgaaacctttcttgtgataaagcaacaccacgaactgttgaatacagtctccaaattctaggcatgtctaatatccaattagacatccgttgaggagaagg

SEQ ID NO: 14490 - DNA, 542 bp, Arabidopsis thaliana
tagtaacgtccgccagtgtgctctaaagcatataatgcgattggcattaacccgcttttgtcgatataatatataaacactatagccagaatttaatcaagtttcaattacgtcctgcctgattattcaactctattttctccattatctgtattaataaatgataatgagtgtcaaacagacattattcatttcaacatgtaactttgggcaaaatcaagatacgcgcagaagaatactttccgaatgaaagttaaaggtgttttatttatagatggggagagtcttcgatagtagtgaggttgacagatatccgctgcctgatgagcaattatgcccaatgaatctacctcattgggcataatttggaactcatcagatagcttttgccatcttcagattacacgggctcatctgccagttgaatgtgccgtttccgctttcatcaagcgttacgctggcaatggccgaggtggtaacataggcggcgtttcgccggacataactcggcaaccagatacccgactaacggtaagtgagag

SEQ ID NO: 14491 - DNA, 197 bp, Arabidopsis thaliana columbia
tgagctttattgaacaggtatgtgatgtgttaagcaacgaagaagtggttgacattgtagcttcagctacaagcctgggcatcagcggctaggaccttggtgaactcggctgcgcgtgaatggaaactgaagttcccgacttccaaaatggatgattgtacagtggtatgtatatatctggatgggaaaatggattc

SEQ ID NO: 14492 - DNA, 736 bp, Arabidopsis thaliana
ctctttatcctatttaatatttcgccgaaaaatctttgaaatgattatctgattgtatttttttataaaaaatttgtcataaccaaatttagaattatattttaaaatttaggaatgagtttagttaagaagttggtttgaaggtatagttttttctggaatttaaagtttaactttaaaatttattaacgatttagtattagattagtttattaatttgttgaaaaatctggtctattttgttacttttttcaaaaatatggtctattttcataaaaatccctaaaatatccgaatttatcggataaacccaaaccccctatcgggaaaacccaacacaccgtctctctctcactctcacttcccatcggcgaaaatggcgtcggtggcggcatcatcgtcgatatcattcgctgcatcattcctcaaaatcaaagcattccctctctcccctcgcttcttccccatccgtacactccgttgctctgtctcctcctcctcctctgagcccattgaattcgacatctccttcgctcctcccaaacccaaaccctcctccactcacggcggcgtcacccctcaacaactcttcatcccttggatcgtccgtagtgatgacggcactctcaaactccaatctcaacctcctgctcgtttaatccacaacctcgccatcgatgccactactcaaaaccctaagaagaaagataaatctaagaagaaacaacctcaagct

SEQ ID NO: 14493 - DNA, 541 bp, Arabidopsis thaliana columbia
cgttaaggtcaattccgacggagctttcacacacttgttcattgataccaccttctttaccaaacccttcagaagcagcagcagacatgtccttcaattcagaactcaatcaaatcatggcaaggccttgtgatatgctccctgccaatggtggagctgttggtcataacccttttttggaaccaggattcaactgccccgagacaacagattggattccctctccactcccccatatttattttccttcgggttctcccaatctaataatggaggatggtgtcattgatgagattcacaaacaaagtgacttgccacgttggtatgacgacttgattaccactgatgaagatccactcatgtctagtatcttgggcgatcttctccttgacactaatttcaactcagcttcaaaggttggtaatgttgtctccaaagttttctgtttttaaccgcccaatatgtatacatagcaaacaccataaaaagacgcatgttttatgaggcgatattgtttcaggtccagcaaccaagtatgcaa

SEQ ID NO: 14494 - DNA, 418 bp, Arabidopsis thaliana columbia
ctctagagcctgcaatcagaatcggaatggtatcaatgaagaaactaaaatgactctgttggataaacatggtatgcagtggttaacgactctgcggttggtggactacaaaagacaaagactgggaatggtaggaggctggaaaggattcatccaagctaacggtgtgaaggcaaacgaatccatcatgttggaactgatttgggaagaagacacaagttgcgtccttaagtcctgctgcaaggtgaagctagcaatcaaatgagaatgtatatgagtgtaatattgagatgcatcaatgtttgactctgtgatctggtaagacataagtcttaaggtctaattgtactattgtggtacgctttccaagtatgtcggaagtctatgatcattggccttagggtgtgggatgtgtgaa

SEQ ID NO: 14495 - DNA, 279 bp, Arabidopsis thaliana columbia
tcgacaatcttgacgacgaagagttctctttcggtatatactaccagaatattccggcagtattgtaaaaacaaagcctaaggaaactcaaatacgtttaaaagttccgtggctatgggtactcttttaaggatcgtgctgcgcatggctggctccctgcctgcactgtcgttgggcatcgtttcctgggcgccctcttggatccggcttctgatgatcgtccatcgcgtgatgtctgccgtgggctggtttgtttttactctcgtttgtcgttacttt

SEQ ID NO: 14496 - DNA, 566 bp, Arabidopsis thaliana columbia
tctgacgcttcggacagaaactgggacgtgaaattggacggcgcgagattcgccggcggatggaaagatttctccgtctcccactctgttagagacgacgaccttttgagtttccggcacgacggaggcatggtcttccacgtctcacccttcggacgtagtttctctcagatacagttaatctcttcttctacctctgacgatgatgatgatgaacgcactgtttttgatgatgatgaagacgacgatgtaggagatgatgatgacaattcgatatccgaagatgatttttgttcaaagaaaatttcgtcgaagaagagagcaagaaaagaaacagagtcttcatcagacaaatcttatcttgttgcacacgtcacaccttcaagcctactccgagataatatggtgattactacttcgctggaatctttaatacaattctcattctattcttttgctacaatatatatgaagttgtgattttgcagtgtgttttagcaaatttgcaaggtcaaatggtctggacaggagagagtgtgagattgatctgagggatgaccatgaaa

SEQ ID NO: 14497 - DNA, 474 bp, Arabidopsis thaliana columbia
gaatgatcccccagataccacagcaaacttactaacctctggaccatacggcctgatatttgcttcgtttatacccttctacttggacattcctgtttcaacgaggtttcgcgtatttggtgtcaacttctctgataagtcattcatatatctcgcaggagtgcaggtaattaaaaccataggtgtttgtatgatcattgttgttcgagtagtgaattcttagtattgataatcttcttttttttcttttttttttgcagcttctactatcttcttggaaaagatccatctttcctggaatttgcggcataattgcgggttccttgtatcgtttgaacatccttggcatccgcaaggcaaaggttatccacatcattatttatctctctgtcaacttgttggctccttagttttcaatgtcactagagtaacactaaatttgtctgaccacatcacagttccctgagtttgtgg

SEQ ID NO: 14498 - DNA, 480 bp, Arabidopsis thaliana columbia
caagaggatccccaaaacgactggtacttcatcagccacaaggacaagaagtatccaaccgggaccaggacgaaccgggcaacagtcgctggattctggaaagctaccggacgtgacaaaatcatctgcagttgtgtccggagaattggactgaggaagacactcgtgttctacaaaggaagagctcctcacggtcagaaatccgactggatcatgcatgagtatcgcctcgacgatactccaatgtctaatgtaagtatatatagcaatcatcaatttgcagtttaggttagaataaacaaattacaaacttatagtcaaagaattagctagattcgtttcatgctatacaaggtattggttcatttagatcgcactagagccttcttttagcatctgcaattaaagtaatcgaacatgattctctgagttacaatgagataatttcttatgaaattaacacatcatatatacatttat

SEQ ID NO: 14499 - DNA, 1014 bp, Arabidopsis thaliana
cccacaacccctaacatcatcagttcatcaccttaccctatttaatattcatatcgcaacttctctcctccgatcaatagatccgtactcgaagcaggaacgagtgaaactgaaaaccatggagatggagaaaaaccaacacatttcttcgctggacatcccgttattgatctaagtaatcccgatgaagagcttgtggcaagtgcggtggtcaaagcgagccaagagtggggaatatttcaggtggttaaccacggaatcccgaccgagctgatactgcggttgctacaagtgggaatggagtttttcgagctaccggagacagagaaggaagccgtagcgaacgcagaagactccttggacatagaaggatacagaaccaagtaccagaaagatctagaaggtagaaacgcatgggtggatcatctctttcaccgcatctggccaccgtctagagtcaatcacaaattctggcctaagaatcctccagaatacatgtacgagaccagtccactcattgtcaactggttttacgttcgaattatttataaaactaattagcattaatcacccaaaaatactttagggtcattaattaatcgttttacgatggattttaacagtgaagtgaatgaagagtacgcaagtcacataaagaagctatcggagaaaatcatggaatggttatcagaaggactaggtttaaggcatgaggcgttgaaggaaggtctaggcggcgaaacgattgagtatctaatgaaaatcaattactatccgccgtgtccagatccggagttagtcgtgggagctcctgatcacactgatgtcaatggaatcacactcctagtcgctaatgaagctttagggcttcaagcattcaaagataaccaatggatcgacgcggagtataccacttccgggatcatcgtcatcatcggcgatcaattcttggtaagaaatttatgaactcaagagaccatgttgaaatcttttaatgtttcaatcatggtaggg

SEQ ID NO: 14500 - DNA, 592 bp, Arabidopsis thaliana
tatctatgtagctgaagcaaagaagctaaccaaatggttttcactatggaagcagacattctgggcaggagcagactctgtggtgattgaagctgatgctttcaaagagtctgatgtcatttacagagccttaagctctcgtggccatgtcgatatgatccagacagctgaattggtaagccatccacaaacatcttcaagaacctgtcggagtcatgaaaatgttgattctgaggtttgaaattgttttgtgagaatatataggttcatcagtcatcaacagatgcagcttcatccctgctagtgacggctctgaacgaaggaagggatgtgataatggatgggacactctcttgggtaccttttgtggtgcagacaataacaatggcgaggaacgtacaccgacaccattacagaatgggagctggatacaaggttggtgatgatggagttataacagagaactattgggaacgaattggtgaaaggcaacagattcaagaggatggtcgtaggagaaaaccgtatagaatagaactagttggagttgtgtgcgatgcgtatttagcagttataagaggcattaggtgag

SEQ ID NO: 14501 - DNA, 521 bp, Arabidopsis thaliana columbia
tgaccttcattagaattttgtctcttggtttgatttctttgatttaaattagttttcccatatctgttgggttttttcttccctcttttggattgagtttctggagacaatccattgatccaccgatttatatattttaacttgtatcctactttggtttttaataaaatttagaggacaacaaaaaaatagtaaactgcaagcccgacccagtaacctattaaggtccaaaacgacatcgtagaacatagcaagtaaaagaagaaaagatatagagatagagacaatgatatcatcatcatcatcatccaacatggcatcatcatcaatcctcatccctccgattctcacccgtcgtaatctcctcctctccaccacaatcgccaccgtaactccaccaccaccagctaaaccaccttcccccgacatcacaataaccgatcgagtcttcctcgacttctccctctgccccacctacttccgctcagatcctccgcgacactctcctccaccacaccttg

SEQ ID NO: 14502 - DNA, 613 bp, Arabidopsis thaliana columbia
tgaagacgaggaggaggacaaggaagtagctgtaaaaaagaagatggcggagaaaagaaaattatcaaagtcagagggaaccggaaagcggaaacgtgaaaaggagaaacctgcctctgcaaagaagacaaaacaaacagattcacagagcgacagtgacgcaggagaaaaggcaccatcttcagaaaaatctgtaaaggtatagcagctttttggtagttcctatctcgaatccttttaaaacagcacaatttacatcgtttggtttctgttcttttaactgcagaaaccggaaactccaacgactggctatgggaagcgtgttgagcaccttaaatcgatcatcaaatcttgtggaatgaggttttttaatcaaaccggtagatctttaaaaagctgcgttagtttatactccaggctcttgattgtttgtctttattggcagtatttctccatcggtttacaggaaagccaagcaggctcctgaggagaaacgcgaggaaattctgattaaagaacttaaggagttctcgccaaagaagggttgtctgcaaatccttcagagaaaggtaatgctttacatttaagaagcgcctctacatgcaggaaaggg

SEQ ID NO: 14503 - DNA, 536 bp, Arabidopsis thaliana columbia
  unsure (1)..(536): unsure at all n locations
nnnnnnnnnnnnnnnnnnnnnnntaaagtgttcacctttgtaagtgatgaaatcttcaaacgagatggtttgtgcacggataaagcctttttcaaaatcagtatggattttgcccgctgcctgcgcgcggttgctccaaccggaatggtccatgcacgcacttctttcaccccagcggtgaagtaagtttgcaggttcagcagtttataaccggcacggatcacacggttcaggcccggctcttccagcccaagctcctgcataaactcgtcacgttcttcgtcgtccagttcggcaatgtctgcttcaacagcagcacaaaccggaaccacaacagaaccttctttcgccgcgatttcacgcacctggtcaagatatgggttgtttcaaaaccgtcttcgttgacgttggcgatgtacattgttggtttcagcgtcaggaagctcaggtaacgaatagccgctttctcttcagcgcttaaatccagcgcgcgcacatacctgcattttccaactggggcaggcatttttccagga

SEQ ID NO: 14504 - DNA, 533 bp, Arabidopsis thaliana columbia
tgtgttgtctcttacgtgcatgataaaaatccacaatcccaaggtgctgccaaataagaggatataataatactatacgcagaaattacctcggcattagttttatctgtcaaagagtgggttagctctttttctaattccacatgagaacgcctcagagatttgacctctttgacaagaactttcatatctgcttttgattttgcctctaattcttcatatcgcctagagaggtcctctagttgttgttttctggcgtccaactctttcgacaaaacatgtttctcagaaatagttgactgtacagtgggttctgcatgtgagctcccatcctattgaaataatttgcatcagtatgtttctctagaagagagaaattatgtgcgatctatgcgaacgagtttggttgcaaaactacttttaaatcatacctctctagattttaacttcatttccatctcgtaagatttttgcctaagttcttccatatcccactgcatctgattaaatctttccctctcactcataatagc

SEQ ID NO: 14505 - DNA, 764 bp, Arabidopsis thaliana
tacttgatgtattatgtcacctattctgatgaagccccacaggccggtgcaatgacagagctccgcatgtttgacccggccaaggaagagtatttcaccgtccatgataagccacttcccaaagagttggttaagtcgaggctggtgggaagttcccatggttggggagtttttcttggctcccctaattccatactaattagcgactactgcaatccctccagctccaaatcaaaccccaagatgatccctctgcctccacggagttatgaacactcttgtcaaaatgaattggttagtggcgtggcaatgtcctcttctcctgaagaagaagacttcgttatggctgtcaagttcacgggacgtcgggtgagtatatacaggcccggtcaacatcgtaaggggaccaccgcttttcgtctactgaactgttcgattattttgaacaagccaacttgatgtattccaagagagatcaacggttctacatgccaagttctggaggccaccacttgtggtcttgggatggtataatatccaccgactctcagtaccatgacttacgctttcacaaccttcctcagttttcactttccgagttgcagcttttgagatcttgttacagaacacaacatcttgtggagtctccctcaggacaacgtttcctagtcaaatggtaggagcttcttctagtaatttgtttgcttttgtcgtttcatgtcatcattataagaacattttcttccttttttccttgtgcttgg

SEQ ID NO: 14506 - DNA, 1164 bp, Arabidopsis thaliana
tataacgtaggaagatcttcggtaagcgttatgcgcggtttctcttaagaaaatgtatctttcttggataaaagcgggtaagccatccgcgcaactgtaaaacattgtggccattgcaaaggagaagaagcttaacctttcttggacgcctctaggagagtcatctactttccagtaaaccgtagccaagagaaaaccggtcatcatgactatgaaaactcgtgttccgataagctcgggcgttcgggtccagtttatcatgtagcgtttagctaagattacggtttcgacccaccatggatttacgtatgaaggaatagatctatatgaagtagagacaagtttgcctcttgaaatgcttgcattgatggcttctcccaaagatgatgagttatggtgaggttcttgactaactcttagcttcctatgttgccaatttcgattgaattcgactaaacctcttgttccttcgggagatccttcaagatctttgattaggtcaagtgtgaattccgcaatgttctctttttccggtatgggactaccaaattccgagaagaacaaagggagagtagcaggagaatcactaaacacaatctggccagaagataagacgattacacgatcaagaaactccataatccgaccactaggctgatggattgacataattacgatgctgccgctacgtgcaatctttttcaagacttgcaccaccatgaaggcactagttgagtctagtcctgaggttggttcgtcgaggaacaagactataggatcgtgaataatatcggtcccaattgatacacgccttctttctcccccggagacaccacgatggccttcatctccgatcacagtgtttttaacagttgtgagccctaattgatctattagggtttctactctgtttcttttctttgatttgcttaagcttcgcggaagcctaaattcggcagcgaacattagagtttcttcgactgtgagcatagggaaaaggagatcttcttgcattacataagctgatatgactctcaacaaacgagattgcaaagcttctccgtttagagttaccgtgcctttcaagctaccttcggctatttgtcctgctaatgcatcaataagcgttgatttccagctccgcttgcaccaagaatggctagg

SEQ ID NO: 14507 - DNA, 501 bp, Arabidopsis thaliana columbia
ctttgcccgctacaatgttgcaatatcctttaggattttcctcagtccttcctggaagtgtgtcgggctgccttttgaccgactcagagttttgcactatttgagtctcgagcttcttcatatgcgtggtaagactttcaaactttccatttaactcaccgtacttatactctatccgtgtatccatagctttataggccttgcgattataatttgccctgtattgtatcatcatctcaagcttatagtcgttggatggtgcgagtacggccggtccagttttgaagggcgccgtattattgttgttgaagggggctcttggctggaagttgttggtgttgtagtttgcgtttggaaatcagccttggaaaggcttcaccggcggataatattaatcatgagggttctcaacattcgaattcctataagagagattagagttacctttaaagttgttgttgaagttattgttgtaacgcggttctgctagaatccttgggt

SEQ ID NO: 14508 - DNA, 902 bp, Arabidopsis thaliana columbia
tttttgacattacttttgagacagattgcaaggagttgacacagcttttggacactcctgatgagtggcccgcattttcttcggagttagaagattttaatgctttaaagtctagatttcctcgtttttctttatcttttattccacgtttaaacaatgtccgtgctgattattttgctaagaaggcaagagcacgaggttctattttttctcatgtaagctcatcaggatcctaactgaaaaaacgatccatcagaacaacagcccacatgacttacccaaagactaatcatgcctaaagcccatcagattttatgcccatttacaacaaataaaaatagaaacttgttaatattttcggttgccaaggatcgaaccaaccaccttctacctttaatagcatagaaaacaattagacttcaagacgttctttaaaatttgatgccctctaaaatacatataaatctttttacctaaagcatctatttggtgggctttaggtctgggtcaagcttgacggcctatcaggcaagggctcggcccaaataaagaaggctcagcccataaaacttaagagagaattcctccttaactctttgatctcttactttctggtttttcgttatgtactttcggtcttttgttctgtacttttggttttatgttttattaattactattctcattcatcgttgataaaaaagcggccccattctcccaaaaaatcccttagttacttattattacaacttcattacaaaaaattggcgtccaccatggggctaggaagagttttctcctttattgaaaatcatatacgatattgccagtaatcctagaaagccacgacgagatgacggaaacctcgaacaaacaagtagatgagttcagtacaccttgtg

SEQ ID NO: 14509 - DNA, 553 bp, Arabidopsis thaliana columbia
ctgcttcatctgatgaaaccgataaagatgaagaagctgagaaaactgagatgatgaccaatgaaaataacgatggtgataagaagaaatcggattggcttagatctgttcaattgtggaaccaatcaccagatccacaacctaataataagaaaccgatggtaattgaagtcaaacgcagcgctggtgcgtttcaaccgtttcaaaaggagaaacctaaggctgcagattctcaaccacttattaaagcaattactccgacgtcgacgacgacaactagttccacggcggaaaacgtcgggggtggaaaagagtttgaggagcagaaacaatctcattcgaataggaagcaaagacgttgctggtcaccggagttacaccgcagattcttgcacgcgcttcaacaacttggtggatcaaatggtaaatatattaaatcctttgattgtttgagaatcataattttacgagaagtatatatttaatttttgttcattgtcaaatatgcagttgctacgcctaagcagattagagatcttatgaaggtcgatgg

SEQ ID NO: 14510 - DNA, 580 bp, Arabidopsis thaliana
ctctagtaacgtgcgccagtgtgctgtaaaggcaggtttgctgtacacctttttactccgccagcaaatgccgccgctaatgagctgagcggtatcggctgttagtgattggcgtggtcatcgcggtcagagcaaaaccagaaaaacctttaactgaatctgtctcagaaagttgacacgctggcagtgagttaaataagcctctgctacgtaagggttatagcttttgccttaaagatgcatttaaaatacatcttatcttattaagaatgaggtatcagctatggcttatcgcgaccaacctttaggtgaactggcgctctctattcctcgcgcttcagctctgtttcgtaaatatgatatggattactgctgtggcggtaagcagacgctggcgcgcgacggcggcacgtaaagaactggatgttgaggtcattgaagctgaactggcaaagctcgctgaacaaccgattgagaaagactggcgtacggccccgctggcagaaatcatcgaccatatcatcgtgcgctaccacgatcgtcaccgcgagcaactgccggagctgattctgcaagcgac

SEQ ID NO: 14511 - DNA, 536 bp, Arabidopsis thaliana
  unsure (1)..(536): unsure at all n locations
tagtaacgtccgccagtgtgctctaaaggcccaagcgaaggcgaaaccctgatcgcgcgtctgattgaccgcccgattcgcccgctgttcccggaaggcttcgtcaacgaagttcaggttatcgccaccgtggtttctgttaacccgcaagttaacccggatatcgtcgcgatgattggtgcttccgcagcgctgtctctgtctggtattccgttcaatggcccgattggtgctgcccgcgtaggttacatcaatgaccagtacgtactgaacccgactcaggacgagctgaaagagagcaaactggatctggttgttgccggtactgaagccgctgtactgatggttgaatctgaagctcaactgctgagcgaagaccagatgctgggcgcagtagtgttcggtcatgaacaacagcaggttgttattcagaacatcaatgaactggtgaaagaagccggtaaaccgcgttgggactggcagccggagccggtaaacgaagcgctaaacgcgcgccgtttagagnnnnnnnnnnn

SEQ ID NO: 14512 - DNA, 356 bp, Arabidopsis thaliana columbia
ccctacatcttcgtcctcgtgtactatgtaacattatatacttttaattattagattaatgcaattataagactaaacagataatacagaaagaaaaaggtcacttctggattttagttacaaacaccaatactttattagatacaaatgtggaatcagagaaacaatatatagctaacaaccttttaatatcaaacatctataagatacacggtataattgattattatggctgtaaatcagcaatgaaaataggtacatatatataagcacataagatttagtcagtattgagaagctcctctatcatttgcaaagcaaccttttcttcctcatccaatacttcttctctgctg

SEQ ID NO: 14513 - DNA, 589 bp, Arabidopsis thaliana columbia
ttggcttcgccagggttcgaaccggagaccttcagtgtgttagactgacgtgataaccaactacaccacgaaacctttttgcttgtaacatttgttaagttttttttatccttagcgaaaacaaaaatctattaaaggtttacacgtgtgattcaacacgtgttgaatttctcatcttctccgaggagtgcgagtgagtgatttgcttgctttcacgtttttcattgatggctggctttactcttcttccctcgcggttactcgcgtttccttcacgcgctttacctcgtcgccttcatcaccaccatgcaaagctgattcttcgctgcaaaatgtcttcttcttcttcctctcttactcaatccatcactctcccgagccaacccaacgagcctgtccttgtctctgcaaccgctggaatctcttcttccgatttcaggcgagttctcgatatccgtggatttccttgtggagaagaatttcgaaaataatgagtagtcgaattcatttgtgtatgtgtgttgtagggatgcgattgattcatctctgtttaggaattggctaaggaattggaatcagagagtggaat

SEQ ID NO: 14514 - DNA, 451 bp, Arabidopsis thaliana
tgatttaagttttgttgtgcttaccggtgataacaacatcggttaggttacttccgtatactaaaccagtaaaccttgcatctccgtatgacggcaaaggtggaatcataggatattcagactcatcctgtttgttacaaacgaaataaaaccaaatgtgattatttatctcaaatagaatggttgatattttttagtgcattcataaataggtgtacgatactagctaaaattttgagcttagatatatttattacctgagaagcaagaatagttgcaccttgctggataaacaaagtaaaatggcttgtgaggttgaaacttccggtgagccaactccccggcggtacaatgagttggactccaccgtcaggcgccaacggagtaagcttacttattgcttctcgaaacgctttggtgtttgagggtttccatctccaatagctccaaa

SEQ ID NO: 14515 - DNA, 567 bp, Arabidopsis thaliana columbia
tgaagaaagctcgttgcagtgaggaagaaggttataagtttctgcagacatatctccacctgttgaggacaactaatccaggtacgctgtccacagtccatacagattatacggaggacggaaatattcgtttcaagtatctttttttttgcgtttggagcttcgattgccgggtaccagtatttgcagaaagttatagtgatagatggtacacacactaaaggaaaatacaaaagctgcttagttactgcaagtggacaagatggaaattaccaaatattcccattagcgtttggtattgtagacaatgagaacatagcagtttggcagtggtttttcgaacagttgtcacagtttgtccctgatgaagaagatctagttttcgtctctgacaggcatgcgaccatttatgctgggcttaggacagtgtacctcttgtgaagcatgcgtgttgcacagtacatttgttcaggaatgttgtccataatttccagtgtgagggacttgcgaaaatggtctcgatggcggcgagatcttacactgtgggagattgcgatattggtttga

SEQ ID NO: 14516 - DNA, 596 bp, Arabidopsis thaliana
gtaacgtccgccagtgtgctctaaagggtctacgctcaggagctgcttccaggacgtatcggtatggtttctggactctttttcggttttgcttttggcatgggaggtctgggagcggcagttctggggcttatcgccgatcacaccagcatcgagttagtctataaaatctgtgctttcctgccactattggggatgttgaccatattcctgcctgataaccggcataaagactgatttcattgcagccaaaggcaaactttggctgcatcgttttacagtcgccataagcctttcctctgttaaaccgccttctgttttccgatccgtgctttttttgcagctaattccatttttctgcaaaattcaataattattcatgaacatcatcaatgaaattgtcataaactattacctgtaattttggtttcccggccaaaaatggacaataaccaccaggaaaaggagacggaatgcatcactgccaccccgcttatcaccaccacttgttggcggccttgtgctcgcctttatcctcggcatgctggccaataaactacgtatttccctctggtgggatactgttagcgggtgtc

SEQ ID NO: 14517 - DNA, 551 bp, Arabidopsis thaliana columbia
tttaaattagactacaatattcgaacaacctacattttcttttctggctacacccaactttttatttaaatccattatacagtaatctgacctttctctaacatttaaatcatgatgggctaattcaactatttttccttctatcatgccgtagattatttttcacttagattagtatgtttctccttttaccataaagtcagggaacataataatttcgatcaatcccacaaacaaactagagacggccaacaaaccggaattaaccaccaaaccaaccaaatttatcactgaaccaagtttctcaaatgggcccaatacaaagattcagttcggcccaaatagtagattggcgctataacgataacgattcttagggcatttaccacagcatcaacaatggcttcgctggcgttaaccgcggttaccggaacctcactgcgccggtatctctcctgcgtactttagcgtccaccgtgtcactactccattgtttcgttccacaaacactctccacgtttcatttcttctccaaagagattccttgcttg

SEQ ID NO: 14518 - DNA, 414 bp, Arabidopsis thaliana columbia
aaagcaaataatcacaaatttgcaatatgttcggttgttccttatgtaaataaagagaagaaactttaagcaaaggaaaaaggggtaaagagcttttacttggacagagagaactgcagcgattgtaatgatctcatgtgaacaaccaagctcacttgaagccaaaatcatttttgatatcattgggtcctagcaaaaaatgacgagcatgagacatgtaatatgcagaacaaactgcaaatgaacattacattttagatatataatagctcatggtcaggaagaaaaagtaccagtggaagttctgcaacttggaatcctgttggcgaagtgagtttagcatcatcatcgaggatctgaagtgaataaagtacttcaagtgctcgaatcattgcttcagacgatggaggtgca

SEQ ID NO: 14519 - DNA, 554 bp, Arabidopsis thaliana
  unsure (1)..(554): unsure at all n locations
atcatatttgcagtaattactttcatgagcttgcttcttcttctcataaaccgtgtggaaaaactcctcaagaaactcatccatcgatgtaactcctcctgcatacaaacaaaaaaccatttcagccattgtttgataagattattaagaaattggattcaaaagatgaaganaagaacctgagattccaatgtcatatccaaagatggatccaccaatagctgcaacaaggcaagcgattataacataactagtgactttcccttggtattgttctgctctctccttagccacaccggtcggaccaaacgaccctcctgccattttcttttcttcttcttcttcttcttcttctgctactactttgcttctttttaagagtttgttgcaacggttgactttttttcttgcttttactcaaattccagaatctgagagacaacgaaacaaaaagggttatacacatttacatcttcacgtggttagatagatttcaatttggttaggttttgggaaacatttaaatgtgaagttttgcactttgagatttgtga

SEQ ID NO: 14520 - DNA, 1033 bp, Arabidopsis thaliana
ctatccctcaacaaaatattacaataagatcaacaggaagagctgaattaccatccacagcgagaatagaatctggaagatccatctctttgagcctaactcgagttagtttgctagcttgctgtaatctctccgcctgagttctaattacatcatcgaccatctcagtgtatctagagagagcctttgcactgctgtctggaacaaggattgaaaacattttttccttgcttgcatccaaaatatcagtcatgttcattggcttaaccattgagaaggcgggaagtggagacaaagaagaaggagaaggaactctcatgaggtacactctgtcgttttccttgacagccctatccaaattgccattaatgctagactctagtgtgttcatcgcttctataagctgagcaggagctccccttgaagacttctttgcttctgccaaacggctggctccactcctcagccgtgcaatttcttctgcaatttcctctttctcgtgcaactcttttccatatctaaagcaagcttcaccatagaagagtgctgctttcagctgcacatgagaaatccagcctttgtcgaaatgatccttcaatggcgaaatgattagcgcagataaagcctcctcataaaatatgccaacctgattgcaagcagacacaaagcgcaaattcaatcgagatgcatcaccataaactaagcacgttaataacaaatatactcataatcaatcatggaagaatctattaaatctaattctaaaagagatgcaatcatgatttgacactaacctgcctagcaattttagcagagacaccaggagtacttcctttagcaatggtattttcaaagacacattcctgcgcctgccgcaccatcaaccgttccaacattcctacacactcaaccgacacatccacggtagtgctcggcccgatcgtcgccttaatggactcgttatcctcaagtgagcgaacgccctgctgcagccatgaacgcatgtgaagcctgacgacgcccatcgacggtg

SEQ ID NO: 14521 - DNA, 466 bp, Arabidopsis thaliana columbia
gatctcctattgaagggtctgttagcttctgtttgaaagatgaatactaacttaccacaacgtgatagcattgcatagagtaggataccccccatggagtgcccaattgcgaatagtttgccgtccttgggcttgctttgtgctcttacatactcaatctatagcaaaccaaagacggacacccaattcaaacaaaattcagacacgattatgcgaagtattcagcaagatcaacattgcctcaccgcagcagggacatcctcttccaggtagtgatcaaaatcccagtcatatttaactatcaaatccagttgcttctgaaaatcttctatggtcgcagtgaggcgctcttgtaaatcaatcagcggaggcgagacagacctttgaccatcgtcgaaaagattcacaaggcgctgagcaaatctctgacttggttacaagtcctgagttttgctttgactctatc

SEQ ID NO: 14522 - DNA, 672 bp, Arabidopsis thaliana
cagtgtgccaaaaccagttgaagtttttcttcgaccaacattgccaattggtacttcaggtactgaatggtatcagtatcgtgagttaaccgataaggaagaagaagtaagacccaaatggtacttttgaatttttttttgtttagatgcaaaaatatcggcttagtatcacaaaccagagttatatgtaacaaaatagtaaattgtttgtaatgaaatctacttaagtaacatagcattcaaggaattaaacatctagtcaacaacatttcagaaactgaaaattaaaaaagatctacatcaacaattcaacaaatgaaacagtataaacaagtcattacacaccaatggcatcaccagtagatgaaccacgatcatcttctacagggaccaccacgttatcatacactaaagcagctgtggctcctccaagcagaggcccaacccaatacacagcttggttcttaaagcttccgtaaaccatcgccgacccaaaggcacacgcaggattcattgaacctccagagaatggaccagcggctagaacattggctcccgcaacaaaccctataaatataggtcccactgctaaaggtagcccacgtctgggatcgctagccgtgaacacagtataaaccaagacgaaagctaaaacaccttcaagaacagatg

SEQ ID NO: 14523 - DNA, 606 bp, Arabidopsis thaliana columbia
ttcctggatcattcacgctcttcattgtcatcactctgatatcttctccttcaacaccagaaaatattgtagaccccgtcgcattggtcattccagcaaagaaggttctcgcaatccgctcagctatcttcagcatgctcatctttccatggttagttagcgctgcaaaacatcacaaaacgtttaagaaaagaaaacagagaatacattttccatatgaagcaaaatttggtaatgagtttacttatgtgatcaccggaatcgacagattgaaaatctgtcgacaagatgctagatatccgctcacactggcgtaccaatgtaccaacccagcggttagcagcaaaagcttgaccagtacagattaatttctcaaagatgctgtaacttcctgcatcatctacttccacatgttccacccatgtaacctttttcaaaccaaaaaaacaaaaaaaaaaacatcatttaaaatataaattatatgatgatcacaaaaataaccataatgtaacaataagttcataccttggagtaccactatgcatttcttgaatcagacatcagagggtcggcggcgacattttaggttgatgtttgggaggagat

SEQ ID NO: 14524 - DNA, 549 bp, Arabidopsis thaliana columbia
atcccatccatgtcggaaggtgaaagagtaacctccattgttcctgttagcgagtttgctgaagatcgctacctcctgatgcttacagtgaatggctgcatcaagaaagtatctttgaaattattttcaggaatacgctcaactggaatcatagcaattcagttggtttgtcccctttttcttcttagtcatataggaagtcttcttaacaaggttactctaacaaaattatttgtcttcagaattctggtgatgaactgaaatgggttcgttgttgctcaagcgacgatcttgtagccatggcatcccaaaatggaatggtcgccttgagtacatgtgatggtgtaagttgatggctctcattttttctaaatgattcatctttcatgtaaaccttttaatacttgagcaaactctgatggcttttgtttgtttaggttcgacactgagcagaaatacaaagggagtgactgtcatgagactccagaatgaggatcagatagcgagcatggacatcatacctgcatctcagcggaaagatatggaaga

SEQ ID NO: 14525 - DNA, 584 bp, Arabidopsis thaliana columbia
tgcagatatcagctcagcttcttactataaaaaaagaaacttcaccacagacctctaacttttcagccctcttaaccatacaggttacaaatgcacactggctctagataaaatagttcaggcaacttgataatcatttaattagtaacccaaaatccccaaaaaaacaaacagattgatattttaacgtttccctacatacagagatcattctgaattttggacttcgatttggttacctaaaggtggctagcagcttttccctgatgactgaaatataaattaccaaaaattaaaagataatttaactcacagattaagcagtttttcaggggctgcccttagaatactcaaaacctcctttaaaccccactggcgttcagaaagtggcagaagatgctgcataacagataatcgccattcacaatcttcaatgaaacgcttagccatggatactctccattctaaagcctgtcttccatcagtactgtaattaccatccagctgacactcttgttcaattggatgtgatggaagattgcggcgtaaacatcgagtagctgttttgtgaaagaataacaatt

SEQ ID NO: 14526 - DNA, 582 bp, Arabidopsis thaliana columbia
tggaaacaattagatattggatacttgccaagacattataggctagattacgcaagaaaagatcagaggagttcatcgcgaaagatgtactgagaagattccgagatatagctaaaaaatagtgaagattagttcaatcgagagaaaacaacaataatggacattgtgcatattattgatcaccgacatgagtggtcaattttagagtaaataatggaggaatacgttggagatggtcttagctaaatatactcagcttacgtcctctcattagtaatattactctttcctatgttccaagaagttcaaaatttaaggtcggcggtccattggcttgccttacaccaaatgcaaattgtgtaacaatgtgtatgtaaataaattagaataaaagaggcatacttgttccaagggaatggttatttccagtaagaagtatagtgacaggacaagatccagtttgtctgcacgagtcacggtcacgatcagaagaacgagtttcaggacgcggaatatgtacaacgggagcaatggtggagggttggggaaacacaatagaaggcttggttttgagacgaatat

SEQ ID NO: 14527 - DNA, 251 bp, Arabidopsis thaliana columbia
tgcgttctctctcgctcgcttgtgtgtgatagagagtggagagaagaatgaaactcgagaagaagaaaggtattggggcgaagagaagagggaagtagagttccttcgatcatgatcctatcttagaggatcgagacagagaagcggagaatattcaattacgatgatgacgatgatactgtagctgtagaatcagtagaggatcggacagttcgtgaggagatgcaggatgagtatgctcatgaaacggt

SEQ ID NO: 14528 - DNA, 439 bp, Arabidopsis thaliana columbia
cattctcatttttaatttccgtgacgagtttgcggcttctactagacacttgtgtgatcctgatcacagtgatgcaattctcgaattcaagaacgagtttgagactttggaggaatccagttttgacagcaatatacctctgaagacggagtcatggacgactaacagcgattgtagttactgggatggtatcaaatgtgatgccaagttcggggatgtgatcgagctagatctgagcgctagttgcctccgtggccagctcaatgccaatagtagtcttcataggcttccacaacctcgttttctagccactcttgacctttctaataatgatgttattggtcagatcccatcttcacttgaaaccctctctaatctcaccactctagacctttctagaagtcatttcagtgggagaattccatcttcgattggaaac

SEQ ID NO: 14529 - DNA, 603 bp, Arabidopsis thaliana columbia
tgaataattcttctactgatagatattcttcaaagagagaatgaacaataacacgggcatgactttctctaccaccttcataagattttgcaaggctcatcaatggttcaatgagcctttcaagggcacctctctctttctcatcacaagaagataaatgtgcctgttgcaagaagtagacagaaaaaattcagagagtaagaaacaggatggtaattctaatggaagaaataatagtcaattacctcaagaatgccttttaaaagtttggcagggaaatcggtggtcaaagagtttctggaaatactctcaaattccctatactttgattctagctgataaagagttttatttagatatgattaaaagtcttgaactcaaaacaaatatcaatatataagaaaccggattatgaatactacacaggtgtttaccatgttcctgagatttttaggtagtcgtgtcgccagaactgcaaagcactcttgccactgaagaaatgggagttcagggctatcaaggcaattaagtaagtcttgaacaacctgcaacgtatgagctatctcatagtcaaataatctagtagaaaagttggatcaaata

SEQ ID NO: 14530 - DNA, 553 bp, Arabidopsis thaliana columbia
aataaggaaagcaattagaaaggtcataacaattgcagtaacaatatcccacctgcccagtaaataagcatcttttgttgttcattctcatctccactctcaattgccttgaaggtagagtacacaggcaaaccgatgccaatggagcagctgcaggaaacaagtttcagacataccacacaaacgtgtcctttataaccgaatcctttagtcaactacagctataacaccttctaatagagaaaataaccaaaaactcggataaaacaaaaagaatccagattccccaacaatagattgacccttgtccaaaagataccctaaagtatcacaacaagtagaatagaacccttgtccactcggctaagttaataactatgtcaacaaaaaaaaaaaaaaaaaaaaaaactccctccctaccccattgcttcacatgtaatgggaatcactcaatcagatcacaatctcaccaatcaaatcattcctccaattcattcgtctacctgtaccattgattctagcaactatatggctttcttcccttacaataaaa

SEQ ID NO: 14531 - DNA, 597 bp, Arabidopsis thaliana columbia
tgaatttacttacagacaagaaatcgtggtttgtaatgttagaagactatatatgctcaagaagtaacacaatacaacaaagtttccaaaacaagtctaagacaaaacctcatccaaaagattgagagaatccaaaagagggcaagagagaatcttggctgtgtgcatatgtcttcaacataatcaaaatggtatatattatcagaaaactcttttgtcttcttggctttagttttgtacttttaaatagactgagaaactagagtttaagagcaatgctaaagcttttctctagacccattttcacaggtcctcctgtgatgcttcctttctgcatcatcgccacaaactcgttgtagtctattcgcccgtcctacaatacaacaattcaaatgttcaacattatcaacattcaaccaatatatcaatccaaaaccgacatgaaaactcggtttacttcactgtttctcaggaaagagagtttctactatcccctaggtttacaagaatcatactcaatcgtctcagttttccaagaaaacagacatgaaaactcggtaagtgaagtgtagttttaataatgcaaggatttaagag

SEQ ID NO: 14532 - DNA, 664 bp, Arabidopsis thaliana columbia
ttttcttgcattctctcctttcaaagaaactcctttttgacattcgtgtcatggacgctcccaatcccaagcgaccttgtcttgtgcctttgggtacctcctccatagaaaacccttgctccctccctattgctccagatttcaaccaaagcaacatcgatttgactatctcttctttcctttcgttgtcggacttgcctttgttctccttaccgctctccattggatgctcttttgatcgagtgcttgataatgtcatcccctcaatagctggaacttcccgtgatgaatttgatcaggatcgtttcttggatcgtactctccaactcgcatcgcttctatacaagtccaccaaacgttgcataaggaaacgtgccaccctccaaaattccacatcctggcctctcctccctgaactaactattaaggtaacaattccagcattctcatatcatgtatatctactcctggaatttttgccatgtttctctacccgctttgttgaatctgtagacaatgttttaggactgtgttttcccgcctgatctcatattggatgttataaattacgaatgctcaaatgatattttgttcatggcatgcgttttcttgagtgatgtctcacataatatgtttctaatgcatattcaggtcttttcaatgc

SEQ ID NO: 14533 - DNA, 867 bp, Arabidopsis thaliana
ttttatttttgaataacttgataaaagtaccctcaaatcatgttataactttcatggttgccatgcaactgcagctagttcaatttctcttgaaacaagccggtgtggagaagcgcactggtgatctatttggaaacagagatcttttgaatatagcacgtaacatggctcgtggacttaaggtctgtatctgagttaactcgtctccagcaacattctatatctccctatatatatgtcatgttactgacatcttgaaaaatacagggtgttgagaatgtctacactcaacatcagcctcttctgtttcaaacaatggagagcataactagagggagattacgagatgtggattacccatttgttggagatcattttcaacagggacggtatgtgcctctaattttttcaatttcttaaaacaggtaacttgtttgatagttacagatttctgcaattcgtgaaaacttacataactaatcaaaaactgcaaaatttctggataaacaggccacaagaggtggttatttttatggttggtggaacaacatacgaggaatcacgctctgttgctctacagaatgccaccaactccggggttcggtttattctcggcggcaccacagtgcttaattccaagaggtaatgctgaggttaagacagtgtgtgcaaatgagcctcgattggttttgagttctaggtcgaaacagcactgatcaacttaaatatcaacattggttaagtcatagaaggcccaaaccgaaattgctgtttgaattaaataataactaggaatctaaattggtctacaaagttcatgaaagtgtattataagagatatgtaagctgacaagtgaatttggttgt

SEQ ID NO: 14534 - DNA, 862 bp, Arabidopsis thaliana
  unsure (1)..(862): unsure at all n locations
taaaacttccatcaccatactacaatcactcatcattgtatcttcatcagctgttttaaccacgtctaatgccattctccgcctccgggacactgaccttgtccctcagcttgttgaactctgccacgggtcagtcttttttttgtagttgtgtttgtgtttcattgttccttgagggctgctggttcggtctaggcttgtttatatgcttctgcaaactcatgtgaacccgaattaggcatatgtaataccaaacccattgctgttctgccagtgggggattttataggtaagttcgaaataaaagtagggaggatttgtatgtgtctctaaccaccttgaaatgcagattaatgtacatgtggaagtcaatgcacgagtatcacgaaatccagaacaacatcgtgcaacaagtccgtggcctgatcaaccaaacagagagaggtgagtcaacatcagaggtacaccggcaggtgacgcgggacctagagtcagctgtgtccttgtggcattcgagcttctgtcgcatcattaaattccagagggagttcatatgctctctccacgcatggttcaagctgagcctggttcccctgagcaacggagacccaaagaaacagcggccagactcatttgccttgtgcgaggagtggaagcagagcctggaacgggtgcctgacacagtggcgtcagaagccataaagagctttgtaaacgtggtacatgtgatatcaataaagcaggcggaagaggtgaagatgaagaaacgcacggagagtgcaggaaaggagctggagaagaaagcacctcactgaggagcatagagaggaagtcntaccaggcatactcgacggttgggata

SEQ ID NO: 14535 - DNA, 562 bp, Arabidopsis thaliana columbia
ttccaacgtatccaaataccaaatttaacatatgaacttgcttgcaaaagaaaacacaaacgtgtgaacttacttatatgcacaaaccaatagcataaatgttagaacaaggtaatcaaaaacaaagaaattctctttcatggatgctagatccttcgatttatgttcccaatattgctatttgacaaataaccatagtttttattaatgtagataatcaaatactttgggaaatcaaatggaaaagcaagaatcaaaattatctatcataagaatattcttttgggcacacacatcctcttctgttttacatttcgagattattatcactcagtttcaaagcttgaagtgactcagtttctgtctctgtcttcttggcatgacgtgtacagaaacccttcagtctctcaagtgcatcctcaagcatatgagcttcgactccgatggttatctcatccagttcttcaaacccagagcatcccctgcaaaacattcccacaaacccattttagtacaaactcaaataagactcatctgcttagttcattatttacctggtaga

SEQ ID NO: 14536 - DNA, 526 bp, Arabidopsis thaliana columbia
tctcctttaagattgatacccgtaacctttagaattacggtcatgggatctgcttctttcttgctcctttgcggattcaacttcctgtgaactcagctggtgatttcttgggtctttttttctcgaatcgagagctacgcatcttcgtttccgctggttcatatcgagtttgactcattcaataaccaagaatgggatcctaccactgttggatctcatgtgggaatcaataataactctcttgtttcgtctaactacacttcttggaatgcaagctcacatatccaagatgttggtcatgcacatatctcctatgactctgttactaagaatttgagtgcgtcttgggcttatgaattaacctctgatcctcaggagagtttaggcatttcctatatcattgatcttgcaaaggttttgccacacatgttacggtcgggttttcagcgctactggatcggtcacagagggacataagcttttatcatgggagttcactcaagtttggatattgaggtttgtttat

SEQ ID NO: 14537 - DNA, 523 bp, Arabidopsis thaliana columbia
ttttccagcataaggtttttctgaacaagcttttccatagtgaaattgaggtcattgagacctttgttctcaaccttggcttgctcaagttcctcatgcaactcattgtttcgcatctccatgtctttcatgatctgagacacggtttgaagttccacagccaaattatttagctcctcttgagactgagagtgcaattgctgtagggtttgaaacgcggtctcagcttcctggaaatgcaaatgctctgcttgcacacagctccacaatttgactagctcggtttgtttctctgtgagcttctgactttgattccccagtttctccaagagactatccagctcagagtggagattctgatttgatctctcaagcaaaagacatttctcctcagaaaactttaacttagcaactccatcctctatttcatggctaagactctgtgtttcttcttgagcatggtgtagtttgacttttagactcgcaattatattcaggcactgttggaactgaagttcagaag

SEQ ID NO: 14538 - DNA, 1860 bp, Arabidopsis thaliana
tactgtaggttcttgttgtttggatttgaagaagatggaatggagtggtggattgagaataatccgaagaagcctcgaaaagggttcgttgcacaggagattggagcagcgtttataactgtgccaaaggattttgttgatccaatctctcttgatttgatgacagatcctgtgattatttccactgggcagacttatgatcggaactctatagctaggtggattgaagaagggcattgtacttgtccgaaaacatgacaaatgctaatggattcgaggattgatcctaatagggcgatgaagaatttgattgtgcaatggtgtactgcgagtggtatatcttatgagtcagagtttacggattctccgaatgagtcttttgcttctgctcttcccacgaaagctgcggttgaagcgaacaaagcgacggtgtcgatacttattaagtatctagctgatggttctcaagcagctcagactgttgcagcacgggagattcgtcttttagctaagactggaaaagaaaacagagcatatattgctgaagcaggcgcgataccgcacttgtgccgccttcttacatccgaaaatgctattgcgcaagagaattcagtgaccgcgatgctgaatctctcgatatatgagaagaacaagagtcggatcatggaagaaggtgattgtttggagtctatagtaagtgttcttgtttctggtctcacagtggaagcgcaagaaaatgcagcggctacattgttcagtctctctgcagtacacgagtataagaaacggatagcgattgtggatcagtgcgttgaggcattagcgttgctgcttcaaaacgggacgccgagagggaagaaagatgcggttactgcgttgtataacttatcgacacatccagataactgcagtaggatgattgaaggaggaggtgtgtctagtcttgttggagctttaaagaacgaaggtgtagcagaggaagcagcaggagctttggctttgttagttagacaatctcttggcgctgaggctatagggaaagaagactccgctgtggcggggcttatgggaatgatgagatgtggaacaccgagagggaaagagaatgctgttgctgcgttgctcgagctttgtaggagtggtggagctgctgtggcggagaaagtgttgagagcacctgcgattgcggggttgctacagacgcttttgtttacggggacaaagcgggctagacggaaagcggcttcgcttgctcgggtttttcagaggcgggaaaatgcagcgatgcggtctggcgtttacgggtttgtagggaatacaaatgggaatagagacggtggttttacaacggatgtctcagttccgatatcaatctcaatctccgtaccagtgttgtgatctatgtttagtctaaaagaactctaaaagtggtacttttttgttgttggtggtgtttgtttcattgtttgtctatattatatacatttattggttgggaggtataatacaagtaatattttagagaagatatgtgtgtatatgtatcttccagggagaacaaaaaagagttttggtgtatgatgatctttatgtgtattgtatttgatgtataagctatgaaacgtcttgcattgtgatcgttcgttactaaggagcttgcgtttttgtagtaaactttttgaaatatatatctagagaatcaaattgaagagaagatttgcttggaaggttatcaaaagaaatagtaagaatggagaaccattttttttttaatgtggtttgactaaaaaaaatagataatttatctaattaatgaaaaaaaaaaatttagttagagcatatatcccaagaaataatgta

SEQ ID NO: 14539 - DNA, 370 bp, Arabidopsis thaliana columbia
gccagtgtgctctaaagccatcatatcaggctcagtctgactcgaactccttgtactaaggacaaatctaattggagtaaggatctccacatacaaccagagacactgacacttatagaggagaacgtagggacaagcctcgaagacatgcatacagggatgcacacctgacacgaacagcaatggccagtgctgtacgatcaagcatcgctaaatgggacctcatagaatcgcaaaactatctgcaaggcaaaaggcaccgtcgataagacacacagaccagcagcagcttgacgaaggatctgtagctatcccaaatcgcacaggggactagtatccagtagatatgccgaactcatcgaaggtagac

SEQ ID NO: 14540 - DNA, 463 bp, Arabidopsis thaliana columbia
tctagagcgtaatcatcaatgagtacactctggcttcttcttctttttccttttccaattgacatcatacacttctcattcttatgtctttaaatcttgtgaataatcagtttttcaaagacgccgattacgagaagagtttggttagtagaactccacttggtcgcgctggagagccaaatgaggtttcatcacttgtggctttcctgtgtctacctgcagcttcatatatcactggtcagaccatttgtgttgatggaggtctcactgtcaatggtttctcctataagccacaggcttgagccaagacttgtgttttggtgatgcatcgcggaagtctatttccttttggtgtgggttttgtcttatgtcaggtgttttgatttccttgttttagttatgattatccatatgtaatcctactttggttaatcttgcttcggtgtttttcgttgtcagtttg

SEQ ID NO: 14541 - DNA, 787 bp, Arabidopsis thaliana
ttctcctctatccaactggtcaacaatccatcgttcatactatgttatactacagttagatcctacaaactgattttgaactgatcatacctgaatacaagtcaatcaaaccgagacaacgagacaatgcaagagctgacatgatatggggacagtatacaaaacatcaacactctcaacaattccccaaactccacctccatcacacttctctatcgcgatcaccgcacaccaaatcttcttcctattattggggttatgcttcatatatccttcccataaaagtaagagtttcccaccacatgcaactagtttagtcgtattaccacttgagccaccattcctcatgtacttatcatctagtgactctaacccttccaatcttttccaataatccttttgtatgtcattgtcataccacaacaagcgcatgttccagaagccatatgaaacattctcaatcatacattctgacctcaaagctgcacttttgtttacacaatactcccatttacatagcttcgtgtcgtaagcacacatctcgtttacatttccaaactcaatctttccttcaatcactccgcttctgtcaatggaacacttacgtacctcactacccggctcagggaggccttcccaagtctgagtctttgtattgaacacctcagcccatggttcgtcctttaatccttggcaacctcccattacgtaaatttcccatcgtggaaacatgcccaggcattcattcgggatacattcatgctcggtgcatcggccaagtgtgact

SEQ ID NO: 14542 - DNA, 588 bp, Arabidopsis thaliana
ccgtccaatattgctacattcttgatgctgtcatagccaatgctgctactggtttcgccttgtgctgacaagatgtgaccaccaatcaagtgttcattctcctcagggtactgatccgaccacttatgtttggttttttcgaccctcaaggcttctagctttgcagctacttctttcatccttggcctttcctctcccattagccttgtacactctgcagcaattcttgcagcttcctggatctccttcagattatcctcgttcatcacttcgccgccaataatctcatccaacctattctcttttgtggcagtcgcaaagtaactcaccagatgttttgaggactgtggccgtttaaagcacaatgccttttgacctgagagcagttccattaggacgaccccaaaactataaacatcgctcttttcgtttaacaaccctgtgttgtaatattctgggtctaggtaactagagtgccttgcaccatagtttcgagctcttctttatccattggtatcagccttgaagcaccaaagtcagctacttttgcagttaagtttacatcagaagaatatttgcagttttgat

SEQ ID NO: 14543 - DNA, 696 bp, Arabidopsis thaliana
acaagacagggtacaggctctgttaaaggaaaatatggatttactgaggaagaatacagtgcatttgtcaacacttttgaaggtggttcacttctgtattgcaatatgtcttttgaaatactattgaacgcaagaaaagaacttgaagagttgggtttcccttgtaaagccgtgaatgatggcctctggttgcaggttcgttgtccttaaacttgctttgctttctcattcagccagttgtagaaatgttgggatggttgatgtgcttagcgttgatacatttgacttaaggcatttacatgagcaattctagtctagtgtttcatgttagattacaaatgcaataatattgttaataaatgcaataatgtttatgtgtttgactacatttcagatgcttctcagtcaaagggtgcaggaagttgctgccaacacatgcaaaaggtgttgccttatcagtattgcatgtgcgtgtaaacaaggatttggggtttcacatggtgcaaccttcaacaattattattgccaagaaaacgtgcagaacaatatgatgggagacatggataacgtatatgtgccggaatcttctcaaggcgatgggataggcatctttaagcctgtcaggatcagtgtcagaggacaacatattgatggacttgccggcattggatgcgaagctacatttgtaccaccacc

SEQ ID NO: 14544 - DNA, 579 bp, Arabidopsis thaliana columbia
  unsure (1)..(579): unsure at all n locations
tgtctctataatttaaacttactagattcgctgtccactttctgtagtcatattgtgttgaattcatcattttggaaggagataaccttaccgggcttttccctggtacatccttggatttgctcgggttccgacttgactctaagcatttatttggaatcttaactgctctcattgttcttccaactgtttggttgaaagatctacgcatcatttcctacctctcaggtacaatcaactgcatttttgttttcttcatatgattgaattctttcgtcaagaatattgaatcagttcacttgtttttctttggttctatagccggtggagttatcgcaaccgctttgatagcagtaagcgtgtttttcctcggtacaacgggcgggattgggtttcatcacaccgggcaggctgtgaaatggaacgggataccgtttgcaattggtatatacgggttttgctattcaggacattcagtgntcccaaatatataccaatccatggctgataaaccaaattcaacaaagcagtgatccttggtaaaccaaaaactttactcttatattagcttttgatgtt

SEQ ID NO: 14545 - DNA, 612 bp, Arabidopsis thaliana
tagtactagaggatcccctgttttgaagtctgtggcctttcaaagcacaatgccttttgacctgataacagttccattaggactaccccaaagctataaacatcgctcttttcgtttagcaaccctgtgttgtaatattctgggtctaggtaacctagagttccttgcaccatagttgcgaggtcttctttatccattggtatcagccttgaagcaccaaagtcagctacttttgcagttaagttttcatccagaagaatatttgcagttttgatatcgcgatggatgattggtatagaagcagaggagtgaagataagcaagagttccagctatttctacagccattctcaaacgatgttcccatgttagagaagaatcaaacatagaaccgtgtaagtgatcgaaaagggtcccactggaaatgaactcatagaccaacaagggaacttcagtctctagacagcagcccaagagcttgaccacgttcctatggttgatttgtgaaagcacaagcacttcattgatgaactgctctacttggctattgtctccaagccgagctttctttatagcacctatggagttgtctggtaatataccttgtagactg

SEQ ID NO: 14546 - DNA, 544 bp, Arabidopsis thaliana columbia
tgagtgtattgcttgcagttgcagtaggtgatttggctgccgaagtttctagtgtgtcttctcagccagtcaaagaatcagcgacactagagagtctcctaaagaaaccacatatccactacaagcttcttgagaagcatggctttggaaatgaaacattatctagaatggagaaagactgtgtagagatcgatataaaatatgaaggtttcattgttcgccagcaaaaccaactgcagcaggtatcttgtgttagcttcattactccattaaatactacttgcttactcggatatatggacatggagttataagttatatccttaatagatggtccaccaacaacatagacgacttccagacgatttggattactattcgatgacaactctatcccatgaagggcgtgaaaaactttcaaaggtgtgttaaagtagttttcgagtagaatcagtgtgatttatagattatcttcttatgatgtgaacaattataaattcaggtgagaccagagacgatcgggcaggcaagcagagtgggtgga

SEQ ID NO: 14547 - DNA, 1049 bp, Arabidopsis thaliana
cgggtcaaggaggccaatggacagtctacaaagggatattgcctgacaactccatcgttgctataaagaaaactcggctaggagacaacaaccaagtagagcagttcatcaacgaagtgctcgtgctttcacaaattaaccacaggaacgttgtcaagctcttgggttgctgtctagagactgaagttcccttgttggtctatgaattcattaccggtggctcccttttcgatcacttgcacggttccatgtttgtttcttctcttacatgggaacaccgcctggagatagcaatagaagttgctggagctatagcgtatcttcactccggtgcttctattccaatcatccatcgcgatatcaaaactgaaaatattctcttggatgaaaacttaactgcaaaagtagctgactttggcgcttcaaagttgaagccaatggataaagaacagctcaccactatggtgcaaggcactctcggatatttagacccagaatactataccacatggcttctgaacgaaaagagcgatgtttatagctttggggtagtcctcatggaactgatatcaggtcaaaaggcattgtgctttgaaaggccagagacttcaaaacatttggtgagttactttgttttggccacgaaagagaataggttgcatgagattattgacgaccaagtgttgaacgaggaaaaccagagggaaatccatgaagctgcaagagttgctgttgaatgtacaagactaaagggagaggaaaggccaaggatgatagaagtagctgcagagctagaaacgttgagagccaaaacgaccaaacataattggttggatcagtatcctgaagagaatgtacacttgcttggtagtaacatcgtgtcagcacaaggccataccagtagccgtggttatgacaacaacaagaatgtagcaaggtttgacattgaagctggccgctgataaagacgaagaagaagattgttttcgtccaacgagtccaggaagaggttgtggcatcattggattcactggaacaggaaacttatg

SEQ ID NO: 14548 - DNA, 1130 bp, Arabidopsis thaliana
ttttatgaactaaaatttaacacaagagttttaaatttgccaataaccagatcggttactggttagtataccaagtaaaggaaaatatgaacatgattattgatgatgtacaaacaaatctgtcaaagcattattgatgaagcaacaaggaaatgactttctttttttacaaacaaaagatatacatgtgattttgtcagagcattaatatcaacggccagcttcaatgtccaatgttgttacatttctgatgctgtcatagccaatgctgctactggtttcgccttgtgctgacaagatttgaacgccgagcaagtgttcaatctcccctgtctcacgatactgatccgaccacttatatttagttgttttaactctcaaggcctctaactctgcagctacttctttcatccttggcctttcctctcccattagccttgtacactctgcagcaattcttgcagcttcctggatctctctctggtatcctcattcatcacttgccattcattaatttcatggaccctataattcttggtgccggagccaaaccaattaccaggttttttgggcaatgtggtctttcgaaacacaatgccttttgacctgagagcagttccattaggacgaccccaaaactataaacatcgctcttttcgtttaacaaccctgtgttgtaatattctgggtctaggtaacctagagtgccttgcactattgttgtgagctgctctttatccatcggtatcaatcttgatgcaccaaagtcagctacttttgcagttaagtttttatccaggagaatattagcagtcttgatatctcggtggatgattggaatagaagcagaagagtgaagatatgcaagacttcctgctacttctgttgctatcctcagacggtgctcccatgtaagtgaagaatcatacaaggaaccgtgcaagtgatcgaaaagggtaccactgttaatgaactcatagaccaacaaggggacttctgtctctaaacaacaccccaagaccttgaccacgttcctatggttgatttgtgaaagcactagcacttcgttgatgaactgctctacttggctacgggttccaagccgagctttctttatagcaactatggag

SEQ ID NO: 14549 - DNA, 568 bp, Arabidopsis thaliana columbia
tctctcacaggcggttctcaacctccttagagctctcgggtttccactaatgtccttcttgttcttcctcttgaactcttgaacaaagtgattcaccattctgttgtcgaaatcctcaccaccaagatgagtgtctcctgcagtcgccttcacttcaaatataccttcctcaatggtcaaaagagagacatcgaatgtaccaccaccaaggtcaaagatcaaaacgttcttctcaccaacacttgtagccttcttgtcaagaccgtaagcaatagcagctgcagtaggctcgttgatgatacgcataacattcaaaccagcaataacaccagcatccttagtagcctgacgctgagagtcattgaagtaagctggaacagtaacaacagcgttcttgatcgttgtaccaaggtaagcttcagcaatctcacgcatcttgatgagaatcatagaagagatttcttcagcagaaaactctttatcttctccattgtagttaacgacgatcattggttttcagcaggtcagatttgagcgtgaagggcacaatttgatgtactttgaacag

SEQ ID NO: 14550 - DNA, 598 bp, Arabidopsis thaliana columbia
atcatagtagtataacaaacacaatcaggaaggagtcccaactcgaaaatctcctgaaatatggtagaagctctgagcatgtctcgtgtggaacatatatttgacagaaagctactgtacacaaaaatgtttggtctaagacgaaaagaatgaatgagcttaatggcttcctctggtttccccaccttacagaacccgtcgataacagaactgacggatacagaatcctgagagataccaaagagtttgagtttaaacaataccgaagtcgcttcttttagaaaccctgccttacacaatttatcaataaaaactgtaaatgccacaatatcaggtctgatgccgtagtgtttcattcccataagcaattcccaacctttatcaaaatagccatccgagcaatacttccttatgaataggctaaggacagcagcatttagatgcctccctcgactaagcatgtgctcaacaaattcccgagctaactccaagccatgaactcgtagaatttccttaagcaacgaaatacaaacccctccgtgaaggaaagatgcaaactggtccactttgtaagttagcttcagggccatgtttactt

SEQ ID NO: 14551 - DNA, 568 bp, Arabidopsis thaliana columbia
gcttttcttcgtaatcaaagtatttgagtgtttttaggatgaacctttgtggacggtgatggaagacatgtaactgactccttggccattgatcaaaaccccttgaggcaaaggtagcttgtgtcctctatccaaaattgccttcaaaacctgaataatgttacatttaattatggtccttgtataacaatgacaaatactaaaacgaacataatttgttaattcaagaaagaaataccttgtggtcatgcttaaaccaatcaccaatgaggaaggtgaaatctccagcgggttcagggaaagggacggggatgcgagggcggctgaggatacggaaaccgccaaaaccaccggcagctttgtgaacggcgagggaagggaaatagaagaaactaccgatctggtctttgacttggatggcataagtgtagtttttacccggtgggattggacaagtcgtcccatacactccatcttggtaagaattcttcctcagttgcactccgttccttcattagtatttacgattttgtattatattaattcattgatattatattaacatgaa

SEQ ID NO: 14552 - DNA, 568 bp, Arabidopsis thaliana
catctcggtggatgattggaatagaagcataggagtgaagatatgcaagagttccagcaacttctatggctatcctcagacggtgttcccatgtaagcgaagaatcaaacatagaaccgtgcaagtgatcaaaaagagtgccactggaaatgaactcatagaccaacaagggaacttcagtctctagacaacagcccaagagtttgaccacgttcctgtggtttatttgtgaaagcactagcacttcgttgatgaactgctctacttggctacggtctccaagtcgagctttctttatagcaacaatggagttatcttgcaatatccctttgtagactgttccttgtcctccctggcctaggattctgctctcattataaccatcagttgcttccttcatgccttcttcagtaaagattttgacatccacatttgatggccctgctcctgagactcgctgtatcaacatgccaccaccattttgctcgaagaattgttgtcgcagctcggtgttttcacggtgcctcattttttgttgtatatagctaatggtaagaagatgattaag

SEQ ID NO: 14553 - DNA, 635 bp, Arabidopsis thaliana
acgaggtacagccctcagaccaagctgcgagctttgtcctccccgcgatgcagaacatagagagagcagtttcaagcctcgggatcaaggtctcgacggctatagacaccagaggcatttccgggtttccgccgtcaagtgggacgttcacaccggagtttaggagctttatcgcaccggtgataagtttcttgtcaagcaagcaatctcctctgctcgtgaataattacccttacttcagctacacgggaaacatgcgagacatccggttagactacactctgttcaccgcaccgtcaactgtagtcaatgacggacaaaaccaatatcgaaacctattccacgcaatcttagacactgtttacgcatcattagagaaagctggaggtggttcgttggagatcgtggtgtccgagagtggttggccgacagcgggaggagcagcgacgggtgtggataatgcgagaacttatgtgaacaatttgatacaaactgtgaaaaatggatctccgaggagaccagggagagctacagagacttatatatttgctatgttcgatgagaattcgaagcagggtcccgagactgagaagttttggggactgtttcttccaaatctacagcctaagtatgtt

SEQ ID NO: 14554 - DNA, 502 bp, Arabidopsis thaliana
tccaccttatctatatgtgaggccgttttggaatccactgacactgagccttgaattttcattgaatgctacaaaaaggaaaacaaatgaatctaatttgatactaaataaatcataaaggaatatatagagaaagggtgagttacaagttgcagtcggtgttagggtcgatggtgaagcccaaaacgacgccgcagaagccagacaaagtagaaatggcggtggcgttagagttatagacattgatgagatccatgaagcagttacacagccactttctcttctccgacgaatcagagtaagttccgatcacagtcatcgcgtcgcagcaactcgaccctggtatcggatccggatacccgtagttcacaaactctgtgcacgacgatatcagcgttcccaccgccgcacaatccgctgcgttttccacagtggctgaacatatcgtttgcagtagtaataagaagagagacaccaccggagagaatgatctcgtcatatc

SEQ ID NO: 14555 - DNA, 563 bp, Arabidopsis thaliana columbia
tgaagattccaatctttatcaatcgttggaaacctctcaatcagcttcaaatacgtctcattactcgaaacacttccaataaaccaaagtttctcacggtgaagcttcaacaaatcagcgagcttcaacacaaacttctcaatcacatcaacagagaaaacatcactagctaaaacctttaactctccaaggttcaaaaccatccctgacttcaatctccctaaatcatcaaactttatatctattcttgatccatcaactaaaacttcactaatctttatactaactacacttaacccactaatctccaaaggtaaaaaaccaaactttcctctgtttatagaatcagtaaacgttttaagagcttcaacaccacaaacaccaactagtaatggattcttcttatctttcctcgctaaaacttcaccgattcttctacagttctcgtcgagatcaccaaacggaaacccgaatctaacccgacccgagtcagattccggtaagttacataaaaacagaggaggaatacgagatcttgacgtgaacagtgaagagaattgaga

SEQ ID NO: 14556 - DNA, 585 bp, Arabidopsis thaliana columbia
gtctgagaggaacggctcccatttgctacaagccccaagtctcccagttgcgtatattgctgctcaacgtgggactcagttctaccaaaagcttcagagattgccttaataatgtaggaacccttacccattcccaatttaataccttcatgagcaggggcaatctcatttgcagcaagataaacagtaggtagcaaatcatcaggagtagtggcgataacggttctcaacatgttacacagaatatgagtgatgacaatcctgccactttcagctgcaatcagatcaaaagctaaggagagaaacataaacggaactctctcccgtttctcccaacaagacacttttccggatcgaaatcacttggcttcttcttcagcaacccaattttgctcttcagtttggtaacctatctgatttgggttttttcgaatcagaaataagaactagggttttgtcatcaaccctagtcggtggcgtatctacggtttcctcgagttttctcttcttcttggcggacgattcgacatgagaacgcaaatgcagatacactatgttataacaagagttctcagaagagtggag

SEQ ID NO: 14557 - DNA, 469 bp, Arabidopsis thaliana columbia
ttcaaatttgtggaatgatctgtttcggcgattaaattgcttgatttggtaagatcttaggagtttttatggggtttttgatgtagtgaggagcaagagatacattgttgccggatctgatagtaaaagctttggttctagcctcgtagctcgtcgctctgagccgttgataccaaatgctgttacggtatatgtttaatcttagtttttgatagcgtattaagaatttacaatggatctttgatggggctttcgatttctgtagacgaaggcggacactgctgcgagctctacttcatcaaagcctgggtatgttctgcatcctttgttacttaacttcttatgctaatggtttcatgcatcgattttactaatcttgaactcttgatcattaacatggctgttaattggaagaaaaagttctctctagtgtggtagttaattgtgatttgcattgctcatctatagt

SEQ ID NO: 14558 - DNA, 328 bp, Arabidopsis thaliana columbia
agaggccgctctgggtcctgagtgcgctgtcttgcatcgatggcgatgtcaatatgtgttgtttgtgaagccaacgaagatgactcatcaaatggttagaagagagaagattggattgagaatttcttgtcaagcgtcgagtattgcagcagtcacagtgccagatatggacaagaggaagactttgaatcttcaacttcatggggctctttgtctaggtactggctaaatgcgagtccattacactaactacatcattcctcctgggtcagattgcttgtactctgttcctcgatttgattccatttgtcgcatgagattcatggag

SEQ ID NO: 14559 - DNA, 611 bp, Arabidopsis thaliana columbia
accctcatcctcagagatgcagcttcctcacccccacttctggtataaacctatttctctctttattacttgtttgttttccggttaatgttagttaatttcacttatgaactgattttattaagtttcacctcttaatttccattttggtattgtttgtatcagcttaaaccccttgtatattattttaagttttctttgtaactttaggttccatcttataaaatacttggattcctaactgatttgtttggttacctttagatcctatttacgtggcctaccatgatgaagaatggggagttccagttcatgatgacaagtgcgtgacataattaatacttctttccaaatgaaaacgtcattgtacattagttcattttgttcaaaattaaattagttatgttaaattttcaggacgttgttcgaactgctgaccctaagcggcgcacaagtaggctccgattggacttcaaccttgagaaaacgccatgactataggaaggcctttatggagtttgaggcggaagtggttcccaactcaccgagaaagagatgaatgcaataagcatcgaatacaagatagagatgagcaaagtgagaggtgttgt

SEQ ID NO: 14560 - DNA, 839 bp, Arabidopsis thaliana columbia
tcttaattcatattctgttttgtttgtttgaaactatttcattcagctttaggtttgaaatgttgacttgtaacattagatgttgttttgataaaaaatgttgttatgttaaacaattttaatgaagaagaaaatctttttataagatgtttcaaggttgtttatttgcatttttaccttatcttatacacattaacatacacagatgtacaaacaacgttagactataacatgattagctactaattacgtgattagaaggtaagaaaatctgatggagtattagagcgctcctcgctggtcaccaaatccaccatatccgccgcggttaccggcgttacttttgcggctttccaatctaactcgggggcgatatggagaagcttgtcgagaactatcatttgagattccgtgattcgcaagatattagaggtttcttgagcgttggtgacaccaaaacctctacagaattcgaaatacttgaagagtttttctctctgcgacaaagatttcgccacgatattcatcgccaaatccgcctccgcggacgatatctcgagcatattcgactgtacatcggataagaaacccgcgaatccgcggcatatatgaccgttaatcaaaacaacctcgctgattacatattccatagcttcgattacaagaggtgtttcaccaattggtttgattctcatcaatgaatcaactattcgttgcatcttaacgataatctctaatcgaatcatgttcttgttataatagagaatcgatctttcgtcaagaaacatgaaataagcgcgaacgaagatgttaaaccgaccggttctactaaaccgaga

SEQ ID NO: 14561 - DNA, 595 bp, Arabidopsis thaliana columbia
ctagctatatcgactctagtcattcgcataacaaaactctggttttcacttcttggcaaaagagacgaccattggattctgcggagtgatcttgaaaccctgaagagcctgcatggccatggaagactgaacatcgtcttcatactccacaaacgcaattccgggttttgcttcgatcattcttatctctttgaatcctgggtattgctcaaagagcagctgaagcatcatactattcgtctcaatgggaagattatgaatgaagagtatgttgtttggtggcatcgtgtcttgcccactcggctggaaaggaggctgtgaaattacagagacgggtattaggaaacaaggatttacagactaagttgcgataatgacgtctgtcagaagataatattgtattgttggaatgatgcgagaaagagaaattgccacaggcattccgttctgagtagttgcgccattaggcatgcttggttgttgagtttcttcagcatgtcgcttccttgcaactgaaagtgatgtgcagttttgttaacatcagatgcgaagtaaacacagatgaaatgagctgaaaagatctgacttgtgatgg

SEQ ID NO: 14562 - DNA, 659 bp, Arabidopsis thaliana
gaaacttacgtacgtcgcgacaaactaaatataacgctacctgcgatgatgtcagccccaccactgatgaacttggagatactgtgaaccaccacatctgctccaagcttggccggagacagcaccatgggggcgaatgtgttgtccaccaccaccgtcacgcccttctcgtgtgccatacggctcagctcaggtatgtcagccacagtcagcgtcgggtttgccaccgactcaaagtagagaacctgtgtcctaccctcaacgatcgcgtttgccacggcgccatggtccgttatgtcaacgaaggaggtggttatgttacatgtccgtggcaagaaatgagagagcaaagcgtgtgttcctccgtatagcgtgcttgccgcaaccacgtgtcctccgctgctgcacagttgcagcatcactgacgatatcgccgacatacctgaagtcaatccgataccattagtttttttcgtaaactactaaaaggtgaagtccaaccaaagtttccgtatcaaacacgcaactaggtttccatgggttctgtatattcttttattttatatatataaattaccgctagaggtacagtaggcagcttgggtgccttcgagagcagccatctggcggctgaggttgagcacggtggggttgaagtg

SEQ ID NO: 14563 - DNA, 484 bp, Arabidopsis thaliana columbia
caaaagactattcggatacataatcttcagattgtcgtatcgtaagaacacggtagtgagtatgttcatctcctccaccaccaactggatttcatttcattaacatttggttagccagtttacaagattcttgcgggttacattgcaaaggcgcatgcacatacctgtacactgtcaatctcacaccgatcaccaacatcgtaagggtgtacgatgaataagaagatgatggactcgaagacggtcttgacagtgttcccaaagatgaaggccaagagtacaacttgtgaacttacaaagagaagtaccttggaggaagcaatttcaagaaggacaagccaaatgacaacaatgactatggcagtgacaatattaatcatgtgatggagcttgttcactgctgtcttggtgtcgttgagtgtcagggcaagagctcgtcgctctctgaaagcattgacctaatcaaagtcaacaacggtgtgat

SEQ ID NO: 14564 - DNA, 592 bp, Arabidopsis thaliana columbia
agtatcaagaaaaagagaagatcaaacacgtcttcttttctctctctctctttgtcgcctaaaattccagaatcactctgctttttacccttttaatcaatgatttttccttttagtagcaatcgttggtgattcgaaaaaccaaacttttctcggactaggattctagggttttagtgatcatctgaatattcatggcaaaccctaagctcactagggttctaagcacaagggatcgcgtgcaagacacgctttccgctcaccgcaacgaactcgttgctcttctctccaggttcgtcgtcaagatccttattcccctgtttctttctcccggcaaagctcgtttctttttaatttagtttcttattggttttgtgaaggtatgtggatcaggggaaagggattcttcaaccacataacttaattgacgaactcgaatctgttatcggagacgatgaaacaaagaagagtctctctgatggtccttttggagagatcctaaatcagcaatggtaaaaaaaacttttcctcttcttcaaaattcatcttgaaactaataatagattgtcaattttggtgtaggaactatagt

SEQ ID NO: 14565 - DNA, 1131 bp, Arabidopsis thaliana
cacttatggaagaggaaaagagagaactccttacctcttttcatttccatattttagagttatccccacagtttccttatcgataatgatcggtatgatttatgcggtggttgcgccattgatgctccctttcctagttggttatttctgccttggatacattgtctacttcaatcaggtccagattctcttataacctctttcacacatactacttttgcattatattaaccctggtttctgtcagatggaggatgtttacgagactacatatgatacttgcggtcgattctggccattcattcatcattatatatttgtctcaataatactaatgcaaatcacaatggtgggtctttttggacttaaatcaaagccatctgcagcaattgctacagtacctctcatattgatcactatagcttataacgaatactgcaagatccgcttcctcccatcatttaaacatttccctatacaggtacttatcaactttcctgaggaaatgatggatagattcaggggattctttgtttttttaaatctacataagtgtttttgtggtgtagacagcagttgaaatagacgaagaagatgaaaagaatggggagatggaaacacattatgttgatgctgcaacggcgtataaccggcatctaccttgcttagagcgtgtaagctcagcggaatcaccaacaaacttaagccaaccattgcttgggacagactccatttgagtctaaaggtgaactggtttgaaaaccttgtcttcttagtcagggattttgaagctcctccacgcacgcacgtcctcatgtgttgtcactttagatcagtgaaggctatatatggccaaaatgcttatagagagaatgctgaatgcttctttttttaggttgtttactgttttttcattagttagggttattacatggttttgtttttaaaaaactattgtatatgaaacattagtcacaaaagtggaaaacaactcagagagaatttatcagattatgttttatttctacttctcctccacttcctctagtgctgtgtctctagtggagttgtaccatctcaatttctatctaggaatattgatatgtacaatcttgtagacaaattttgata

SEQ ID NO: 14566 - DNA, 570 bp, Arabidopsis thaliana columbia
actctagaggtagaggatccctgtcaacattatggttttcgtgaaaaataggatcaatacaaatgttatgcttccttctttgaaaacattaatccagtcttctaagcaagtactcaatttggacttcctttgtgaggggcatgatcctttctccatagagttttgcaactaagctaggttgtattttgtaggaaggatcagcttcagtttctgggtcgttaatcgttatgtcttgaccaaaaattctggctttgatctcaactctcttcttgactacttcttcaaccgtttcgtacgttagaagttgcatcagctgtgtccggtcctggaaagattcaagccagttaatgacaaaagaagattgcagataatgcaataaggtaaggtatttagcatgaatcaaaatgagagtacttgttctttgatagctgtttcataggcagcaggattttcacgaaacttggcttcacaacaaatttccaaagtgaatctctttgaaagtatgtgcaaagagaggcaacaaacttttttcagtttcaagtctcataattgagccatatgttaatgatg

SEQ ID NO: 14567 - DNA, 419 bp, Arabidopsis thaliana columbia
cattcaatttaatccggttgatgatagatacttcatcagtggatccttagatgcaaaagttcgcgtctggagcattccagatcgtcaagtagttgactggtatgatcttcatgagatggtcacttctgcttgctacactccagatggtcaggtacactgagatctgcgaagttatgatctgaagtccagttttttggcatctcatgaagaatccttaaaagagtttcctaactttctaaagaatttctgtttaaacttgaagggtgtgttggttggttcatacaaaggtagctgtcggatgtacagtgcatcaggtactgatgaagttctcgtcgcgaatagatattcggctactttctgccatttcttatgtttcgacactaagtgataattattttttcagataacaagctgcaaca

SEQ ID NO: 14568 - DNA, 638 bp, Arabidopsis thaliana
aattattgtcacagatgtgtaatctttccccgatggcatcttgaatcttcccgacatctgcatctttagacgattcaacccaaataacaacatcataatcatcactgacttcaacgaacttgttgttaattagagtgaggagggtagttttgcctacgcctcccataccgaagattcccaacattctgttttcatcttttctaagactttcccaagtcttttcaagcgtcgtatcaagaccgactgtttgttggcaaagtctcacttctaccacaggaggaggaggttgctcagtcacttcttgaaaatctttaccggagagacttttaacttcagtcaacttcttgaataccttctcgcctaggttgcaggttgagaaccagcacccagatgttgacagacgtcgacgtacagctgaagcattctgagaagaagcatcccgagcggacgcaacatccattaactgtttggtgtttcctcaatgatttcgacttgtgaaagccacgtagccactatagctagccgttgaccacccttaagctcaccagcattgactctgttacaacatcttctttttctgctttaagctcatcaaaagcactcttcaacaagacaagattttccttcacatgcaaatg

SEQ ID NO: 14569 - DNA, 598 bp, Arabidopsis thaliana
caattgccaagcctttgactgagttacttaaataaaatcaatttgttaggtctgattcagctcagcaagcgtttgatcagttgaaggaagctatgattgatgtacctgtgtcaggtcttcctgatttgtccaaagtgttagtgttggagacagatgcttcaggcgcaggagtgggggctgtgttgttgcagaataaaagacctatcgcttatttcagtcatggtttgacttctagagaacagcttaaaccggcttatgagagggaattgatggccattgtgatggcagttctcaagaggaagcactacttgctaggcaggaaatttgaggtacacacagatcaacgcagtttaaaatttctccttgaacaaaaagaagtgaatatggagtatcagaggtggttggtgaaattgttgggttttgatatggatatcatttacaagtcgggtattgagaacaaggcaacatatgggttatctcgcattcctcatcctgtttctgctcttttaatggccttgacagtaccttctgtgattcagttacaggagctttacaaggagattgctgaagatgcgagcatacaaacccttattagctc

SEQ ID NO: 14570 - DNA, 389 bp, Arabidopsis thaliana columbia
ctgcaacacaagtacgaaattgtccaataaaagtatgaaatagtccaataaacaatgaaaacgatcgtaatcttctctacttcatatttaaattaatgaagacatatcggtcatgattcttgttgaacaagcgtgtttagggaagtagatcaaggagtcatcggaataaccaaaagttgaccgttgttaacatttgtacggccttcctcttccttttcttcttccaccgtattggtaggcaacttcatgatcttacactctactatttgcttactcctactccatagaaatatatataaaccgatcacaaccaccacagatccaataacgctacaacaataataaaagtatagtccataacatgcacatgatataatatattcaagagg

SEQ ID NO: 14571 - DNA, 458 bp, Arabidopsis thaliana columbia
gaaagactcaatatggaacatatatacacacttgaaaaaattaaaagtagattgtgttaagatgattttggggtaccttaatttcggattttcgaagaatcttgatgagaaaacggttatcattggaaatatgaaagacatttccaattttcccagaagaaatcctctttgagagtctcatcagtgcaaatggatagcaagtaatcatcatgatctataccctcaagttcttgaataagtctacaaacaacaacaaaaaaaacattacaaaaaccaattctcttctttattttaccttaaaacatgaaactatgttattacgtacgtacccgaaaccaacgggacagtaatccttccaatcaaactcagtgattgagccaggtggcaagtgtttaatgtgttttgtagagtatcgaattcgattctccaccgtggctctcagctccatggctgttatc

SEQ ID NO: 14572 - DNA, 597 bp, Arabidopsis thaliana columbia
  unsure (1)..(597): unsure at all n locations
atgtgaaatctccgagttttaagtttttgtgaacatgcttctgtgcttatttttcaggatctagagatagatcatgaggccgagttgcttgtgcttgcaagtgacggtttatgggatgtggtaccaaatgaggtatgactcaaataaattcacccccttgtatctgtttctgaatggtttgagggatttaaatatttgattttctacatctgattcaggatgcggtagccttgctcagagcgaggaagagcccgaagcagctgcccgcaagttaactgacactgccttcagccgtggcagtgcagacaacatcacgtgcattgttgttaaattccgtcatgataagacagaatctcctaaaatcgaaacaaacgccatggctgaatcggaacctgaactgaaccccacaactgaactggaacctgaatcaaaccccagtactgcattggaaactgaatcaatccccaaagctgaactggaatccgaacctgatgctatcctgatcaaaacctgaaaccgaccagagccaagggtgnaaagctggtgagtaggtagcagcggggaaaggtgtcatactgttggggacatgtggaacag

SEQ ID NO: 14573 - DNA, 515 bp, Arabidopsis thaliana columbia
tctagtgtggccggaaactgtaacaggcggagagtatgtccagtaggagcagtgtcaaacacaatagtagcataatccattgtttgcaccaacctaaggaaacataaacatatcaaaatttgactgtgataatacatggataaaggcagatgattactagaagaactaaatggctatttacttcaacatctcagcaaaactcatagcctcatcgattccaggaatcgcatttgccaaatcagagaataaaccatccatcccgtctgtaccagccatgtcatcagtttcaacggtaggatctacctcctgagaaaagcaaacaagattcactcactatcaagagggaaggagtgtgaatcgtaaccatttgcttatagtatgtgtatatatatacatatacacacagacacaactaagagcttccagcttagaagagtagccataagtcatcatctagcctgtctattagaggcgaccagaaccaccaaaaaccaactttttttttttttttggaa

SEQ ID NO: 14574 - DNA, 563 bp, Arabidopsis thaliana columbia
ttgtctattcttggtaggttttgtttttctctcttccgttcacacaatttcttggcgatcacgaaagacaaaaaagaaaaagaagaaaacaagagatttcacatcaatcaaatcgattccattgcgcgtgtaaccgcaatgcgcaattgggaggacccgtttacgcttgcgtgtaacacggccttgaagaagaatctaccttcttgcattttcatcatcatctttatcagcgtgttatgtccggtggcaatgtctcaggtggttgtgccggattcagatgcagattgtctcttgcgattcaaagatacattagcaaatggttcagaatttcgtagttgggatccattatcatcaccatgtcaaggaaatacagcaaattggtttggtgttctttgtagcaattacgtttggggattcaacttgagggaatgggtttgaccgggaaactaaacctcgacccattggttccaatgaagaatctgcgaaccataagcttcatgaacaataacttcaatggcccaatgcctcaagttaagaggtttcttcgctgaaatctttgtatt

SEQ ID NO: 14575 - DNA, 502 bp, Arabidopsis thaliana
tcgagaaagtggcgagtctcgtctgctactgccttgtcgtcatctgttacacactgcttctgatataccctgtttgggtcatggcttgctaatcagtctattcatggcttctcacctttctctcttctttctcttgttactcctccatctactcacctctctcttcttctgtttctcccttttaatttcagtggaatttagatgatgactcgtacaaacattcagactgtcttttcagaattacttaaaaagggtatctaaaaacacttacatagtcacatgtgtagttaactatatatatgaattgatcacatgatggtacaagcgttgggattgtcatcgctgaaagcagaagtgtatttgacctcgaaggagctggcacgagcaagcggggccactagagggtcggcgagtgcattacgaacgtaaccaggaggggccttcttgtcgtaggcaccaggtgcgtaagggtgtggcacacctcgtaaggtacgtaaggcca

SEQ ID NO: 14576 - DNA, 553 bp, Arabidopsis thaliana columbia
caagcagaaaggtttcttctcaattcgtcccaagttgtaggttaaattaagggattactaaaaaaagttgtagactatatagattagagagtaacggcagaaaatagaaacctaggacccatttcatgcaacgactttgctgcagaccgcatttctgcaacagtctcaatccgaaaaccatcaagtaaagcagaagcctctttcacatttggggtaattatgtcagcaattggtagtaatctctctctgcaataagaaaccatagttaattaacaacataacacaccaaatcactgaagtcaaacacataatgacaacaaatgcataaaagctttacctaaagatagagagaatagaagaaccagccaaaacgtgaccactagtagataccatcacaggatcaacaaccaaagctaccttaaacacaacaaaactatactaagcattgaaagtttcaaaattctgaaaaacagaacaaagcgaggtaatctctaccacgaactggaaaatctgatagattttgaagaagaacctcaacgatctcagtagaagg

SEQ ID NO: 14577 - DNA, 456 bp, Arabidopsis thaliana columbia
cgaaaccatcattcaaatttgatagtaaacaatgattacttacgatatccaattgattaagctaatataatactagatctatattaatattaataaaacattcacttgtaacaccaacaaagagcacatgcaaaagaagacaaaaccatgaactaaaagagaacaaacaccaaaatttataacccacatttatgcatatattaccggcatatattatataaattcctttataaattatctaataaataaaaaacaactacataatagagcaagcattaggattatcatcactaaacaaagaagtataagaagggtcatcgtagtaaacagccatcgtcccggtggtgacgtttgggtcaacttttctgacgtaaccaggcggtgctttcttatcataagcctgagctatgtacggctgagcaccaagttgtacggtacgtcggccatatctcggct

SEQ ID NO: 14578 - DNA, 572 bp, Arabidopsis thaliana
cacatcaataatactcaagcaattctattcactttggcatggtatcagagccaaaaccctaaaaaaatacacaaattttttttttctactaagcttcatcgtcttcttcacacaacatgaccaaaccagtcgacggatctaccgctactacagcttcttctgaaaaggatgcaatctctgcatctccctactacttgcatccatcggatcatcctcatcatgttctcacacccatgttgttgaacggtgagaactatgaacgatgggctaaacttactcgcaacaacttgcaagccaaacaaaagcttggtttcatcgatggcaccctaacgaagccatcatctgactctccggactatccacggtggctgcagacaaactcgatgttagtaggctggttgtatgcaagtcttgatccccaggtgcagaaatcaatctctgttgttgataatgcacgagtcatgtgggaaagcttgcgaacccgatactctgttggtacgcctctcgtgtcaccaattaaaatatgacatcgtagcttgtcgcaagatgggcaacagctgccactattttgg

SEQ ID NO: 14579 - DNA, 923 bp, Arabidopsis thaliana
tcgtagttcaccaattaaaatatgacatcgtagcttgtcgtcaagatgggcaaacagctgccaactattttggtaaactcaaagtcatgtgggatgacctagacgactacgaacctctcttaacttgttgttgtaatagaccatcatgcactcacagagttcgtcagagtcaacgacgtgatcatgaaaggattcatcaatttcttatgggacttgatgcagcaaaatttggcaccagtagaaccaatatattgggtcgtttaagtcgtgatgataatatttctctcgacagcatctactctgaaattattgcagaagaacgacatctaacaattacgaggagcaaagaagagcgtgttgatgctgtcggcttcgctgttcaaactggagttaatgcaattgcttcggtgactcgagtcaataatatgggtccatgtactcattgtgggagatcaaatcacagtgctgatacatgctttaagctacatggtgttcctgaatggtacactgaaaaatacggtgatactagctcaggccgtggtcgcgggcgcagagcacaccacgtggcagaggaaggggacatggaaactcatacaaagccaacaatgctcaaacttctcatccgtcatcctctgcttcagaattttctgacattccaggcgttacgaaagaggcatggtctgctatcagaaatctgctgaaacaagacacagctacttcatcagaaaaactctctggtaagacaaattgtgtcgattttctaattgattcaggcgcctcacatcacatgactggttttctggatttgctcactgagatttacgaaatccctcatagtgttgttgtgctacctacgctaaacatactattgctaccgaaaaggcaccctaatctcggtgcaaatatgaacttcacatgtttta

SEQ ID NO: 14580 - DNA, 915 bp, Arabidopsis thaliana
acaaaattcctgttatttgccagctgataacccctttgactttgaccgaggtgttatgttactattgctccacgtcacagcatccagcaaatgcgcgtccgaagattccaaaaccattcctctctcaggatccgtactcgacgaaatcgtacctggatccgtacccgagtagctttcagtgctgtcgtcgtcgtcaccttgttggtttaggacaagatccgctctacagagaggacacgtggagtgttctgagagccagacgtcaacacaatcggcgtgaaacacgtggcaacaaggaggcatcaaacgcagcgtttcgtcgtcttcgaattcacagagacaaaccgcacactccacaccacctttcccgatcctcaccgccttcacctccgagtaaagaaacgtcgggaaagtttctatagcctccgcgtcgagcccacgcgccgtcaacctcctgatcctgacgacctgagactcggcgtctgcgtcggtggatcggaaaatggaagaacgtgaaaactgtgcgttgcttcgacgacagaagatggaaccgaagaccatgaaaaagatcactaaaaacaaaaccgtgattacaacaacaactggatcgttaggtttcgtttttgttgttccgggtggtgtggtctgagtctgaccgaatccatacggtactgactggagcaagagcaagaggagaagaaagagaaggttgtgtgggatcaacggctggactttgtgtcgaggatcgccatttgaagatcatcgtatggaaagtggagaagaaaagggttttggtgtgaaaaatataaggtcgatagagagagtcaacgtctggtttgtgaaatcccggaggtgtaagagtcattgcgtaactgtggatcatagcacttgcttattgtgtattgataatatttt

SEQ ID NO: 14581 - DNA, 627 bp, Arabidopsis thaliana
ggagtaagatgttctgtctaattgtggaaagagagttgtcaacacgtgttcaatccgaatttcggttcagtctttttttagttttttaaaagacaaagtagtgtggattggtttgatatggattggatctattaattgttaaagagaaaaataacgttatggattgaaaaggttttaaaacaatgtgtgaacgtgtgtttaggtgaaggcggagaggatgaaagcaagggcagaggagaagttggccaacaagctagctgcgacgaaaaggatagcggaagagaggagggcgaatgcggaggctaagttaaacgaaaaggcggtgaagacatcggagaaagctgattatataaggaggagtggtcacttgccttcttctttttctttctcctttaagcttccctctcgttgttggtgtcaataattgtctattttcattagaatgtaatcgtatggatttagtgatattcaataactaacgcaaaaaaaaaaaaaaaagttttgtttggggaagtagataaaagaaattgagccaagaactctcaaagttaatcaaggtcccacgagtggccaactatccgcactttaattgctaacttcacttaaaactatgtcgctaacctttta

SEQ ID NO: 14582 - DNA, 800 bp, Arabidopsis thaliana
gaggttttgtataaaaggagaagcttggaatgcttacaaaaacacaacttctcacagacttttctcttatcttctcgcttcagggattttgtcatttcaagtttttctcattggtgtgagttttctctctgctgctgggttttgacaacgtctcagagttcttgggtgggtaaaaatgttggtgaacaaaaggctgtttcaatggtaccaaaaaagaggataaagttgtcgcattttgacaactcagatctgattgcggggtattctaagacccttattgggcgttgtatgaatccacgggtgcaagatatgaagacgctgttgtatatgcttcggcgtatttggcaaattgaaggcaaggtggcaggtgcgatggtctctttggtgcgatggtcaccttcgttgaatccgaattattcctcggatttaactttctggattcgggtccttggggtcccaattgagttctgggctgatcaaaccttccgggagataggagcagctttgggatcagtccaagcggttgatgttgatgctggaagagttcgggtcacggttgatggtttcaaaccactgagcttcgaaacggagatcgaatatagcaatggtgaagagacgacaatgttttttgcagtatgaaaggctttatggcttttataagctgtgtcatagtctatgtcatgatgaaaacattgtggtttcaatgtggctttgggcagtgagcaccatgttctagttgaagagaagaaagacgggaaccatctgcagagttatagaggcgcggtcactaggcaggtttc

SEQ ID NO: 14583 - DNA, 513 bp, Arabidopsis thaliana columbia
  unsure (1)..(513): unsure at all n locations
aagatggaatcaacataaacaaaacagggtttattttcacataaacaacgaagaatgtgacttacacaaaaccatcccggtcacaatcaaaaggccgtgaagcttcttgtggagaagaattgaatttagttgacaaagcccttgatctgaaaacaaaaaaaacaggttcaaaatttcattaaaaacatttttgtttgttgtgtctgtgcctatttaagatgctgtagcatagtttttagacattaatgcggtaaaagtaaatagtaatctgctgactttggaccatatgcctttattttccaagaaagaaatgagctttaaacacacaaaaagcgtgtgagaccgatcattagttacctagagaatccagctacggacagagcatcaatgctagactcagttccaccagccaccataacatctgcatctccaaattgaatcatcctagtggcatcgcctatagaatgtgcaccagttgcgcaagntgtcacagcagcatgatttgggccctat

SEQ ID NO: 14584 - DNA, 593 bp, Arabidopsis thaliana
cttttggagaattcctacaaggcttcttgtagtcaagttgacttcgcaaccaaggtaacttttttcgttagggataaattttgcttcaattattatgggaccgaaacttagactaatccctataacatagatatataaaggtgaatgttcgtgttatttaagacgtttaatgtggttacgaaggagacggctatatcacattctctttttttatttcttcaatttcttgtgtatatatgacatccaacttcactaatgattggtcaatttttatcgcttggtcatgaagcctgttgaagtgattgatgaggtaaatatatgggctgacgtccacacaaatggactcatcaagcagattctttcacgcgattgtaccgatactatcaaggagatccgtaatagcacacttattctagcaaatgcagtgtacttcaaagcagcatggagtagaaaatttgatgcaaaactaacaaaagataacgattttcatcttcttgacggtaacacggtaaaagtcccttcatgatgagttataaggaccaatatctaagaggctatgatggttccaagttttgcgcctccttatgtagagg

SEQ ID NO: 14585 - DNA, 529 bp, Arabidopsis thaliana columbia
  unsure (1)..(529): unsure at all n locations
gctatcagacgggttactaagcttctctgcattctgcaacttctctagcattttaagaatgtcttgaagtaaataagcgtcgagggtctttagatgtgagtaaatgaaacagtccacttgagcttcatctaaagacgagacatcaactaaagcacatggtgactgataaggttttcagtctgagacgatggatatgcggtgccacaatctgccttggcctcgtattgtcaatgttgcaggctatttctaatgttctcaagcgcagatntttgctaagatcaagaaccgtaaggtagatgcagtgggacaatgttaagctttcgagaatcggacaaccagatagaatcttcgcaatacattcatcagagagctcacaaaaacgcagggacaacttcttcagggacgtccaagatacggaacatctaggaatcatattaaataactcaaaagctgagttgcttaatagaggaattgatgtagaagaaatcaggaagattataactatgaaaaaaagtactactgaatgata

SEQ ID NO: 14586 - DNA, 529 bp, Arabidopsis thaliana columbia
tgtttcttcttggttctttctctatctgtcttggttaagtggtagttgttgagttgtttttaatgtctgtttgtttctttgttgcagtttaaaatgagggaatcgcagatgtgtgctgcggtttgtcgtgtgaagcttgataagaaaaccgcaaaggcgtttaaggagaagattgctgatgaatatcgagttaacatgtgaggagattgattttgtcgccttcgactgaatgtgttttgtttttcttctgtttttatgaggaagattgatttcttatgcaggattttggacaaccttcccctagttgttccggtgcaaaggccagatcaggacaatgttgtagtgtatcagcatggtttccatgttggtctcaagggaatctttgctggcgtaagagctcatcatcaccttttctgaatatgtttcaatggaaagagttcttatttatttgattttcttgtagaaaaaggaggagaagtattttaccacaaccacttgaccttcactgttaggtacacagagatatcag

SEQ ID NO: 14587 - DNA, 531 bp, Arabidopsis thaliana columbia
agaggatccccgttgcaatgttttcaattttaggttggtttttcactagcattcgttatccacgagtctgcaaaccctcacattggtaagataaattccgttcaaaattgcctctcggtgtattgaaactgcctgtttttctaacttggtttcatttcttatcttaattattctcctggtagctgtcttggggcggcttccaggcaccactgtgtacagaaacataaagcagtatccagaggcttacacatacaacgggattgtgatagttcgaatcgattctcctatttactttgccaacataagttacatcaaggacaggtgagaaaggcgtttattcttccttgtggtatgaatctattagaaacattaacaagctggctttttttgcaaagtgcagactacgagaatatgaagtagctgttgacaaatacacaaaccggggactggaggtggatagaataaattttgtaatcctggaaatgtctcctgttacacacatagattcgagcgcagtggaagccttgaaag

SEQ ID NO: 14588 - DNA, 521 bp, Arabidopsis thaliana columbia
gccaaacctcgcgagaacctaaacaatcaaacgacagattcatatttcgagagtgaaaatagcgactcgattcaaaaaacactaggagaattcatacttgagtttcatcagttagtttctcaagaatagattctactttgctatgaaattcaagcaactctttcatgtcttttgtctggaaactatgtattgaggatttcagttcttcgatcgatttagcgtatttctgaacatcttcttcgatttgctggaaataacttgacctatgacacaaatgaaagacagtgtcaaactcaagacatataggtttaacttgtggcgcaagtcatctacctctttgtcatctctgcaagtgcatcagccattcctgatcttgcaactttaacaggagatttctctgcaacactattttgccctttacttgctttttttgtttcccttctacgccacggccttcaagcttccctttgagagcccaatagagatttgcgatttgtgctgatcttcttaatttgctagtt

SEQ ID NO: 14589 - DNA, 983 bp, Arabidopsis thaliana
tggaatgatttgtcaaattttatgattgcttatcatgaagccttctgaagtgattgatgaggtgaatacatgggctgaagtccacaccaatggactcatcaagcagattctttcacgcgattctatcgatactatccgtagcagcacactcgttcttgcaaatgctgtatatttcaaaggagcgtggagcagtaaatttgatgcaaacatgacaaaaaaaaacgattttcatcttcttgatggtacctcggtgaaagtcccctttatgaccaattacgaggaccagtacctaagaagctatgatggtttcaaagttttgcgcctcccttatatagaggatcaacgtcaattctccatgtacatttatctgcctaatgataaagaaggattagctcctctgcttgagaagataggctccgaaccaagtttcttcgataagcatattccgctccactgtatatcagttggtgcttttagaatccaaagtttaaattctctttcgagtttaatgcttcagaagttctgaaagatatggggctgacttcaccatttaataatggaggtggtttaactgagatggttgattcaccttccaatggtgacgatctatacgtctcaagcattcttcataaagcttgtattgaagtggatgaagagggaaccgaagctgcagccgtctctgttggcgtcgtaagttgcacttcttttaggcggaatcccgatttcgtagctgaccgtccatttctgttcactgtcagagaagacaagagtggagtgattttgttcatgggtcaagttcttgatccttcaaaacattgattgaactgggatgtggaagaaaacattaagccaccatatgttatgttgttgtattttgtttatattcatggtttgatggaagtgggttctctttctactgctttgtgtgtgaataataaaagtgattattgtcaaggatttgtggttatatttggtgtggacat

SEQ ID NO: 14590 - DNA, 576 bp, Arabidopsis thaliana columbia
agtatcctaacgacaagcttttaagccacttcatgtctttatttaagaagatgattacacaactgagaaatgaaggaatggggcatgtttgacttacagtttcatgtttatttttgtttcagtcggtttgactcaggaacactccattcctccaaaaggattgcttttggtaactcatgaacccaattccgtgaatactgcaccgggtcctcacatcagagggagcacactcagagcattttccgttggcgagcaggaagttgatcttattcttcctggaactgcaaggttacttatttcctcttttgctttcttcatttgaccagtacttatagctgaagaatgtcattggaactatttttttaggctgcgggtacaattaggagtgaacatgccggcacaagctcatcacaagcttattgaggacaaggaagagtcagcgacaattgagctttttgaagtatacgatgtggttgtgtacatgggaatcatagatattttgcaggagtatacaccaagaagaaagtggacatacttgcaaatctttgcagtatgatcggatgacaatacttgtga

SEQ ID NO: 14591 - DNA, 579 bp, Arabidopsis thaliana columbia
ggttggattcatttggtttttgggaattttgaaaaaaaaacaaaattaggaatgaatctatgagctactcaatcctgtttcgtcggattcgaattctacactctttctccgtcgtttacctctactacacctacgttttctcatgaagtaatcgttctcgatctcagttttcgtttttgatctaacttattctttgatagatttagaaatcggggattttcagattgtgtttttgagaggtttttataggaaaatatctctagaagaagaagaataatattatattgattttaattttggtgagaagaagtcaaaaagtcaacgagaaatggggtcgttgcaaatgcaaacaagtcctgaatccgataatgatccgaggtacgccacggtgacggatgagaggaagaggaagagaatgatctctaacagagaatctgctcggaggtcaaggatgaggaaacagaagcaacttggtgatttgatcaacgaagtcactcttctcaagaatgataacgctaaaatcactgagcaggttgatgaacttcaaagaaatacattgaaatggagtcttaagacaat

SEQ ID NO: 14592 - DNA, 594 bp, Arabidopsis thaliana columbia
tttcgcctttttaccgagcctgcatggaccatcaggttttatttcccactgacagtcatcacatataccttgatctctctgagcatcatatatatcaaacgacttgaattgactgtcccattggaaactgcaaaagaacaatgttgatttccaaagatttggttgaaacttgaagtggtactcttgcttgaaaggcaccacgtgaattcctagatcgtcttgcttggatttgcaatgtatggtaagaggtggaccgccaatcaagtttgtcatcgtgacaaccgtagcgcgccagaacggtgggaggcccccataacccgaaccaaataaaagaaagaagaagaagcaaacaatagaaactttttccattttgatgtttgtatttatgaatgtggcttttcaggttgctcttggagttgattttatagtattccaagggctcgacggtttcttcacatagtaactatcccattgactattgaccaaacaaacaaagaaatcagtgtaaaagtcatgtgaccaaacaaacatccagatcagtaaaatgagaatttagtgtggttttgaccagacaaaaaaaataaaataataata

SEQ ID NO: 14593 - DNA, 531 bp, Arabidopsis thaliana columbia
ccttataatgcaatcgctctcaatgtgaagtttaaagacttaacaattatgtgatatttcgttctctaacctgagggatggcacagaaccgaaatatggaaggatcacgcaaggaaaccatgtatttcaggcaatcttcaatatgcatcaacgcattggtaaccatttcatttaagcactgtacggatttgtttgtgttctcctcgtattttaaatcctacattacaatttacaaatcaccaaaaaggcactgtcagaaaatagtcaatatgggtaacatcagacctaagatgagagcttgagagtggtatgtatgcacctcaagcttgtcagcatatttgccccaaatctcgcgaggccaaaacatgcgggattttggtatctcattaatgtcctcaagataatctctgataatgtttgttttctgcaaataagaccagtgttataaatcattcaatgatagaaattgtccgaaattgcaaaagatttgaggaagaagaaacattgtacacctcaaaatacattgttgta

SEQ ID NO: 14594 - DNA, 469 bp, Arabidopsis thaliana
cacgcagctaatgctgcagacacattgagctttagcatgaggtcacatgtggcgttaggttcagctaaagggattctttaccttcacactgaagcaaatccgccagttattcaccgcgatatcaaaaccagcaacatactcttggactgtcagcttcatgctaaggttgctgattttggattgtcacggttggctcctgcttttggggagggagatggtgagcccgcccatgtatcaacagtagtaagaggaacaccggtgagttctaaactaggacacaagtcgatatgtgatactatgtaacctgtggcttttgacaaaaccaaacatggtttccctctcagctatgacattttgataattatacatgcacagggatatctggatccagagtatttcatgactcagcaattgcgggtgagaagtgatgtgtacagctttggagtagtgttgcttgagcttttgactg

SEQ ID NO: 14595 - DNA, 520 bp, Arabidopsis thaliana
tccacactgattggtagaggtagctatggaaaggtctacaaaggcattttgtcaaataaaaccgaagttgccatcaaacgaggagaagaaacttctctgcagagcgaaaaagagtttctgaatgagatcgatctactttcgaggttacatcaccggaatcttgtgtcgcttattggctacagtagtgacatcggggaacaggtatgtccttttgcatgtgcagttgtcagttagctttatatctatgctcttcgactaatccacataggtgttctgtttggttcatgcacagatgctggtatatgagtatatgcctaatggaaatgtgcgtgattggctttcaggtaagaaatattcctcccaagttcttttctatacatgtaagatcagaaactagcttaaaatttttgaggcgccaatctgcttccacatggatgctaatgtatcagtggttttacattgtcacgcagctaatgctgcagacacattgagctttagcgatgaggcacatgtggcgtta

SEQ ID NO: 14596 - DNA, 606 bp, Arabidopsis thaliana columbia
ttgtcttgtacatttcatggatcacattctgttaaataacaccaatagaaagagagtttaaaaccgaaaatattataagcataatatcgcctaaaatgtttaaaattacctgatagtatttgagcaattgaggcctcttctttttgtaggttggagtaagaaggtctcgttccatgtcgaacgccactggttccagatgaacatcttttatgatctcaaaacccttcaactacaaacgcggagggtaaacaaccaaaaccaaaaactccaaataaagaagagaagagaaaaataaagaaaccttgttctctttggctgttttaacgagttctccaagtatgaatgcttttgcctttgcgttttggcagatggagttgaagtctccattcactccattctccacagcccatcgttcaagagtttgttgggccgggttagcgattgcgacaaggaaggactcaaagctgtttccatatacccatatctaataaaaacatattgatgaagatgtaagaaacaatattcttaggaatccacatgagagtaagaggagatctagagtcatatataaatgacatacaatatactcattgccaattagttttg

SEQ ID NO: 14597 - DNA, 602 bp, Arabidopsis thaliana columbia
tgcatggcacgccagaagtagggtaagaaagaaatcaagtaagcaaattctctatagtatcttccgtttttgcaggtattgtattcgtgagttttgaagctttgagccaagaagtaacacccggttgtctcaaggtgtctcagcaatggaatctgaatagaacacgattaatgggttaattatcgactaaattagatgtcgtcaccatctattgaagttgcataacttagttttacctggctagtaagttgatcgcccatgaagaaatcaaccatcaaaacctaaatttaccgtacaagaaaaaaaaatcatgtttctgctatttcttgtgctgaaagtaaccaaataactccaattgttaccttgtagaacggtgagcaaacaatcttccgcaagatgcggatgaagcagaaccttgttggacggtagaatgtgttaaatgggcatatcaagacgcatatgaagatctgtagcatgcacaccgaaaaagaaattagcggtttcaaattgtgattgtgatagcgattgcgattgaaacgcgccatatgataattaatgaactaagtaatttgatttaccaggaggaggatgcctggaatggt

SEQ ID NO: 14598 - DNA, 509 bp, Arabidopsis thaliana columbia
  unsure (1)..(509): unsure at all n locations
nnnnnnnnnnnnnnnnnnnnctaaagggatcttccgacatgcgcacacgtcgcgcagatgttcgttatccgccaccgccagacgcagcgcacctaacgccttatccgacatggaacgcaaatcatcagcggagagataagccagctcacgacggtgtaagcggcgctcaacgccgttatctttcaccatgcgcatcaccgcacaccagcccgctttggcggtcactacctgctcgcgcatctcaaagtaatcccgctccagcttgcgcagtttgcgggtcaggttgtccatctccgcttcgcagaaggtaagcgctttttccagttgattgcggcgtgaacggttattgctcagttgcgcatgagctcgtcacggcgaatacgcgcccgctcttctgccccgctatcagcacgcacgccgatatcctgcaattcacgttgcagatcgttgagtagctcttttttggtgtcgtaagaacttttcagcgaagcagcacctggttgtactga

SEQ ID NO: 14599 - DNA, 392 bp, Arabidopsis thaliana columbia
gcttactaagaacttaaatggtttagtgataaataacatgaatgctttatattgtgagctatcatatgtctactccagtagtgcgatctaaattctaggaaaaagtagtcaaagtgactgaaacactgtcccccaccaggccaccaccaccactatgtgaagaagaaaaaccttacaataaataataataaactagaaatgacaaattagtagtgcaaaagataacaattatactcaacgatggcgttccctgtcttgagattaaactcatgtgtgctagcttgaacataacccctagcaaatcggaaaagtccacttcctccaatcactggcatctccctcaccttatcaaacactgaatttcttcgtacactgtgatcgtgcttcattgt

SEQ ID NO: 14600 - DNA, 616 bp, Arabidopsis thaliana
tataggatacctatctaaaagtctatccttacacaaaccttgggcatttgatagggatggtgtgagtgaatcacagttcgagcaagtcttgaagatcgaagtggaccaaattataaaggtcttgtttcaaagtcccatggctggttctggtttcaatctattagtcaaattgtagtgaagatattatttaacagttttgcttcttttttacatggcgcaggcgtatcaacgtcttggtgaatctgatgtgccaaaattcactgtcattgtggctcagaagaaccaccacaccaagttgtttcaagctaagggtcctgaaaatgttcctgcaggtaaaaaatactttttattcttcacccgtcactaggattccatttctttccgtaactatttcatcataaaaaaaacaatgtcgtttgtcaggaactgtcgtggacaccaagatcgtacacccgacaaactacgatttttacatgtgtgctcatgcaggaaaaatagtaagtgtagacaaaagtttagcttcactcctcgcacctttattaaaatcaacgctatataatgttccctctatgacactcagggaactcaagaccggacattacatgtattcttgatg

SEQ ID NO: 14601 - DNA, 483 bp, Arabidopsis thaliana columbia
tatcccgagaagcgataatagcggcgcagttacctttttcattcactacaaagtctacttggcagaggtccattccccagggagattctctgcatgttctgccgccagcaacaactggtagagcccatttttactatatctactgctcctgtgaaaccaatgtcttgcatattaagatcctaccagaagttgaaagactcagaatgtgatgagaaagattcagaatgtgatgagaaagactcagaatgtgatgatagcgaatatcagtatacgagcaagggaaaagaggagataccagaatcagggactggatatagatgtgaagtgaaaattctctcaaagtcccaggatttggttttagattgctcgtccagaaagttctatgagaaggaaaaccatgctattcaaaatgcttcgttgaatgccctctcatggttaagtaggcttttcgacgagggggatggggaccactgcaaatatgtt

SEQ ID NO: 14602 - DNA, 978 bp, Arabidopsis thaliana
gtaacgatctaatcgatcctaaaacaacgtttaatgctttataaactaccaagaaaaatacaacaatacacgagattaagaaatgttataatgtaattgataactaatgacatcagaataaaatggtgcgtccaagattgtcgttgtttggacgccttttcttcaaaaagtcaatggaacgaaactccagacgtgcatggtgcaacaaaacaatgtcactaacctaataaataaaacaagtttatcgatcaaattaattatctgcgtaaaaccaaaccaaaacatttgtttctctgttgtttgtctcaaactcaaatggttgaccgtcctaccgatgtggtcgtagaagtcggttcttccggcagaactattttccgaccggacgagactccgactccagaacctcggagaccaacacaattgccgccagttcctgcaccggagaaaaaactgaccctttttgccttaagactcgctgttcttgagaaggtttttgagattccaacattctagttcattatttaggagtccttttcttgagttttaaattgtgttcttaaatcttaatcacagattgcttcagggttgggatctttaggtttcgtgtgggccacggttgttcttcttggtggattcgctggaagtttagagataacagatatctggtttgttactgtgattcttgttattgaaggagctaggcttttcagtagaagccacgagcttgaactgcagcatcagtctaagtacacaatctctggaatcaacatcttccggttccttgtcaaacaaattaaccaaatatttcaccaggtggctcacattgccggagacgacaatagaccatcggttcgagaaacgagaaccgtacaaaggaattcgggacacatcacgcggacaaggacatggaaaagctcagatgttcctatgttgccttacacaggatgggtttttgtttcaagaaacgtgagtagaatc

SEQ ID NO: 14603 - DNA, 693 bp, Arabidopsis thaliana columbia
tcacgtgagttctgatggcgggcacgtgacggcttttggttcttcttaccttgacgcggaggctgagcttgacggcgtcatggtgtttcctgacgtcattcatttgattcacgatttagctaaaggctccgttgaatttgacaccgttacggagactaacgggaaacttggcgttttgttcttccgtttccctttaaaggtaaggaacttgagtttttactcaattatttggtttatcaaactttatactttctcatcatttgaatttgactttctagattatataatcatagaaaatgtatgcagtttctaatcagattaatggaattttgttttataattatcttgatgaacaggcaaaagtggcatgtgggattctagtagatactgttaatcagacaatttctcgtcaaagttgtagtcctctctaattcaagaaacatcaatacatcattatgatatttttgctactcaatctttttaatcattatgagaatctgattttgttcaatgtctaccagtaagaaatgtagttaacatcaaacatttctacaatgctaaaagtaacaattaaaaccacaataagctccacagttaaattatttgatagacatgataaattggcggacaataaacattacacaacattctttagcaaaatgcatcatctgaagactttaaaggagtggttag

SEQ ID NO: 14604 - DNA, 574 bp, Arabidopsis thaliana columbia
ccgccctccgcagaccagatggagatatacacgttcacttaaaggaaacagagaaatctgaaagcatggttgtggttggcgaaggtacagcattcccttcatctctcccagtgacagaggaaggaaatgctgagagccaattagctgacactgagccctttacgtctcctacagttgtggaaaagaacattaaggatcaagaacaagttgaaactactggatgtgggttagttgatgattctaccggatgttcgtcagaacctcaagttcaattaccgccatccgcagagccaatggaaggtacacacatgcacttagaggaaacaaagaaatctgaaactgtagttaccgagattcaattagctgatatagatccctcattttctcttatagttgtgcaaacgaatattgaggatcaagatcaaattgaaacaggtggatgtgatttaattaatgtcccttccggatgttcaacagaacctcaaattcaattatcgtcatccgcagagcccgaggaaggtatgcacattcacttagaggcagcaatgaactctgaaacggtggttactgaagg

SEQ ID NO: 14605 - DNA, 585 bp, Arabidopsis thaliana columbia
ttttaagctggacaaggcattttaactttatctaaatatagctcaatgatagattgagttactttggacagaaaggttttgtaatttgagattacacatatatatatagtagatacttgtgtataaggaggttttcaataaccttctctctgtgttgccttaagacatcagctagagaatctgaatacttcttcaatgattacttactctgagtactgattaagacatgtgttgtgtgatgtactgaattcatcgctggtgtattgttttcctggatgattcttgtttttggggaatactttgttctcgaaagtttctctaccgggctgtttattttcgcgttttattttgcagatattctttcttcagggaaggtttgtatttgggccagatgttagatcactggcgctgaccatttgtctcattgctgtccctgttacaattttctgcatctttgtcgcaaggaagctaattgatgacttctccgatagctggggagtccaatagtagctgtcgccgtcgtgtcaccatttatgtatgtatagtttttctcgcattgcatagcagatggtctctataataggg

SEQ ID NO: 14606 - DNA, 442 bp, Arabidopsis thaliana columbia
cttggactcaccatggaatctagtgaaagcttcttctacgtacctagccgcatccaaaaccttcattttatctgcgagcttaaacgggtaaatgtctttgatatgatctccttttagtacagccgctgcttgaatcagttcgatttgaaaatcagtgagatcttcgtcttcttcttgtgttccaatgtctatgtctcttgccctaggaagttccggtaatgtgactgtgtaataatccaaaaactcattaaacatatattgcgtttaatatggactatataaccaactatatattttaccggggcagtccgtccttgggctggtccggttgatgacagcatcgagtgttccagcccattcgtcacgctttgtaagaaagctcttgaggttgaatattttcttcagtgttgccggaattgatgaatgttcgaactgcgacgtt

SEQ ID NO: 14607 - DNA, 813 bp, Arabidopsis thaliana
  unsure (1)..(813): unsure at all n locations
tcgtgaagctgagggattgtcacttatttgaagaagcaaagtggtcctgcttctgttgaaattaagtcagctgattctgccactgaggttgttggtgaaaagaatgttgttgctgtaagtgtctctaatggatcattttttcttggtttcttttccattagtattgcaggcactaatgtctagctctgttgtcttaggttggagtgttccctaaattatccggggatgagtttgattctttcatggcccttgctgagaaattgcgtgctgactatgatttcgcacacactttggatgctaagtttcttcctcgtggagagtctgtggaaggacctgcagtgaggctgttcaagccttttgatgaattgtttgttgactccaaggtaaaggggaaccttttcattttgtacattacatcaatgagaagtcaagttttatgcaataatgtttcaaattatttatttgatttgcgaatcatggattcaggacttcaatggggaagctctagagaaatttgtcaaagaatcaagtatcccacttgtcaccgtctttgacagtgatccaaacaaccacccttatgttgccaaattctttgaaagccctgccactaaggtaattctcagtaaagttattttggatctcactgcagtgcaatacattaatggacgttttcagttatgccttgcatttttactggacaagtattttagatttctgaagatggtagtttagtaatttagtatgtgcttgaaggttaaaagcttttctttgccggtggtagtgttaactatgacncagttccactggggatcc

SEQ ID NO: 14608 - DNA, 607 bp, Arabidopsis thaliana columbia
  unsure (1)..(607): unsure at all n locations
nnnnnnnnnnnnnnnnnnnnnnnctaaaggttcataccctgttgagtgattttaagtgccagcaacaggtgccggaaatgtatcttgacgttctggccagtcgtttggggatgcatgatgcttccgatgaagcgttgcgcgtggagctgaatcgctattcattaaaagtgcaaggattgctgggacgtcgctgcccaacgccaatgttatcaggctactggaagaacgatccgttcagcccggaagaggactcacgcttaatcacctcatcatctgctgacggtaaattattagagatcccatttaacccggtgtatcggaattttgacaaaggtcttcaggaaatcaccgactggatcgaaaaacgcttgtgttaaaaatttgctaaattttgccaatttggtaaaacagttgcatcacaacaggagatagcaatgacgttaccgagtggacacccgaagagcagattgatcaaaaaatttaccgcactaggcccgtatattcgtgaaggtaagtgcaaagataatcgattctttttcgattgtctggctgtatgcgtcaacgtgaaaccggcaccggaagtgcgtgaaatctggggctggtggat

SEQ ID NO: 14609 - DNA, 828 bp, Arabidopsis thaliana
tatatatatacctggaccaattgagggcctgccaatttaaggaaggtggcattggtctgtgctgcgcaggcacgagccattaaagttttaccagtccctgggggaccatacaagagcactccctttggtggacgaacacccagcttctcaaaacgttccttgtgcgtcatgggaagcacaattgcctctacaagctcttggatctgttccagaaataaactcaattagtttcactacgaagcaaagtcaatacagcagattaacacaatggtataaacatacctgcttctctagtcctccaatgtcattgtaatcttcagttggtttttcatcgacctccatggctttaaccctagagtcatactcggatggcaaggtatccaaaatcaagtagctatctttgttaactccaaccaagtcaccaggtttcaaactatcaggatccacgagtccaacaactggtagaaagatggtctgcagtccacataacgaaaacaaaagtatttgctcagacatgaaacgggaaacggaagagaagatgtagaaaacatatctaaagaatgggtttggaagtctcacctgccgtgtagacgttttcaacacaacacattttcctttccgttgcgagtcaagatcaatatttgcaccatcttcctcagcatcatcttctggattcatctccaaaatctaatagcatgatatggtaacacaacagttagaattcaaatcaaataggtaagactctgtaggaaaataccgaaaaataagataagaaaactagttgaatacctcgacaatgttgcgagtaaagcgtctggggatcctcta

SEQ ID NO: 14610 - DNA, 937 bp, Arabidopsis thaliana
aaatgtttaaaagttttatactcaacaaattactagttgaaaaacaaaattagcaaggagaaaaatgttataagaaataaattaaacctcaagctctacgtcacgatgatgggtatatgctccaagagaaagagcaaataaatacattattatgccttttatccgttaagataattgcatatcagaagaaatggaaatgaaaatgttctccattaaaaagagaagaagcagaataaaaaatttatatataacttttcagaaagcaaaaaaaaaacaaagaaaggaaaaactcgaaaacaatggttgatggtacaatacaacatactattgcatttggttatttattatatagatatatatatatccatcggagaacttgtttatgcaactgtcgaccgccgtcttcagctgctttctatgctttctttccttgctgtagcaaaagaagatccagttctcatattaatcatctttttctcaagatccaaaacaatttatatctttaatagtaagcaaaatttcttaagctatgtaatgaaaattgagctaatgcgaataatgaactgacccgtttctcttcttcgatcttggccttaatgatagagtacattgcaactccagcaatggctattcctgttcctatacctgtctgtgtcgatatcttgtttcctgcaaatatttgacaagtaaaagtatttgaattgcttcattcgggattggtctaataagtaaaaatatatgaagagaggttagtaatcttgtaccgaagataacgatggagaaaccgatcacgaacacacgtttcagaacgtttccaaccgcgtgagtcagcggtgcaaccctctccaaggtattggtagccagctgcaaccgtggtttcctcaatgttttagtttcctttataaacgcaagtttatggttaaagattgtacttgag

SEQ ID NO: 14611 - DNA, 600 bp, Arabidopsis thaliana columbia
tccctcactataattgttgtgtagtgcctaaagtcaccatctcttacacgatagatccaataatatataattttttaataaattaacaacctaagtgccattgacaaagaagaaaatatcatttaaatgagatactatagagaaaaatttctcgttataacaatttaaaataaagctctaaaacctggttagacgctatttggaccaaaacataggtcacatctagaactattgatattacttaagagaagaatccaaacctagatacagacttattggtcggattaagggtaaattagttcatgcataattatgaggaaagctagataaataaatataccttagggactccggcgtaaacatcgtcaccgtcaggatggttgatgagagtacccggacgaggattaagtgggtggtttgcgatatcatcatacatcaaaacgactatgttttcttcctttaaacctccttttcttagtatttgatatgcgtgacacacgtcagcctttaacacaaagcaacaaaacactttttaatagatacggaatttattaaacttttggaacttttcttaaatgccactagattgagaaatggagg

SEQ ID NO: 14612 - DNA, 553 bp, Arabidopsis thaliana columbia
cggtttcttcaaatgtaagcttctctgttaactgcagcacaagtggagttagcgaaatcgagaagaccggtgagagatctgattgtgatgagaagtctagagaaagtcttgatctaatgatgtcaagattcttaccagctgctaaagcaatggctcttcagacacatcagaaacatcaatcttcttataactcttcagagcagaagctaatcactcagaacagagaagctctcgtagctcgtcaaagaagtcaactggttgcagaacatgaacatttcgccattgttcagagtctttacgatgacttaaacattgatgatgatactgaagacgacgagaatgatgatgatggtgatgattatggtcatgttgatcacaagatctacccagctgaagttaccaagaaagcttgcggattcttgccaaggctttgtgcgaagaactcattcaagtttctaaacccggttcctttggattcagtatcaaaccggtctatgaaacattcgggtgatcaaccagtttccaaactggcaactaggcgtcttccggtttt

SEQ ID NO: 14613 - DNA, 517 bp, Arabidopsis thaliana columbia
  unsure (1)..(517): unsure at all n locations
tnnnnnnnnnnnnnnnnnnnnnnnctaaaggctgggagagccgagtcgagcggccgcatgctccttctcctccgcgttcaaataccacgccgttcgatggacaggcagatcggggatgaagaaccagcctgcattgtctgaataagcctaggttttattttttttttctttacttattttgagggaaggggtaccgaataacgcgacaggcagagtcatgacggagacaatgatgaagatccatttccatgcaggaaggccacccttgcctgccaggcttttcaacagtcctgcttgaatccagccaccagccatagacccgagatggccaaagacgcagaagatggcgtttctggtccccagttcagatcgcttgtaccatgaaccaaggatgaacagggctccgacactatcggggtcagccacagcccgagccaacaagaccagacctactatgcaatcgctgaaaacgccccttcgatagcattcaacagaatgacctgccaggcgtgggtcg

SEQ ID NO: 14614 - DNA, 506 bp, Arabidopsis thaliana columbia
ggatctcaggtactgccattttcagcttctggttgatctacgtcgaatttccatgtttttatcaatactcaatatgattttctcaattcatcctctatctacatggcacagaaattattcatgaactgagaaagttctgcagtaaacatttttcacctacttaataaaacatgattctgcttgatctaaaaccctaaatttctatttgcagctaatatcccttaaaaagaatggttctaagaaactaacctgagaggaaggaatcggggaaagcggaactgaattgtgttcatgtgacacatgagatgttctatcctgaatacgttcatgatcctctgttgcaaactctttaagcctgttcagagctggtaacagaactaaggcaagatcaggtctgtcctttttcctcagttcacaacattgtaaagccaatttagccaactccagagtctcttcttcaggccattctgatactgttggatccaaaatttctctcagattattat

SEQ ID NO: 14615 - DNA, 219 bp, Arabidopsis thaliana columbia
cacaaagaaatagatacaccaatgatttcagaacctttccatcaggtgatgtcaggtgcttaagtttctcggcttcacttggttcagtggcataggccgccaaggaactaacgcagactgaaaccaaaaaaatacaagttaaatatttaggaacaagcaaagaccaaagcaaccagaacaagcttgtgaggctaatctccaaacaaacagacgttcacc

SEQ ID NO: 14616 - DNA, 527 bp, Arabidopsis thaliana columbia
atctgacggatatgtatactcttttgctatagacaaaacaagcaaacaggaaagatcgatctggtgaagaagaaacatggcaactgttccggttttatcccatgatcgaggtagatgaacaccccggcttataagctacatatccactatgtaaacatgaagtggctgagatacatctttgttatgttgcaggagctgcttgagaaactcgtgaaaggcgatctatctaaaagcgactatctatgtatgaaccaatcaagtcataaggaggagagtgaagcaagaacaggatctgtcaggaagagttctgctcctacagcggttccagagagaaaagccacccctcattctatgagatcaagacgaactgcaacttgggcgcgtcctcattcttctgacgatggatatccaggcattctattttacataatgatttcttattttttggtccatttgagaggagcttggattttttctaagagtagttcatatctttcttcacacccagtgactcagtgttgaaaagt

SEQ ID NO: 14617 - DNA, 544 bp, Arabidopsis thaliana
ctctttgaacttttcaagcagctttgttttggttttgtcgatcgagtgataccatatcatgtggtaagtgaaattctctagtttgagaaagacaaaaaaaaagtccattacttgggacagggtttactaatggtcagccatttttatatcacgaagtaaaattcttgcaaccagagattatatgagttatctgagaatttctataaacatcataaaggagccacttgatagagaaaacacctctcttttattccttcatgtacaacttcattaatgtcccaagaaacttagctagagttgttgattgagccttgcccctgccgacatggaatctgcgacaccaccaggagttgtcttcatctctgaactgcttctaagttccgctccaaccactgcctccgcatcttcacttgtcaccaccttgtctccgggaagcctctccgccgcatcctacacaacccaacaatccgaatgcaccaatttattggacttttagaatgaaacactaatagaaacaaacaaaccaaaaactccatcatattga

SEQ ID NO: 14618 - DNA, 870 bp, Arabidopsis thaliana
tcggttatggcggcggatgtgctgttgaacatctcggcgatgccggagatactatctcccatggcgactaagtaagtcaggagatatttaaatccggcggtggtttgtttggcggtgggacaagcacatcggagaggaacaaggaggtttaagccgggggttagttgtctctcgccgtaacggttttgtgacatcatggcttgacacgtggataaagcttggtaagtatcgttagccactgagaaataggtttcatctcctctgttaccggagagattgtaagtggcgttgtgttggtaaaatcctccgctggaggaggagcaggagcagttagctgggatcacgactaattcacgggttgggattctggtggtggctgtggggaggttgttgattgattggatctctgcggcggagacgttgaggagtttggcgattgagtccgccgtgttgtacggtggttgagaccagaaagtgaggtatgagcggcaagaaggtgggccgttacatgtgaatccgttggttatgttgtcgtagacacggacctcgcaggcgagctggtggttgttgacgtacggttgctgagctttcgccggtgacacggcaaagaagagaaggaggaataaggtgactgagagcgcgtggagtgtacacgcagccatgttttgtggtgttctgatctgaagagggattctcgtgagctttctcctgatttaaacagagaggacgatgatgaaccaaaggagacggcgaagacttatttagtcaatggaaacgcgtcgtatgtgttgactttttgtgacgtttctcattggtcctaccgtcaaaatgataatatgtgggattagaggagattttggtacgtcttct

SEQ ID NO: 14619 - DNA, 833 bp, Arabidopsis thaliana
ccgatgatctacctatgtcccgatctagtggaagaaatcgtccttggattgccgttgaattcaatcctcagattcaaaacggtctcaaaacaatggagatcaatccttggattgtgagatttttgatgtcaatattggtgaatggcggagatcgaggagcccccctccttattgggtggatcccagaaggaagtctgcgtgtgttcagggctccatctactggttaaatgtcaaacctttccaggtactagctttggatcttcacacacaagagttccataatgttcgctcaagaccaactcacgcaacttatgccgaccaacttgtcaaccttgatgaccgtctagccatagcctaatcgtttttgcatcctccttggatactatggatatggaccatggatgttctaaaagatgatggatggaccaaggcttactccatagatttatcctcctgtagagatcttaccgtggaaagtgcattttaggccggtggcggtttctaagcatggaaatgtttacttgcatgacaatgaaaagaggttgttgaaatactatccaaagaccaacctccttcgttgcatctctaaagacacttgggtcatatcccctatggttgagaatgtgcttccacttcggcctctaggctctattcccaagacattcggctacggatccatatctcaggagcttaaccacatgccgggatcgaggatgtccaaatttcttagcagaatcccaactatactgtttacaaccactctagtgtctcaagttgtttaccgctatttgtcttgatgttgactttatactcgctgaatgttgttatgtctg

SEQ ID NO: 14620 - DNA, 1375 bp, Arabidopsis thaliana
caaaggagtctccgcagatggaaggtcattgcatcattcaagccaagaaatatcaaaaatacagatacagatagtgcatgaaaccatcacactgaaaccgacccaccgcagatggaaggtcattgcatcattcaagccaagaaccaaaacactggtttctgctaatctggggcttgatcatacaaattattttttgtcgtacagagaagtaacagaatgagatcaaattagcagacagagtgaagaacaactaataaacatatgaacaaaagccttatttattggaaaatgcaataaactaatgaagaaagagatatgcagatagtacggttacataatagagtaaagtgtaaagaaacatcaaaatttacaaagcttaacatcatttctacaaaagactccaaacactacttttcagtgctggatgtctttgagaaatatcaaaaatagacttcacaaggagagcacaatgccaaactaaagtaccttcacacaagcctagcatggcttttcctcattccgaaaaaaaaatctaagagaagaggagcaaagttgtcaaagtttaccgtccatccccatggataattgagtgagtgacaaatgtggaatcgttggctgaggaagaagtgtaaaaggtcttggtactgggggagacaggggggtttgatccgataatcagcggggtaaaggacccgataccaggagaatttggagatatatcaggcagctctaagcttccgtttaagtattgaacaatatcttccatagaaggtctcaggtctggcacaccatttgtgcaaagcaaccctagtttcagtaccatttcaacttcctcagctgagatttcacctctcattcttggatctcttgctcctagcaaagaagccattttccaacattcgcagacccacttaactatataccatctttcagctgacaacccaggttccacaggtctcctcccacatgttacttcaagtaaaaaggcaccaaagccatacacatccgtggcagtgcaagctcccactgtagcaagctctggtgccatgtagccaatggttcccacagcagcagttgtagcagggtctttcccatgatcatgaaaccttgccataccaaagtcccctaaccttccattaaattcggtgtctaacataacgttagaggccttgatatcccggtggagaacaacttggggagctcctgtatgcatgtaattgagagctgtagctatatctttaatgattaaaagtcttcgacgccatgaaaatggcggtttttcgtcattgaataagtattggtcaaggctaccattgggcatgtattcagataccagaagtgactcaccttttcttctacaatacccaagaagtgg

SEQ ID NO: 14621 - DNA, 502 bp, Arabidopsis thaliana columbia
ttgaatcgcaaaaatttgtgagagagagatctccgaggtaaagtgatatttacggaatttccatatgctcgatgcttgaaatatgcaggcacttctccacctggtaaaaccatagtcttcttgaagcatgaacgtaggatgagttctcgtgcatctctatccaatttgaagcaattctggaagttaaaatagtttcttccataccaataattatcttcatcctcatcctcctcctcatcatcctcctcctcatcctcgtcctcatcctcatcatcgtcatcgtcatcttcatcctcctcatcctcatcctcatccttcatctcgacatcggtattctcgttatactcatcctcatcctcattcttgtcataactcatcctcattctcgtcatcctcattatagtcatcctcaacatcatcgtctcgtgtacgcatcttttcaatcttttcatagtgatcatccattgttgcaccacagtggaatcactcaacgccgaaatga

SEQ ID NO: 14622 - DNA, 214 bp, Arabidopsis thaliana columbia
actcgcttaagataatgagcactaatccatggaggagaagcatgaagtggagtcctcttctcttcaacaggtctcgacataacatgtgtagaaggtaaagacgacactatatgaacatcatctgctaaaacatccttgaaatgctccaaatcgaatatatcctcaaattcactaaaattgcaacaaaacaaacaattagatcaacaatgtcaca

SEQ ID NO: 14623 - DNA, 485 bp, Arabidopsis thaliana
tgagcagtgtgagttttgacatgatgaaaattatggcgatgtcttttctctctttcttcagctgtcatgtttagggcttgtccaatggaggcagcaacttctgtgatgttccaaggattcacaagaatagctccagcacccagagactgtgcagcacctgcaaactgtaaaacaaatgcaatgtactctcatatattaatctcttaaattataactttattaaaaagctgcaaagtaagagttattacttcactgagaatgaggacgccctttttggcctcttggcaagcaacaaactcataactgacaagattcatcccatctctcaaagatgttacaagcgcaacatctgaagcaagaaagtcaaagaaagttatcagatggcagaaagtaacatttttgagagttgtaaagtagaatgccatacaaaatgtaaccaggtagccatacgattacctgtgacggcataaagtgcacataaagca

SEQ ID NO: 14624 - DNA, 212 bp, Arabidopsis thaliana columbia
gtagagtagcttgttcctctatctcgtggttggctttttcaagctgtgattgcagggttgtgaaagaagaactggttccttggtacttccgcttcccattgatgtagctccttaagcttccaactccatagtattcccctctgtcgtttgtgatagttgactgccatcatttttggtatgagttttgagaaaaacttcaccaatagtaggcg

SEQ ID NO: 14625 - DNA, 563 bp, Arabidopsis thaliana columbia
cacatgtatggttatgtttattgaaatatatgtatcatggtatttgcatctttctgcttctgtaagtatgtatctatgagtatttgtagcaactgtgtaaaataacaacaagagttatgtatgtgtgtatatgcagtttccattggtttcaaaatgtggaaagctagcaaggatgtatgaagattctaaaagcactgataagcaatctctctggacaacagtccttgaagagttccctggtggtgcagacaatttcttgatagttgcgagattctgttacggggctcgagtagatatcacctcgaaaaacttagtttccatacactgtgcagctgagtaccttgaaatgacaaatgaatatggggaagataacttgatttcccaagttgaaacttttttgcacaagcacgtgcttcgcaattggaaagactgtatcttggcgttacaaagctctagtccggtgttgaagagtgcagaaaagcttcagatgataccaaactcatgaacgctgtgtcacaatggtgtgtctgacccgagtttattggatggccatgatgatgtat

SEQ ID NO: 14626 - DNA, 1308 bp, Arabidopsis thaliana
tggtgtggctcctggaacgacaagaatcaatacgtcaaagactataaatacgttgactagagagtatccgcctatgaaagtcatgcaaacagcagtagttggcacacaaggactgatcagctatagattgaacctggaagacttccctgccaatgctcgtgcgtatgcttattttgctgaaattgaagaacttggtgctaacgagacccggaaatttaagttggtgcagccatactttcctgactatagtaatgcagtggtgaacattgccgagaatgccaatgggagctatactctctatgaacctagctatatgaatgtgactttggattttgttttgacgttctcatttgggaagactaaggattctacgcaagggccactcctaaatgcaattgaaattagcaagtatctaccaatatccgtgaaaactgataggagtgacggtgagtactagaggctactactaccttgtaaattcttctatgaatcttttcccgtctatgatgctgctggaaatgtgcaaatcaaaatttgttgataaagagtttacagaagttttctaatcctgcagtgtctgttcttgatgcaattcgttcgatgtcccctgatagcgattgggccagtgaaggaggagacccttgtatcccagttctttggtcgtgggtaaactgtagctcaacttcaccaccaagagtcacgaaaatgtaagatctattaaacaaagttttacacaagtaaaaaaaatttgtgaaactttttattcataattgacaccgttgtgtgcatcttacaacaggtgctctatccaaggaaaaatctgaggggtgagattccgcctgggatcaattatatggaggcattgacagagttgtgagcggttcaatgctgcatttgagatatcatcttgtattagtctctctgtcattcttttgttgagtaaacttgttctttgataggtggcttgacgataatgaattgaccggaactcttccagacatgagcaaacttgtcaacctgaaaatcatgtaagcttgctaatcttgaccaatagttttcttatagttgatgacactcgaattccagaaggctttactttgcctcatcttctctgcaggcatctagaaaacaaccaacttagtggttcactcccaccataccttgctcatctgcctaacctacaagaactgtacgtaatcacaactgatacctcaaatgcaattatccactacacatgacactttaaccaatgttattatctggcaggtctatagaaaataactcctttaaaggaaaaattccttcagc

SEQ ID NO: 14627 - DNA, 419 bp, Arabidopsis thaliana columbia
tctctgtctcatgattccaaaacatctaatatttgatgcttaacgctttgataaacagacagaagctgttgaggcactcattcaagaacttcctaagttcaggttaaaagctgtgccagatgactgcggtgaatgcttaatctgcttagaggagttccatatcggccatgaggtactaaacatcacttttataaatgatctccattgctagggatccaacttcttatccatgctgtgcttgtgtgcttttctcgtcccaatgctgtcctttgattgagcggattttgtctgaatcttacaggttagaggtttaccttgcgcccataatttccatgtggagtgcatagaccagtggctgcgtttaaacgtgaaatgtccccgttgccggtgctcggttttccagacctcgatctcagtgc

SEQ ID NO: 14628 - DNA, 416 bp, Arabidopsis thaliana columbia
aactgttccacatccggataacataccttgtgatgtgcagtggaaaaatacaaccaggaaaagtatctgattccaacagtttagccagtgaaaaagagcatcaaccttcaagacttgcatctgaccctaaaaatcagagccattcttctgatatacgcagagttggtgaagctgacatagttatctcccacattcaaaaaccagagagccctaaggaacgtagtcctgttagcaaggtggtttactctttccttttgaagttgcaatgttggaacttggaagttatatatataaaagagggaagctaaattccaaagaattcgtgttggtttaccttcaatccattttagagtgatatgcttatcaacattgaatgactatatcttattttgcaggatccaacatgattcagatga

SEQ ID NO: 14629 - DNA, 219 bp, Arabidopsis thaliana columbia
agattcgatttcggaaaatgtcaaagaagcattttccagtgagatacaaaaaaagagatttaccggtgaccgctgagatggtgcataatctggacttcacggcgaacatcttcaatgtcgtctttgtgaacaatgcggcgcgtagggattgacttgcaagcgacctgttgtttcgtctctttgtgagttacgaggtacgtgacaccaaactggccacga

SEQ ID NO: 14630 - DNA, 377 bp, Arabidopsis thaliana columbia
tgtggagtattaatcgaaaaagtttgatggagaatcccatgttctctaaagtaggaggtaagacacatgaactttgtgtcgttgtcatacagattgacactaccagcttaccaaattggtgttggatcatgccacaaaaatttcgtattatttgagaaacttcagatttggctgcatgagatatgtctatattgaacgagagagccacctcccccccccctcgtggttggaattctatatggaccaaaacatggcaatggactaaagaaaaatattccaaacttttgttaataataataggaaaaacctctcgtctttgtttagcccaaaataaatacacaactattaagtttgcaaacatcttgtgaagattgatg

SEQ ID NO: 14631 - DNA, 495 bp, Arabidopsis thaliana
tagcacgagcataagcaatcaactgcttagtgtctgactccggaacaccttctgctataatggccactactttaatagttggctgcttcaaagcagcatggatgaagcagcagcactaaaatacaaggggaaaagaaaacattacaagagaatcacatagtaaaacaggaaaatcgcattcacagaataaaacaataataaccttctaaacgatgcgaagttgatgaatacatctgctgtgggatgcgcacgcatgctgcctcaatgctgcaagaaacagacaactaagataaaaaattctgaactatgtatttctctctttctttatgtagatggtatttaacttacgctgcgtggacagggatggcgatctcctcctgaccaaaaaatagcttttggaatccctcggaacctgggtttatgataccagcaacagaaggagttctcgccctgtaaagagttaagataattgtggaaaccaaatttaatagtgaa

SEQ ID NO: 14632 - DNA, 1728 bp, Arabidopsis thaliana
gtggtttgtttaggtgggaatggtagttaccattgtcgagataagatgttaagttttctttggaccctatccgagactcctttacccacccataggcaaatggcctttagagttaagaggatcggcattatgaccctgtctctaccgagtaggtgttaccgaagccttgaaaactctcaacttatccactcaccatttatcgcgctcattcatgtcatgttaatctattgcttggataatttgcaatctcttgacatgttgaaaaagtacggcattatgaccatgtcttcaagaggtggttaccgtctctttctcaacctcgttaacccgtcagcctcctccgtggagcaccttttcaaaagctcagatgcattgtttgcaagagctgcttatgatcacttggtggtcgaggatttcgcgaagtcgccttcatggtcgaatccgacaaagcctcaacagatttttcaatccttgtaatcttttttaaaaacttcacatctctttggaaaactcatgaagctctatctttatttctttgtatcatctttgcttcattgtgtatgaaccttcctctttttgaggtttaatttgaatgaagatcttgtttgacaaaaaaaaaaatagtatcatgttacatttgagtataaattagtctgattccacactcttccagaatgatcattcaatctacaagtttatcatcttttttccatcttcaataggtgatctaatttgtttgtttagcttatatattatacatttaaactttcggatgcgactggtcaacaactcttggatagacatattgccattgatgcttcttgctgtaggtgtggagagccggagactattcttcacatgttgtttcactgccagtttgcgcagttagtgtggagtccgacaccgtttgcaagacactgggcaagtgttggagcagggagtgttcgagaaggcttgatcaccggttgtaagcttgcatgtctaccgccgactggaattgcttcggggcctttagctccttggatctgctggagtctatggaaatcaaggaaccaaaaagtgtttagtaccaggttcttcaccccagaagaaactttgttaaaggctatcacgaatgctaaggagtggctggcagctcaaggcaaatcacgtgaggggatacttctcccccgaaagacaggatgcacctcgacaaagacaggagacaagtcacattttcagtgtctcctgtaaagctgacggatcatggcgcaatgatctaaaggcagctggcttagggtggaccttcaccaatccggctggtcttacctctcatcattctgctctttgcaagaatgtatcatcacctttcatggcggaatctttggcctgtggagctgttgtcttggaagcggtcagggcaggggcggatagcttcctcctagaatctgactatcaacaattggtcgtcgcaatcaatgcccgattagttttattggaagttcatggaatcatttcatatatcttccttagcattggtagattttctcacttcttatgtcgcttcattcctctgtcaactaatgttgtggctgattcacttgctaaacaatgtcttagtttgtacggacaaaacatttgttgaacactaacatatatttggggtgcacaaaaaaaaaaaaaaaactttcggacgcgacaaaatattttagtatattgtattaagttgttttcctcttaaaaaaaaaa

SEQ ID NO: 14633 - DNA, 647 bp, Arabidopsis thaliana columbia
cattcatttttggtgtttgtaatattcgtcttcataagctaaaagacttctttatcagtccatttattcgttctctctttctttcttctttagggaaagctgttggacgcggtcgggacgtggccgtgggcgtggtcgcggcagaggtcgttagatgtagcagcgctctggaacatgttgaaggtttgtgagtttaatttttaggagaatgtacgagttatgtaactagcaactctggcaaaggaaagatttgattgagaaatagtatgattgatgctctagtaaggagttactttgtaatggaattccatggataacaagatttggctttacatgttataagagcatctacaagtagagaatttgtgtgatactgatagctcaagactttttattcatttaacaaatctgactatcaaattgcattaacatgttgacaatcttagtatagaaaaactgctatctcctccgttaatcttccacatgaaacctatctcacatgatcctgcaattgggatcttgattgtaaacgggttcccgatctgattgtagggatcacacgggtagggataggaagatggcacccatatccatcatgaggccatggttgataacatggctcaggtttttgcatggttgcaacatgg

SEQ ID NO: 14634 - DNA, 661 bp, Arabidopsis thaliana
aaatgaaactatccattacaatgtatgtatctctttttctttttttcttgccatggctttagcctcttacaaacttaaaacataaatagaatctctaactaaacacattgattctcagggaatcgacaatatcaactacgagactgaataccggcgagaatggtgtagcagtaaagggaaaccatcaccgtgcttcctcttcgccaggaagttcactcgtcccgccgctctccgcctactccgtgaagtaaacttttctttcactatcatagcttaaactaagaaactaacatcacaaacattttgatgaactcattgtgggtttctttacttcctctatttctttggcagactatcttgttagagggcaaagagcatgacaataagtagatccttcaccatttaaagcatatattacacataggtacgtaagataaccaagagttactatgtttgtacaattgtactactgtgatttcatctgtaatacttacgatgacgaatttacatagaaacttacaccatttggtaaatgagtaaaagccagccttgataaaagatggacggtagagaaagagctcagcaggggtgacctgagaacacatgaaaacgagagctgtaacaatgacgtagcgtcattacagccgttgattactcgtgt

SEQ ID NO: 14635 - DNA, 574 bp, Arabidopsis thaliana
gctataagcctcatcaaaaaatggtgtgttttataaaatgtatgccatttttttttctttggaaacatgcgttttgtactccggctcttttatcatcgacgtttgtcatcgtcacgtcatcgatacatgcggagtttatttagcgggttacttttgttttttgttttttgcaagaaaaccctattataaaacatgctgcaataaattttaatttcttatcttattttattatgattttcgaaatcaaaagaagatatacttaagtttttactctaaagcttccatctcttccttgaacttaaccattgcaattcttggcaatgtaaccactatttgaacccctccgaccatatccgattccagcctagatggtcgcatgaacatattaaccgtcctagctgtctccgatggaaccacgggtacgatattcaccggctcatcccacccgaaatccatcgatccgaaaatcccaatattcctccaatcagtcaaacaaaacaacccatctttttttcctttgatcgttaagttcacttaatgatttttcagtgtttgcaaccttcttggagataac

SEQ ID NO: 14636 - DNA, 600 bp, Arabidopsis thaliana
  unsure (1)..(600): unsure at all n locations
taaaggacatagaaattaacttaggtattaaaccggcaaattaaaaataaatggagtttttttcgggttttttccgattttaatgagctaaccggaaatcatgagaaaagtggtggaaatttaagacatgtgtcttctttcatccctttcaatacaatgatccaagattgcgatctattggatttttcatatttaggttactggttatcatggcgaggatggcgggataagaaaccaatctggtgccgtttggatcgggctttacataataaggattggcctgatatattttgcaattctttcattgaatatttaacagtgatggcctccgatcaatcactggtcattgcaactttaacagataagataccatggggaaaacaaagttataggtttgacaaaagatggattggtaaagaagggttattagaggcaattgcagatgggtagaatatagaaaatggattaagggagggtaattttgtggacaaattgccgagtttgtagacgttctatttcccaatggtggaagaaattatcacattatggacganaaacaatagagaatttgaagtcagagttagcggcacgcagagggat

SEQ ID NO: 14637 - DNA, 620 bp, Arabidopsis thaliana columbia
tctttttccaatgtaaatcttactatatgaagcttttttttttgtcaaacaagatcttcattcattcaatccttaaaagaggaaggttcatacacaaagacataagataatacaatgaaattaaagataggagctgcatgagttttccaaagagatatatacttttaaataagtttacaaggattgaaaaatctgttgaggccttagtggattcgccatgaagtcgggcttcgcgaaatccttgaccaccaaatggtcattaccagctcttgcaaacaatgcatccgagcttttgagaaggtgctccacggaagaggctgatgggttagtgacgttgaaaaagagatggtaaccaactctagaagacatggtcataatgccatacttttccaaacaaactgagggttgcaaattatccaagcaaaagattaaaacatgactaagcttgttaaatggtgtatgggtagatagagagttgtagaggcttcggtaacaccttctccgtagagacagggtcataatacagatactcttaactctaaaaagcaaatgactatagttaggtaaactagtcctggaaagggtccaaaggagactaagtaacagatctcgacaaaagt

SEQ ID NO: 14638 - DNA, 704 bp, Arabidopsis thaliana
cccagaactaataataccttctccgtctgagccaccaagaaaagctgtagaaacaaaaataaaaataatggttcatatcagataattatcctattacaaatttctatttttcgaataaataaataaaaagggttagatagaaaatatacagatgcaagtacaagaaggacgtcgtgtagaggcgtggctcgtggtgagaacgagtcttagaacaccatcggccatgtgagaagtaaagccggagaagaactcacagcatttgcaagggatcttggtgttgataccgccgacactgatcttgggtcttagcttggtaccgtcgtagttacggtgcgacgagtcatacttgtgttccttgggagcgtcggctaagatattcactgtattattaggttggtctagtaaaacagtgacgccgtctcttggaactccggggagatcgaagcggatgtagctttcattatccaaagtcttggcctctaagaaaccctttggaccattcacaaggaatggattgtttattgcgtagaaaccctctgctcaaatcaacaacaaagaaaaaaatgacaactttatcggaaataaaagaaagaggttacgatttgatgagaacgaaaaaagagaaatagttaaacatacctggagatggaggacaagagtactggggagagatgattagcggctgaagattcgttagggttttt

SEQ ID NO: 14639 - DNA, 903 bp, Arabidopsis thaliana columbia
gttcttcagaccctggcaaagaatccatgcctcacactttctgtcatcaaagactacatagctcggaaacttgagcaagagtcaaaaataattgaagaggaccggcgagctgtagagaagtatcaggttagtgtttcatcattaatttcttgcctgatatttcaagtcaacaagaaaaattgttctcttaatgctgatcctacttcttatcaaaaagccagttgtctatcacaatcctctcccagtgtaaattcctaatcagatttttgaacgatgcaggaaacgactaaaaacatgagaaaagagattgaagatctcaggaccaatgccagaatatttcaacttagcaagtgtactgcttgcactttcacattggatatcccagctgtccatttcatgtgtatgcattcattccatcaacgctgcctcggtgacaacgaaaaagaatgccccgagtgtgctcccgagtacagatctgtgatggaaatgaagagaagtttggagcagaactcgaaagaccaagatctgttcttccagcaagtgaaaggctcgaaggacgggttttctgtgattgcagagtactttgggaaaggaatcatcagcaaaactagagatgcaacatcttaattctcttcacgcctgaaggtaaccactgaactcattgcaaataactcaaaaaagttctcttctctactttgatgtaatcaagtcaactgagaacatatttttacaaaataacgataatctgggagataaattttctcatttagtgaccttgtctgttcagggaaggcggctgaaacatctccaactcaagtgaggccggcataaactttgtggcatctgtgtattctgtgaatgtgaggtatcctttgaatctactttatcggcttagatattgtg

SEQ ID NO: 14640 - DNA, 590 bp, Arabidopsis thaliana
gcgagtcaactgggtgtctcattgtcccatctacactaccattgctggaatgccaccgcaactcttcagtaatccttttcgatctgaaaagtctcttgaatctgtccttgatagggaaatatcttaagacttctgctggaacccctttattttcttctcctgtgtggttatccttctcccatcgtgaagcactacatcgcgggcagctaactaactcctcatactgcttacgataaagaatgtagtcattcttacaggcatgaatcatatcgtaaccaaaaccgaaaaccttcaagaacttctttatctcagcagttgacttgggaagaacattctccacaggaagcatatcgtgaacaactgtaagcaactgatcaaaatagttttcagacataccacttttcaccttgatgcgatagagagccattattgcaaccaccttggtatacttagaacttgtcaagtatagaggagtttcagcttccaataacttctctctaaactcagcttcttctttgcttagttcttcatcataagcatcattgtcattctgaatttgctgcttttctccaccactgaaaaatgcagtc

SEQ ID NO: 14641 - DNA, 543 bp, Arabidopsis thaliana
tggatatcatcatcttccacattccaggccccatgttcatcatggaggccggtaattctattcctagctcgtctctgtttggttatcgcatgaaaatattttgaattattatcccctaatttcatccacaaactccggctcttttgataccaatattgttcttcatcacgataagcttcttgcaatcgtaacgttaattccgtaatctcctctcgcgctcctgtatcatccctttgtgccgcatctaattccgcctattagttcctctattggttttcgtccgtcagggataaatctttttgccatttagaaatagcccgcctacaatttgtaattttttcaacaaaacatccctcatcgtgatccggtacctaaatttcagccatttgaaattgcctctaataacccttctttaccaatccatcttttctcaaaccagagattttgtttgccacgtggtatcttatctgctattgttgcaattactggtgaatgatctgaagctaacattgttagatattcaataaaagaattgcaaaataa

SEQ ID NO: 14642 - DNA, 487 bp, Arabidopsis thaliana
ccaagccaagattacaaatgcattacaatatccatccaaaacatgttctattccactatttcaactaagtagtactatgcttgttattagtttatcaaaggccacatgcaaaaaagcaatagccttctcccagttgcagtcatatagttactgtatgatcagagaccgaatatacatcctggcaagtagacaagtagcagaaggagaagccaaaaaacagtcaattgtaagacgcgcatggatgcttaccccagtgaccttcacgtgttgaccatttttggcagttctaagatcagcatcaggataacgagcaatgaaatctgtgataccacgtcttccccaacaaatattccaaatgaaaagtgcagcaacaactgtgaacaagatggcgactacatcaaggagaattgggtagtcagctgcactcagattgaagcctccagcaaggaaccccataatgaatataagagcaaccagccacagcaca

SEQ ID NO: 14643 - DNA, 565 bp, Arabidopsis thaliana
ctgctgctgctgctaaagctggatttcccaacatcccagctccataaagcggatggtattggttccctaacataaacggcgaacgagccattccaccaccgttaaacacatgttgaccttgtacctgctgttgctgaggctgtccatgattagccatcgaacccatactaatcttcaccggaccaggttgatcatgcccctttcctgaagccgcaggacccatagaagcaagctggcaagtggcagttctattaagaatcctcttcttcggttctttaagagcttctttagctcctttcctagtcttgaacataacaaatccaaaccctttagccttaccagtagccttatctataacaacggtacactcttcaatctcaccataaccttcaaagactccaacaagagtctcgcgagtcgtctcccatggaagaccataaacgaagattttcctgtgtgtaacatcacgatctgcggcttctacgacggcggaatagatcgaagatccgattcgagaagcggaacaaactagatcgacaagctggtccttggaataaggttgtag

SEQ ID NO: 14644 - DNA, 714 bp, Arabidopsis thaliana
ccacctgaaccaccgccactttatcttccactccgacgcagctaaacctcaccgttccatctaaccgcacctgtgccggtaaccgtggacttttcagcctctgccattctccaaacccgctgtttccaccacgacgacgcgcatcaaatcgccaaaacgaaagctccaccgcgtgactggttagcacatacacatatccaaccgccgcacacgccgccactacacatccaccaccaggaaccgaacgactccttaaccactgacgcgactccacatcgaaaagatccatagagctcgcataagcacgcgccgccaccgcgcgtgaggtctcattcccaattttcaatccaccgatcacataaaaaactccgtcaacggctgctccgatgcaaccgtatctcttcctcgccgattgagtcacaacttcccaccgattcaactccggatcatactcttccaccgccgccgcaacctccgaaccaccaccacctccagcaacgtagatcttaccagaaacaaccgcgattgcgaatttcttccgagggaaaatcatcggagatctcaaattaagcgttcccatccacgaatcgtatctgaaaacagcatttctactaacaacattgaccctaggtccgatcgacgcagtgcgagaatgtagataaacttccataactaccgtcaacgccaacagacctactcgaaaccgcaagagac

SEQ ID NO: 14645 - DNA, 801 bp, Arabidopsis thaliana
ctttgaatcgtttcttcgcaacaggtcctatgaccggtattgtgattcttcatcaatcgagatccaatcgctcgacccaaaccctagagggaatcacaacacgaacccgttaatcgagtcgttatcttcatggacttcaccttctcgcgtttcgtctctagaagtcgcgggaaacggcggtggtggcggttcattcaaaccaatggtttcagcagctacgtcttctggttctcttcacgttctgatgattgatttggtggaaggagctgcgattgaagagttttacgcggcggaaggggagaggtttcatgtgggacgcgtggaaggtgtggattggagagagggaggagaatgtgttactgttggtgaagatgggagagtgaatgtagtgaagattgtgaatggtgaaggtttaaggtatagaaaggtctttgatgggaatggattggtggcttatagagctgtgaaatgggcttctccgactgagtttgttactggaggatatggttttggtttgcaattgtgggatcagaggaagtctggtgaaagctgtttcacaactcaaagggaactggtgagttcttaactctgtttaatgattgaataaatgctagttcaatctggttttgaattcctggcatgtttgctcttcgatgatatggaacttgaaagtttgtgcgtttggctttagaacacactcgtaatatttgatttggtgagctgtttagcaagtagaactaagaatgggaacggtagatcctttgagttaatagtctatataagaagcatgcctatcctact

SEQ ID NO: 14646 - DNA, 564 bp, Arabidopsis thaliana
gttctatatcctctcgttgaactcatcacctgaggtaaggccacatgaacttttgaaaggttgggattcactaacttattatgtatgtcttgtggtaatctaagcgtgaaccggtcgagattctctgaatgttgaccggtccggtcagaattcgtgaacattccagctaaattccatccggtcgacatagacctacgtggcatgctctggttacaagttaacgccactgactcaatcaatcgcgcatcaggagaacctaaagatctaatccgatcaccgttcggatcagaaccaggaggatcgttaactaaaccaggtatttgaatagagactatggattcacccggtacgggtataagatcagcgcggcaaagaggacacgtggtgtgagagcggacgcaagcgtcaatgcaaccaggatggaacacgtggcagcatttaggaattaaacgcagcgtttcatcgtcttcgaactcgtttaagcaaacagaacactcgagtgcttctttgccgatcctaagcgtcttcacggtggagtattggaaagttggaaaagtctcgatg

SEQ ID NO: 14647 - DNA, 612 bp, Arabidopsis thaliana
caccagtaatatgccaagtatctttgcttagatcgaaaaagtctgtgttcttaaaatcaaacagaacaaaattgagaagaatctcttataaattccaataatacgaaacacaactcaagttcaagctcactgatacaacctctcagatctaaaatgacgcacccaaaagtttcgattttcaccataaatacagtaaattgaacacataaaacaatgaaaattctggatccaacgatactaaaacgaagcgtgtgcgaatttagtcgtatccgagaaataaaaaaagaggaccgatttagtgagattaccaatgaagatgaggcgtttgtcgggcttctgagaacacttgaggcggcggaggagctccgacatgagatccaccgtctgaacatcttccaaatccgccgcagcaccaccggtcgccatagctgatctagtttagctcagaaaacttcgtttttctcgaaaaagagtttttattctcattagtcagagggatgtagcaatgaccgggtcgggtttcataaactcgggtctcttaatttgcggcggagcttttttgatctcgtggacaaactttaccctgaaactgacattaatttacatttattg

SEQ ID NO: 14648 - DNA, 712 bp, Arabidopsis thaliana
aaaaatgatcatataagtcctccaaagagccatctctgggatagaggaaccaatctctggaattagtagatcaggcattccatgtgaacatcttttggatgaagaatgccttaggcgaattccaattgatcagaaagaaataaacattaagcccaactaatccaaaagggatctaaccgactcttaaccacctgaaaaacccttgaatgagacttcgcacctgcatgagagagatggggaaagtcaacttagaagagatctcagggacaacgacggtttcgttcataagtagccgccagccacgacaaacgccggcacaagccaccacgctgcgtcgtgacggccatccgccaccgtccgccgcttcagacacgaatcagaatctccctaagaagctcttcaggaatctctgaccagcgataatcttgcgatgacacagaagtggaatcggcagctgcggcggcggcaaggtcgtggacacacgatgcggtctcgaacgcatctcaaggattaagctacgtgcggtcctacgacttctggggatacttataggctgcgtcttcagacgattagaatcgggtctcaggtcgaagccggagcagtggtcatggtggtattgctgagtagaacgtagttgatgtatttcaacatattattgagtatcactgtgttattacctctaagcagacattggatttttttggtacatcaa

SEQ ID NO: 14649 - DNA, 796 bp, Arabidopsis thaliana columbia
catcttgtcttgttttatgaaaatgcatttttcagttgaaatttctaatttcaaatcctgttttaaaataggagtaatattaatcattagtagtaacgaggcattatatataattcatcctaattatttaattttttgactttaacactcttttttgggttggcaggtgggaacggatacaagaagacacttgaagagctaaagaatttcaaagacgcagagagtcctttcaacgaagacttcttcaaaatgttccaatctgtttacaaacagcagatgctgatgctcgagaagcttcagcatcgtaaaaacaagcttgacaagaagcttaaatgcatccacacatggagaaaactctccagcatcatctttgtggctacctttgccactgtgctcatctgctctgttgtggctgcagccatggcagctcctcctgtggctgcggctctcgctgcagctacagccgtgccgctaggctcaatggggaaatggattgactcgctgtggaagaattatgagaatgcactcaaagggcaaaaagaggtgatcagttcgatgcaggcaggaacatttgtggcggttaaagatttggataatatctgagttttgatcgaacggttggagattgagatcacggggatggtgaagagtgcggagttcgctgtggaacataacgcggtcaagattgggatcgatgatataaagaagaagcttgaggtgtttaagaagaatgttgaagaactggggactcaagcagatttgtgtagcagagatataagaagggcaaggactgtga

SEQ ID NO: 14650 - DNA, 651 bp, Arabidopsis thaliana
ctattttaatctacaatattgtttcacgtgggaaaatcataccaaaatcttttcttttttgggaaaactcaagatactcttctggttggattaatgcgactgacattattattatatagtttggtgtgttgatttgtaccacaaatcaaaattttgcagctagacgattgggttctatgtaggatctataagaagaatagttcacaaagaccaacaatggagagagtattacttagagaggatctaatggaaggcatgctctcaaaatcatctgctaattcttcttctacatcagtactagacaacaacgacaacaataataacaataacgaagaacactttttcgacggtatggtcgtttcttcagacaaacgttccttgtgtggtcaataccgaatgggccacgaggcctcaggatcatcttcattcggatctttcttatcgagcaagaggtttcatcatacaggtgatctcaacaatgataactacaatgtctcttttgtttcgatgcttagtgagattcctcagagttcggggtttcatgcaaatggtgttatggatacgacgtcgtctctagctgatcatggggttttaagacaggcgtttcagcttcctaacatgaactggcactcataatctatatagatatgt

SEQ ID NO: 14651 - DNA, 2051 bp, Arabidopsis thaliana columbia
ttctctctaattttcctttttgctgatctctatcaatatgagagtgggctgatatactaaaacgaactcaaaagtagaaaattagatcatgagtttggaatctgaaaactagggaaaatgataggagtcaagctgaaaaaactcaaaatatgtgagttaaaattttaattgataattataaaattttgacaaatatcaatagcttttaaattttgttaatttatgagatatggattgttttagatttttaaaaagatatgactattaatatcaaattaaatattgaaaaataatatggaaaatatcaatagctttgaagttttattatcttaaaaaatctagaattattattgtttttactcttatatttatgtatacataaatcactaattatatattagttatgtggatgcagattacatgagaatagagaaaagctaactctatatatgtgtacaagttttttttctctctgtctctcccaatctgttttcttgtcctgtgttatcgcctctcctggtacgcccgaccaagtttatctttgtctcactgatcgtttctctcagtctcgacctaattgattaaggttttgttttagtctatagattcttctttaatctgtaaacgcatttctatgtttgaaatgcattattatcataagaagtacttgagttcaatctttcattggtttatctgttttattcatatacagaatcgaactcggaactgcgttgtaatgggaaacaaaacaagcagaaagtcaaaggagaaatcgggtaggaactacacaacggaactgagatcgtacgaggctgcatgtaaagaagacatggagattcagtctttcgacacacgtatgcaggcacggacgagtcacgtgataagcacgctagctacaggcgtcgaggttcgatcgctctcgtttgattccctgaaagcagtgattgggagtttactggacatgaaccaagaagtggccaaagtgatcttggattgcaagaaagacatttggaagaatcaagaaatgtttgagttcgtcgaagcttactttgagactagcttgaagacgctcgacttctttaatgctttgaagagaggcctgcaaggagtacaaattaatcaccttttcattcttggtgctgttcagcattttgaagaagagagccttattcaaggcaagacttttcttattttctcttttgttttcttctggttttgactttaacactcatctttttctggttcgcagatgggaacggatacaagaagacacttcaagagctgaagaggttcaaagacgcagacagacctttcgaccaagacttcttcaagatgttccaatctgtttacaaccagcagaagtggatgctcgataagcttcagcgtcgtcaaaacaagctcgacaagaagctcaagcgcattcgcacatggcgaaaactctccagcatcatcttcatggctacctttgccactctggtcatctgctctgttctcgctgcaactatggcggctcctcatgtggctgcggctctcgctgcagctacacccccagtgggatctatggggaaatggatcgactcgctgtggaagaactatgagaatgaaatcaaagggcagacagaggtgttcagttcgatgtatgtagggacatatgtggcggttcaggatttaaataatatcaaggatttgattaaacggttggatactgagatcagggggatggtgaagaatgcggaatatgcgggggagcttggtccagtcaagattgggatcaatgcgattaagacgcagcttgaggtgtttaagaagaacgtagaggaattggagatccaggctgatatgtgtagcaccgatattagaagggcaaggactgtgattctccagaggattattaatgctacttgcagcacctgaagaaagcacaaaaggaactacccggtttctctcatcttcaggttcttgctacaaatgatgaaatgctcaaagacaataaataataatagtacagattctttctgaatgtatatacctatcaaagtccaataactcaa

SEQ ID NO: 14652 - DNA, 512 bp, Arabidopsis thaliana
tccgatctcgacgctccttcgccgtcatcctccgttagtttcaccaacactaaaccaagacgccgtaaactctctgcaaactccgtctccgacacaccaaatctactgaatttcccaaactacccttctccaaaccccataattcccgaaaaagacacttcccgttggaaccctctccaacgcgccgcctccgccgcactcgacttcgccgaaaccgcattgttaagacgcgaacgttctaaacctctccctaaaacagttgatcctcgccatcagatctccggtaactacgctccggtaccggagcaatccgttaaatcatctctctccgttgatggaaaaatccctgactgcattgacggtgtttactccgtaacggcgctaatccactcttcgagccagtttctggtcatcacctattcgacggtcgcggtatggttcacgcgttaaaacactaacggagacgcgagttactcgtgccggtttacggaaaccgagagattggtcaagag

SEQ ID NO: 14653 - DNA, 866 bp, Arabidopsis thaliana columbia
actcggacatttccaagtatgtgaagctataaccacacaaaaaaaaatcaaacaaagtgggatgacttcttcatataggggaactcaaaacttgaaatatacaaagagaaagcttacaagtatctagaatatacaaatccttaagaggttaactccatcagtaccaccaaacacaaaaagattgtcgccgactgttgtacagctgtgactgtccctgggaggaggaggtgtgccattgatcattggctgagtccatatctgctttgctgcaacaaggatcaccacagtgagagagcaagtaaaccacaacggaccaaaagcttcctcaaaagagtcaaaccaaaatcattaaaggaaaaagctttaaatacaaaattggatatagagaaatggggatgtttctcataccaaaatctgacaaacaaaaaacaaatcagagtgtaatttcttatcctaaagcagacatgcaatatggatgaacaaaggtaggaaacttagatgattgtctagaatcgaaatccgaaatgggaatcaacccaaatccgccattttttgagaacagagacgatgtggaaagagagaactaaccagcgtcgaaaacatggacttgattggtttggcaattatctctgccatagccaccgaaaacatagagaaagctacctcctttaatggcgttacaagtgtgaccccacctcttaccgggcccggaagaagactcaccgagacccacttgttgctgtagttgtcggaccctttcccacctcattttccgggcgagaatcgtttggggtgagaaagtgcgggaaaatgaaatgggttcttttttggaggaggaggaggaatgaggaagaaagaaaatcaga

SEQ ID NO: 14654 - DNA, 525 bp, Arabidopsis thaliana
agaggatgccgggtgagctttcattgcggattttaactgaccgtcgaaatcgtaacgtccaacggtttggagatcgccggtttgagtaatttttaatggggacggtaaatcgtcttctgacatagctaaaagccgtttattaaagtaaaccaaaccggcgtttgctactccgacgccgttttggttgttgatcagaccacaaagcccacgtgcgtaaaacagcatcaaacgtgcgattcccgagtgaccgtgaagctcgccgattgctttcgggaaaactggtcgacccaatcgtttttcctgaaccaatctctcggtttttgtaaaccggcatgcgtactagctgaaccgttggttattttaactgcgtgaaccattccgtctccgtcgaataaatggtgccagctgttggctcaaacatcggattcgcgccgttacggatataaacaccgtcaatgcagtcagggattgtccttcgacggtgaggttcgccggacggaagattctggtacaggggaataattc

SEQ ID NO: 14655 - DNA, 846 bp, Arabidopsis thaliana
tctgacgaccaaatgtctcgaatataatctgttgtcatactcgtaccaactacactgcaattataatggatacttgatgaataataacaattcaacaagtgagatttttttcatttgtaaatgcaaacaaagtaacaaactggtggttcattacaaaatcttcacaattatatatatgcttaagtcagctcaattatatgctaagtctaaaatcttcatagcaattatagtcacatggaattctctattaaagtataagaagaaagaaatggtatgaatgaagaatgatatagttagagaagtcattattattagagtagaccatctttatccatccggtacaggttttgaccaatacggaaagagagaaaaagagtcgcaatccttttttttttgttacgaaattaaaattatataattagtgcaatttaaagcacgaatagtaagcgttcacttaattcctcgattaactgattagcatattacgattatacccttcatcttccttattgtgtctctactctctactttcaccttcctttccttccattctcctctatatatatcgaccctttctctttctttcttcctcacacactaaaagcttgcaaaaaccataagcttatctacttactcatctctctcacaaatcattttctcagacttctctctttctcttaaaccatgcctgaggaccaaagaaagaatctttagaggttttcgatctgacgcttgaccaaaaaaacaagcaaaagcttcagttgatcgaagaactcacctctaacgccgaccaagtccaaagacaagtcttggaggagatcttgacccgcaatgctgacgtggagt

SEQ ID NO: 14656 - DNA, 598 bp, Arabidopsis thaliana columbia
cacgagctcgtctcaagcctttctccaaagcagcacaaaaatcaagtgtcttcaagctattctcaaagtaatcttcgacaagctcaaacatttcttgattcttccaaatgtctttcttgcaatccaatatcactttcaccacttcttggttcatctccaacaagcattgcgtcacttctttcaaggaatcgaacgagagcgctcgaacctcaacccccgtagctagcgtgcttatcacgtgactcgtccgtgcttgcaaacacgtgtcgaaagattgaagctccgtgtctgctttgcacgcagccgcgtaggatctcagctccgttgtgtagtgcacgctcttagccgatgtctcttgtgactttttgcttgtttggttcccattagaacgtcgcagtaccgaactcgattgatctgaatatatgaataaaccaatgaagattgagctcaagtaataataacttttatgatagaaatgcgtttgtacatagaaacgcggtcaaaaagaatgaagaagaatctttatggtctaaaacaaaatggttcaccgatgagagaagtttaaagagaaatgattagcgagaaagagataacttgg

SEQ ID NO: 14657 - DNA, 1194 bp, Arabidopsis thaliana
tgggaggatcgtctcactaagtatttatgataatacttactcatctcattgtgttgttgatgcaggttccgacaaaacggtaaaattgtgttttttttactaatacaataaaatcacgattttggcggaaaaatatgaaattgtttttttccgccaaaagggtaaaatcgtaaaattgttttttcccgccaaaacggagaattgtgttttctcaccaaaactgtaaaattgtgttttcgccagtataataacattacgattttggcagaaaattgcgttttcccgccaaaaccgtaaaatcggagaattgcgttttcccgtcaaaaccataaaattgtgttctcgccaatataataaaattgcgattttagaggaaagtttgcggaattacgtttttccgtcaaaatcgtaaaatcggagaattgtatttttcccgtcaaaaccgtaaaattgaaaaattgtgttgtgaaatactatctttccttcaaaacagtaaataatttaataagaaataatttattaaaatttaaaatattaaaacacatagaaacttataaatgtaaaatatagaacttgaaaattatttagttgtaattgtaattaaaattataaaaatatgattaaaatgaaaatatgtttattgactcaattcatgcccatgggtaacccattgtccatatggtcaagcccatattatctgcggacaaaactgatcatatgcccaattggactatttgttttatggtccggaatataacccatccatatgcatttggactgggcaagcccatgggcggcctgcccaattgacagctctaactagaacgccgcttgagcaactcagtcctccatccaccacctctacattcacaatcttcccacttcaaacgaaaagaaagtaatgattgtgattacatggtagataaagctgactccaagaccaagtaacacaatgagagatgttttcgcacaaacactatacaggatcaaataagtaaatgataatgctcgtttctgtctacttttcacgacaccaatcttaatccaatttcaaaataacttatatctagtacaaagcaaatatttcaactccaattttccacaacaatactttaaataaataagtaataagttggattgcagctgccatagcgttagcagctggactcatctttggattgacaattggacaca

SEQ ID NO: 14658 - DNA, 572 bp, Arabidopsis thaliana
catctgggccaattacctcggggcctctaaattcatctggggctcctaggaaaatttctggtcctctagactattctggttcgatgaagacacatatgccttcagttgtccacaaccaggcggtaactacccttgctccggaagatgacttttcctgcatgaaaagcttccccaagcctgtgctgtggctggttatacttatatttgtgatggggttcctcgctggaggcttcattcttggagcagttcacaatgcaattctcctcatagttgtggcggtcttgttcacagttgttgctgcacttttcatttggaatatttcttgtgaaagacgtggtatcacagatttcatcgctcgttatccggatgctgatcttagaactgccaaaaacggtcaatatgtgaaggtcactggggtaagtatctatgcatcctgggtgttttgcatttactatgtgctactgctttatcatgggaaatgacgaaatgtgatttggcttccttcctttggtatctctactatgttcataatattggtttttatattttgtcattgaaaggtggcacctgtg

SEQ ID NO: 14659 - DNA, 1567 bp, Arabidopsis thaliana
gtcaaggtatgttgtcgtttcatgttaagagctaatcttaatgttcttgaagatgagtttttttttctttttcttatagagattgtttgtgaatgtaggttgctattccagtggtacctacaataaaagtgcttgttacattcacaaagtttgaagaaattgagcctgtagatgagtttaagacgcctctctcgagcccgacttcttctggctatgagagtccagctgctgcaacaactgacttcaccaactcatcatcgtcctcctcgtggtttcgtcggtctagatcaaacaaagatggtgggagtagtaagtcaaaaacattacaagacccatttgctatacccacaggttatacttgggtcagtcttgaatcaaagaaaaggaaaccaaaaaagggtggtaaaaaaacagaacaagttagctaaccacttcaactcttgagaacataatactaacctacacaggttttcttcatgagatttgtgaaaagacattgaagaaagggtgagaaaggcataaaaattctgatacaactttatttgattattttgtaacatagctcagacatttgcaatgaattgttttcctttccattgtgatgtaaaaacatttgttctgcgtcttttgtatcttttttttattcttcttattcaatatgcttggaatatgcaacacctgagtcgatatcttggaaaaaactggagccgattaaatcacattctagtgtaattccaaataagtttgtagatgaggtaacgtttgttcttgaattttgactattttagatgttgaggactatatacggattgtcttgaggaggaaggcattttattaacctaactacttcataataatctaatttcaccaacacaaaataacccattaacacttgggccttcaattcaacaccatggcccattggcctttttcttctttcttctttctcttacgatccttttctctttgttgttgcagtctcttctcatcttctccactcttcacttgatctcatcttaaatacgattaagtataggatcaatttccaacaaaaatctggaattcaccagagcttcatcctcatcgcgaaatcgacccgccgtaagtcttttctcaatctctactctctacttgtcgatttgatggttgtttggttaaatcgattagatatagagctgtcaaatggtccgtccagagactattgggtgtatccgtacaaacaatttttttttatgggccaagttggacggttcataatgaacaatggtccgaaaatgtccatgcccaataaagaccatgtccatatgggcaacccgtggtcagcccattttattattgttattattgataaatcaaaaatcatgattttaaagaacaattgagaaattgcatttttcggtaaaaattataaaaatcggagacttgcatttttccgacaaaacggtaaaattgtgttttttttttaccaatataatataatcacgattttggcggaaaaattatggaattgcgtttttccgccaaaaccgtaaaatcggagaattgtatttttcccgtcaaaaccgta

SEQ ID NO: 14660 - DNA, 873 bp, Arabidopsis thaliana
atccattgcaactatatactctagaaggagagcaagcacattagacaaaacagattcaaattaaagtaaaatgactaacagagacactttcttgaaaagcaagaaaagtatcttaggcttctaaaggacaataagtacttcaaaatccaataagttgtaaaaagatgttcaaaacaccaaatcaacaagataataaaagatagagatagcgatgaatacaaaacacagcgtatattaattaatgcaagaattggaagacaagatatcttctctcctattgggatattgtgggaggaagccaaaacatgcgaccgggtggtggagtagagtcagagagataacgaatggtgcaagaggcgagatcccatatgccataaccggaaccatggccggcaaagtagactgagttagggttaagaccagggaagtccttagcagagagacagaaagattcattctcgcccaagaaaatgcagagatcgccaatgtcatcggtgtaaggaccaatcccttgctcttcgtcttgcctaatcaccatgatcttgtgggtcttcttgcaaaggtctttgttgttattgtaacgtgtgtctccccatgtcgcaacttctcctttgtccgtaagactctcaacaaacctagacaacaacacagattatatcatcttcaatcccttataaacaacacaaactcacgggttcttattaccatgcaacgatgaaggattggcccgaagctgactcgactagttgttgttggatcctgaaacgagagagacgcctttcgttctccaactctggcatttcttcaagaaagttagagaagaggaatctcttgtagccactaaccggagtgtgtaaccggatttcggtgtga

SEQ ID NO: 14661 - DNA, 1034 bp, Arabidopsis thaliana
catatggcaatgggctcccatggcatgaattgaggagaaatacaatttctccgattttacgattttgacggaaaaacgtaattctgcaaatttcctctaaaacgcgattttattattttggcgagaacacaattttacagtttcgacgggaaaacgcaattctccgattttacggttttggcgggaaaacgcaatttttctaccaaaatcgtgattttattatattggcgaaaaacacaattttacagttttggtgagaaaacacaattctacgttttggcgagaaaaaacaattttacgattctaccgttttggcgaaaaaaaacaatttcataatttttccgccaaaatcgtgattttattgtattggtaagaaaaacacaattttaccgttttgtcggaaaaatgcaaaatgcaaaaacataattctttaaaatcatgatttttgatttatcaataataaaatgggctatacatgggcttgcccatatggacatggtctttattgggcatggacatttttcggaccattgtccattatggaccgtccaacttggcccataaaaaaaactgtccgtacggacacgcccaatggtctttggacggaccatttgacagctctacttagagatacccgcacgtacactagctactgaggagtctgagctacactatctttttcttgtttcactagaacacattcacattaactacaacttcaaatatgataaaaggaaacacttttaaaacaaatacatatttctaattccttttccttggaacattttcatgcgttcaaagcttttcttgtgaatcatactacatatctcctcgtgcaagtaaggaacacagttaaatacattacttttagtaaacgtacacttcctaaaagggacatgcatgtgtggcttgaaagaatgtaaaacttcaatttaactaaaacataaacttaaactaaaacgagaagttaaactaaaaaataaatgcaaaccgtaatattattacgttaaacgtttaaatggcaaggaaacaca

SEQ ID NO: 14662 - DNA, 718 bp, Arabidopsis thaliana
tcaattcagtcccatgggcagcccgttgtccatatggcaagcccatattatccgtggacaaaactggtcatatgcccaattagaccatttgttttttggtccagaatatagctcgtccatatgcatttggtctaaagttcagaattatcagaaaattgataaagtcgaggcatttcgaattgtttgttgacacagaacaaggaaaacctctgaaattatttcaatattgacgggtaggagaaacggtattcttttcttaaacttaaaaaaatagagaaataagaaccaagtcaagatggaccgggcaagcccatggacaagttgttttacactaaaacaagttgtttcccaatcttcattagcattaaacccaagaccagcattttggctacctacaattggctaaaacgtatcgattatttcttatttttgacaatttttaccacagtgtacttagtagctcaaacattacaaagtaatttgctttgttgcaagtatatagagagaggggaacatccgcaagtcgcaatgctgactctaacttcaacgagatgagtttcctgttatcttcttggcaaagctgcttatgtcaaatgtatcattgccattctttgttatgaccccctgcatatacaaacacgttgagagattcaaataaatgagcataaatatcttccagaacaagcaaggctggaaaaacgaactttctcggttatga

SEQ ID NO: 14663 - DNA, 559 bp, Arabidopsis thaliana
atatcattttactatactccacaaactgcacaaacacacagaaaaaagacagagcattaaccactttttcaaagggagctagacgacgacgtattgctaaacacaacaaaagaggtgttaaacgatggcgtattaaacgtaccttccagatacggagtttagagtagttgatgacgtaataagccatggcgaactgagtttggttctcgggtgggtaaacgggttcgatttcacggacgatgcatccttgatccacaagtatacgacggtgttcctccgggacgtcgggtaacatcgctactacgagtggataagccgatttgactttccttaaccctttggctaaaccaacgactcctttcacgtaatcaccgtttccagcaagaaacgtcacgtaagctcgatcgctgtcttggactgatggcagtgacggttttgttatcgtcacggtggacatagcatcagcggtttgagtaagccccggagccatgtgattagcacgtgatctgctgtgaggatttagagtttatctagtcgtgtgtttgtgtttgctgatgag

SEQ ID NO: 14664 - DNA, 784 bp, Arabidopsis thaliana
ctccattttgcaggttgcagagcattacgagagtgtcgtagcaacggacgtgagtgaatcgcagctgaagctagcaacgccacatccgaaaatcaattatcgccatacgccgacgtcaatgaccgacgacgagctagtggaattaatcggaggagaaaactcagtggatctaatcacggtcgcccaaggcgtacactggttcgatctccctaggttctactcagtggccacacgactcctccgtaaaccaggcggaatcatcgctgtctggggatacaacgacgtcatagtgagtccagagttcgacgccgtccagtatcggctccacgccacaacgctgccgttttggaagtatccgtacattcagcacatcttcgattcgtacgaagcattgccgtttcctttcgaaaatgttgggatgggatcagaaggggagccattaaagctggagatgcctaaaacgacgtcgtttgaagggatcataaggatgtttaaatcatggtcggccatcgtcacggcgagagagaaaggcgtcgagttgttaccggagagtttggtgagagagcttgaaaccgcttggggaggttctgatctggttcgttccgtcgtttacaaagcttttatgattgcaggaaaagttagagtttgatatcaccaaaccatgattgattgttgttctcatttgagtttatttataaaaattggttatattgcaaaaattctcagaaagtgttgttatttgacaaatcaaacaaaatacactctattacatatattgacatgg

SEQ ID NO: 14665 - DNA, 1066 bp, Arabidopsis thaliana
  unsure (1)..(1066): unsure at all n locations
tattttggtcaaagaaatggtttccaaaaaagaaaaaaaaaagaattagataaagctgaattgtttttggtatgctctaaaatctcctcttttataagcccttctcaagaccctagttttgttactttacttttggactatgtctatagctgtcaaatggtccgtccagggaccattgggcgtgttcgtatggacagttttttctatgggccaagttggacggtccataatggacaatggtccgaaaaatgtccatgaccaataaaaatcatgtccatatgggcaagcccatgtataacccattttattattgataaattaaaaatcatgattttaaagaattgtgtttttgcattttgcatttttccgacaaaacggtaaaattgtgtttttcttaccaatacaataaaatcacgattttgccggaaaaattatgaaattgtttttttccgccaaaacggtagaatcgtaaaattgttttttcccgccaaaacggagaattgtgttttctcaccaaaactgtaaaattgtgtttttcgccaatataataaaatcacgattttggcagaaaaattgcgttttcccgccaaaaccgtaaaatcggagaattgcgttttcccgtcgaaactgtaaaattgtgttctcgccaatataataaaatcccgttttagaggaaatttgcggaattacgtttttccgtcaaaatcgtaaaatcggagaattgtatttttccctcaattcatgcccatgggagcccattgtccatatggtcaagcccatattatccgcggacaaaactggtcatatgcccaattggaccatttgttttatggtccggaatatagcccgtccatatgcatttggactgggcaagcccatggaccgtctgtccaattgacagctctaactatgtcaggtgtcagcactaaagattaaatagcccaaatatctctttacattagaacttgattgatagtagctanatagctaaggacatggtcttttgatcacataaaaaggtctacatcacatgtgaatagtgatgatgtgctgtgctatgaggttg

SEQ ID NO: 14666 - DNA, 1189 bp, Arabidopsis thaliana
catcaaaagggagaacctctccaacatttggatcatcgtctcctggtagaaaatttgtgctggagaagaatggtagcgctcttgttgggttccatggatatattggtcctggttataatattaaagctcttggagcatattatcgcccgattcctcctactcctgatgtgaaaagactagaagcacaaggtggtgatggaggagcttcttgggatgatggtggtactttcaacagtgttagaaagatctacattggactaggcaaaaacgttgtaggctttgtcaagtttttgtactacaaaaacgctcgtgttgtcatcggagatgatcatggcaacaagaccctttcatctgatctcctagaggtcactgattcaatttccataatttaaagttctagatttctatcgtacttggtcaacttattatcattctcaatgtatttctttttcttgttttgcagttcgagttggatcctcttgaacgtatcacatcagtggagggtacttatgatgataaaatcggaggtataaccatgcttaggttcaagaccaacaaaaaagactctccgtactttggattcggtacattaccaagcttcgtgcttcacaaggataatcaccagatcgttgggttccatggaaaatccagtaacatgcttcatcaacttggggtccatgttatacccaatggttttaaatttatttaataacgttctcttactttttctgttaataagtcatgttttaatgacatcacatcttcaactatcacaatataattgtcttctcctaacatttaagctctgatacttctcagcaagtgttgattttcttacccaaaatgcaaaaacacattgtcccaaattcgtcttacggtttggttccataatttacatttatgagctaaatctatatacacacatacatgtagaaattttggcaatgcgtgttatacatagagctgtcaattgggcaggacgtccatgggcttgcccagtccaaatgcatatgggcggcctatattccggactaaaaaaaaatggtctaattgggcatattaccagttttgtccatggacaatatgggcttgaccgtatgaacaatgggctgccatgggcatgaattgagtcaatagacatgtcttcattttaatcatatttttataattttaattaggatcctcgttg

SEQ ID NO: 14667 - DNA, 1199 bp, Arabidopsis thaliana
agatacataagatacagaaaagacagtcttttctttctattatattatgattttctattctattagattagttagtgatcttggcgcagtgagtcctttcttccgtgattaactgttggcaccagtcctacattttgtctctgcggaccgagaagaaaggaggctccgcgggaagaggattgtaccatagaagcacggaggtaaacctctttccaatatataaattctggcaatgtagttgggctttcatgttgatccgaatgaatcatctttttcgcggagtgaaatctttgcctgctaggcaagatgataggatagcaagttacaaattctgtttcggtaggacatgtatttctattactatgaaattcataaataaaatagttaatcgtggggttaccattctctctttttttttttcgttatctcgcatgtggtcctaagaaaagggaatttgtcgatttttcggggtcttaaaggggcgtggaaacacataagaactcttgaatggaaatggaaaagagatgtaactccagttcctttggaaataggaagatctttggcgcaagaataaaggattaatccgtatcatcttgacttggttcttatttctctatttttttaagtttaagaaaagaataccgtttctcctacccgtatcgaatagaacatgccgagtcaaatcttcttcatgtaaaaccggcttgatttagatcgggagaatcgtacggttttatgaaaccatgtgctatggctcgaatccgtagtcaatcctatttccgataggagtagttgacaattgaatccaactttttccattattttcatttcatacccgtataaagtgcgaaaggaaagcccggctccaatccaagttgttcaagaatagtggccttgagtttctcgaccctttgacttaggattagtcagttctatttcttgatgggggaagggatataactcagcggtagagtgtcaccttgacgtggtggaagtcatcagttcgagcctgattatccctaaacccaatgaatgtgagtttttctattttgacttgctccctcgctgtgatcgaataagaatggataagaggctcgtgggattgacgtgagggggtaggggtagctatatttctgggagcgaactccatgcgaatatgaagcgcatggatacaagttatgacttggaatgaaagacaa

SEQ ID NO: 14668 - DNA, 864 bp, Arabidopsis thaliana
  unsure (1)..(864): unsure at all n locations
ctattgatatgaacatgcattccttttaaaatgagacaatgagcactttttgatacctgagatagaaatggttcgaggaaagcaacaacatcaacaagcgaagggtctaatccaatctcttcctctgcctctctagttgcagtaatcccatcatccttatcatgctcttctgctttaccacctggcaaagaaacttctcctgcaacaattttgttaagggtttgaactaatacataaatagcttcaaagacgagaactttaaatctttcgctcatattggaatgatttgtgcttgcaatgataaatttcaaaattgttccaaagatgttcatcatcagatttatatgagactaagcaaaccaaactttcgaaaagcaattacaaacctgagtgagtagacaatgtggaagacctcttagtaagaatcacacgcaaatcaccatcgtctccttcgaagagacatatcaagacagcagctttcttcggtctgaacctcaccggagccatagattcctgaaacccaacgtgggttatcgatttcctggtgctttccttgtacgcaagcagctcttccctctcgtcgaaggatgacgaaagcggcggcttgtatacacgcagctgctgcgccaaggctaagagtctggaagatccaaaattgaagcttttcgccgttgcgacgcggctgatgctccgacttcatggaattgcagtgaattacaacagttgtcgctagccaaggctcgcttgaaaggcagaccaatggaacttttggcaatatgacacttaaaaaaaaaagctttttgcgctaagttaggttgaggttttggttgatacagtcctgcngagggacggtaaagaaatagt

SEQ ID NO: 14669 - DNA, 548 bp, Arabidopsis thaliana columbia
tttctgattgatattttcgtgtgaatatatatgtagagatttgttcttatcctattcgatttgtaatcgtaaatgagatctggttacataatgctgtgaaaattgttgtctgagtcacatatttcgtgtagaaatgacaatgaagtttatctgtggctaaagaatcgacaatatatattttcatttgattgatgcagggaagagaagataagctaaacaagagaatggtgacaggttgtgttgatcttcatcaatctttcaaatctgcagattcatcttctgtgccaattcctcctcctcttccatcaaaatctgatggactcaagaaaaaacttgggcatagcagcgtttcgacagccacaagagatatgtgggatcgtcttttcaatgacggatacaaagctgatgtagtcatctatacagataatggcagtatcatctatgctcatgccaacatccttgtaagctctccttataactcctttgaccataattatcaatgtgtagttaggatctttagctaagcgaatacagactttagcagttga

SEQ ID NO: 14670 - DNA, 1202 bp, Arabidopsis thaliana
ttttttttttttgttttttttttttttctataatctaaagaatttgctatgcaagtaatattcttgtataaataagccttttggctaatgaatataattgagagaaactattatactactaaggttactctcatcaaatttatcatgctatcagagccttcgatcctaattcctatggattaaaggctttttttgcttccgcaactatgaaaaaaaataaaaatgttgatttgagattcgtctctttgatttactacttttcatctttggaatatcaaacatgctcttttgatttccttttccatttatttttattgttaaaaaaaaaaaaaaaaaaaaaaagagaaaagaaagcggagacgacgtgatatggttacgtagcatttaaagacagctaagcaagacaaggagacactaggttaaagaatagaaactctataaaaccaatgtatctttgtcattgaaacttaagctaaataaaatcaaaacatcaaagtttacagttttggcttctttcctttatggtatcagagccatggatagatccatggaaatttattcatgtccgtcgttagacatctcaaattgcgttaccgtaaagcttacagatcgcaactatttactatggaaatctcagttcgaatcgtttctctctggccaaggccttctcgggttcgtcactagcgcaatctcggttccagcaagcaccattccggttcctcacattgaaggtcacacggatacagctgcaaatccagatttccaggcgtggcaccgttcagatcaagtcgtcaagtcatggcttctgggttcgcttactgaagacattcttagtgtggttgtcggttccaaaacgtctcaagaggtatggctaaacctcgcaagtcattttaaccgtatttctgcatctcgtgtctttgagcttcagcgtcgtctccatggtttgtcaaaagaaggaaaaaccatggatgagtatttgcgttgtctaaagaatatttgcgatcagcttgcttcagtaggaagtcctgttacagaaaagatgaagatttttgcaatggttcatggtctaactcgtgaatatgagccactgattacttcacttgaaaacaccttggatgttctcctggtccatcctatactgaaatcatgtttcgtctaaaaagctatgatgataggcttcaaggatacactgcagcagatgt

SEQ ID NO: 14671 - DNA, 942 bp, Arabidopsis thaliana columbia
agtattatttttatttttgttaacttaggaaatcttaggtcgaaactctgactatgtaataatatatagggcttataaaacatcggacaaacaacgaacgttcaaacgaagaacttaatacacgacgtcattcaagaatggatcaagcttttgttgattttcaagtgtgtatgtttacaagaaggtcaaaataatttggtagtggacattggacaagcatgccaaaatggccaaaacaaagtccactatcaattgtctacaacactataacctttttcattatgtatttgtctttttcttggaatgttttattcaacaacaacaaaattatcgtaagaaataaaaaatttgacagtgtgatataaagaaacttataacatattactttcaatcctatgtttaaaaaaaaaacactaaaaatgaaaatcattgtgctaagaatataataacacattcacattacacaaacatatatgaaaaattctaatagacccacttcgttatattagtaatacgatattatagacaagaagaaactcgatcaaacgacgcaaagctcttatataagccttaaaactcaaggaggcgcctcatgacgccaagcagctccaaatgtgatgtcatctgtggaaaatgcccgatcgcgtcctcgatgatctccactgtcgatttccccttaatcttctcctgcatgaagtatgcgacggagacaggcactacgacgtcgtttcctggttgtatgacatggcaaggcactgacacttgtcccaaaatctctctctcgtcgctaccaaacactatcttagctaaggcaagagctgtctcgggcttcatcttcttaagggacttctcgaacctttggaccgagagagagtcctcgagtcgacacgaatgaggagaaatcaccgcccaagcttcgtagttggagcaatgctggtaatg

SEQ ID NO: 14672 - DNA, 655 bp, Arabidopsis thaliana
tgcatatataccaagacaagaaccacaagctgcgggataaagtaaagaagccaaaactgtaaactttgatgttttgattttatttagcttaagtttcaatgacaaagatacattggttttatagagtttctattctttaacctagtgtctccttgtcttgcttagttgtctttgaatgctatgtgtttgacttaatcatcgcacgctccaagcatttcaaatctgttcattgtcgctacctccgtactgcaggactgttctgctaatcctctgcttttgtcttgttctgcagataaccgttgaggacgacagggctttgttgtgttatggatcgtgttgggcttctgtagctttaggcccaactgcgaagtgttgtcgttttgagctgagttactaatactccccctcaaacttggagttggtggcaaatcgacgccaagtttgaatcttagagttgtgaacggagctgctggaagagattttgtgaagatgtcagctagttgaagataccctgggatgtgattgacgatgagctccctaaacgcgacttgttcacgcacataatgatagtgagttgcgaagtgttttgttctcggatggaatgatggatttgcagtgagcaaactgcagaaagattgtccagaatagttctggt

SEQ ID NO: 14673 - DNA, 548 bp, Arabidopsis thaliana
tacaccattcatactaccttttgcctcgctcttcttatgctttgtttgacaacttcactggactttgtaacaatcttgcacattgcctggagttcatatagatagatagggtcaaggctcaacctcagtgactaaacaataacacatgacttggatgctttacctgtatatgctccttggtcaatctgctcacgaaatacaaacatagagcggaaatcagacaaagtcagtcaattacggctgtgataaacaatgagatttgacagagaagaactttcatacgctgggatagatgcgaccagtcgttgcccatccagtttcgggtttaatcctaatggcgacgcgactattgctttctcaagttctttgaccgtctgcagagacaaacaaagcgtcaatggcggcttgttggagaaaaatgacactctaatgtagtcgaagtttttcttagtataagagaaagaaagaatcagtatacatcgggatcataaggattgacagagagagtcttaggatccaagacagagaccatagctaagtgattgagt

SEQ ID NO: 14674 - DNA, 399 bp, Arabidopsis thaliana
ctcgacctctggttgagtagtttctgcgtcctcttccttttgatcctttgcctcgaccttgattgttgaatgtaccaaaagcaagatgcggagaaacgtccgttgtgttgtagctttgcatcctatcatcaaagcctttgagacgatgcatgatttcagcgtaggttgggccaggaaaggtatctaaggtattctcaagcgaagtgatgagaggttcatattcacgggttaaaccatgaaccattgcaaaaattttcatcttctctgtaacaagactcccaactgaagcaagctggtcacaaatagtcttgagacaacgcaaatattcatccatggtttttccttcttttgacaaaccatggagacggcgctgaagctcaaagacacgagatgcagaga

SEQ ID NO: 14675 - DNA, 650 bp, Arabidopsis thaliana
caacaattttacaagaatatagaaaatcataattttaaatctgttgaccattatatattgggttagcaaatcataatgatatattacaaaaatctcacttaatattgttgaagaacaattgttatatataccactaagattaaaactcataatttttatacgaaattcaagtctaatacctctaaattactattaaaaagaattattactactaaaagtctatacaaaaaaaatgggaagtattgagggtcaagaaacacacgttctaatggtagcattaccgttccaaggtcacctaaatccaatgctcaaattcgccaaacatctcgcacgaaccaacctacacttcactctcgccaccattgaatcagcccgtgacctcctctcatccaccgatgaaccccatagcctggtggatcttgtgttcttctctgatggtctgcctaaagacgatccaagagaccacgaacctctcacagagtcattgagaaaagtcggagccaataacttttcgaaaataatcgaaggaaagagatttgattgcatcatctctgtgccttttactccatgggttccagctgttgcagctgctcataacattccttgtgcaatcctctggattgaagcttgtgcaggtttctcagtttatt

SEQ ID NO: 14676 - DNA, 720 bp, Arabidopsis thaliana
ctacagcttttggtatattaatgatagtattcggatggaatattagaggtctaaatagcctttcccgtcagaggtttttgcggagttggattgggaaaaataagccttctattggcggtgttttggagactcacgtctcagtggagaatgctcaacagatttttcgtacagcatttccaggttggaggagtgagatgaattatgattttgcggagaatggcagaatttgggtggtttgggacccggcggtttctgtcatttgtttttataaatctgctcagattatgttgtgtggggtttatgatccagcaacgaatgagagcttctcagtggcttttgtctatgcgtttaatactcaggtgcagagaagagagttatgggaagaaatctcttccattgctcaaatttctcctgctagaggtgctcttttgatgattatgggagattttaatcagattatttatgctagtgagcatttctcagtcttacctcatcccctcccactggcaggtatggcagagttccaagactgtattgtggataacgagttatctgatatgccgtctaggggtgcgtgtcttacttggtctaatggcagacaagatgaccctattctgaggaaactggatagggttttaatgaatgagcattggagtgatgcgtccctgagtctctacggtctttgatctccaggggatcagatcatgctcttgtatggtg

SEQ ID NO: 14677 - DNA, 619 bp, Arabidopsis thaliana
ccttataccagcacatccagcattggttatgctattcgcctttcttatcatctcatcgtttgccgtaaacgcaaggacaatggtcccttgagttttcccctgttcgatagatctgctcaacatttcatctgataatataagattagtaaatccaacttctgggaatgtgtttaaaccttcaccctgaaaataatcagaaagaacatcgaatcacatttctggcacttcttgcttaatcataaaaaaaaaagaatcaaaaaggttcgatcatacgagaatagttagattgtttccaagagttatcggtatcgggaaagaacggtctagggatgtagcggcgacggttatgatccatggagcaacattatcgacggtttgagcgttaggtccttcgtttccagcagaagcaacaacgggaatgcctttcatcacggcgtggaatgaaccaaaaccaatgtcactttgatcaatatcaaaacttgctggcgcgtcagtaccaattgaaatggatatacatcacaccatcgcgtatactatgatcaattgctttgagtagatcagctgttatacatccaacttccctccaacataccttgtacatagctatacgtgcatgagg

SEQ ID NO: 14678 - DNA, 1203 bp, Arabidopsis thaliana
gggcccaaaagactccaagagctccctgatctgtacctctgtgaagtaatagggaagtccgcccacaaaaatgcggtcgggaccctcaagcccaccagtagaccctgaagacaatccaacagcccctaagttgaggttgggattaggctggctcggaccaagagttgcagcaagagacgggttatagtcagttggcctcctcacctttacaggaactccctagagatgaaaaaagctatgatttcagataggtttcaatactcataatacagattgtaactaataaacaccaaacatctaaagtgtagaagagctaataaatcacctctaatataatgccgtctaatgccattgcgttactagcctcctcaacagatctcatctctacaaaagcaaacttcttttcgtggtttatataaacattgaccaccgcatcacctatgaattaataatccaaaaaaaggatgagatttcgtatagacttgcggccaatatgacaaaaatataatgaacttttcaatacctggcccagcagtgtttcccccaatggccgacatcacttggctaaagaacgttgacaccgactaggacatgaaaacccattctcagtaggcatacaatggatattgaaatgtggtttaaatagacaataataaacaaaaagtcacaaaaccttaaacaaaacaaaagtaacaaacctgttcattagcagttggtggaaggccaccaacatagactcgccgagcatgcctagttgcctgcgactacatattttaggaagggaatcgtgacaaaaggtgaagaacctaagaataagatagattgatagatcgtacctgttgagtcattgcctgaactggcagtacaggaagcgcacctagttgctatgtgagaaaaaagattgagaagttctgagcatgttcgcataaaacaaaagaaaagaggaacataagagacacaaaaatacaaatttttatacctgaccagggaccattggaaacatgtttgagaacatccctggaatagtagcagtagttggcacactaggaacctggcctgctaggtaaagtagtatgcgtcataaaaatgtttgttagatacattattatgtttcccggaggagcagacctaccaactagcttatgctctgacccgagtagcatggggcacgtcgaatagcttattaaacaacagctctagagt

SEQ ID NO: 14679 - DNA, 967 bp, Arabidopsis thaliana columbia
tcgacaagatcataagtactcgtagcggttttgtctttgtgtataacacgcccaccaacgactcttccaccaccgagatgcgggcttgtctccttaagcgcgaaatcagcaggctgagccgaagcaatggaatgcgcatggactagcttcgagggccgcgctggttcggatctcatctcgtctacttgatgctttggtacgtaatggtgatgatgttcgttatgattatcttgttcagcggctaaggaagaggattggttaggcccttgtggatgttggtgttgatgttcttgagcactgtttgggagattgtaaaacacatgtcgtttgtcggatctatgttctacattcattgctgacattgttacatatacaaaaccaattccaagtaaatcacaaatagaaatcagcatataaaatcaaactaaaccaaaatgttttacaaaaaaaaaaatttgaactgatatttatttataacggcattgtttaaattattttctatgcaaaataaaccggatcgaaatcgaacaaaacccaaaatttggtgaaaacaaatactatattactatttcaaaagtaagatgaaagaaaacgtgaggtttggcaactggaccgaaatattttggcttcaattagactctcaactcctaaaaaaacaaaatagctgatccgaatcgaaccaaaaatatcatatggctaccctaaataaaaatggtatatggaaaattagtacatataacaaatggtatcaaagctgaggttaatacctcttgggagcgccggatctagattatctggatgatcattagaagcagcagaggattttcaagaagcctcgtcggttatgtaaactttcaagccgagctcacctctcacacgagaaaagatcccacgtctctccatgggaaagtgaagaacaacagcatcagaatgaggaacaaaagaggtccctgagagagataccttg

SEQ ID NO: 14680 - DNA, 1244 bp, Arabidopsis thaliana columbia
ggcatttgcacttgcacttcaatcacttcatgatctaccagagggtcacggccaaatcatctttactgcaaccacaactattgttgttgtcacggtaactttcgtattctctccatgaaaagcatctatgttatttccagtggtagtatacataagaatcagcgagagttggagaataatacataggctgcgtttcttatccattgcagtaatatttcaggttttactaataggaggttcgacaggtaaaatgttggaagctttggaagttgtaggtgacgatcttgatgactccatgtctgaagtaaactctcgacgatctactctaatatctttgaagtaaagttgtgtatgtactttttctaacgctcccagatacgtggttagggctttgaagagagcgatcatcagtatgtccctcctccttttagcattggagcttcatctgacgaggatacatcatcatcaggaagcaggttcaagatgaagctgaaggagtttcacaaaacgtaagaataagagaatggcttagtatgttttcctgagtaaaaagcgatatttgcaattttttgggactcacttgacaaaactttgcagcactacatcattcaccgcgttggacaaaaactttctgactccgttcttcacaactaatagtggagatggagatggagatggggagtagcatggaaaagatgtgtatttgtggtccaggccaagctataattagagtacacatatgtctatgtaagattaacactggttgattttacctctcgcaaaatgcccactataaagttgacgatttccaagacatttcgaaatattatatagatgtatttattgtggtacatacaattaccatgtcaataatctattacaagaagaaactgagctcatgtgtgggggtgaacataagcatgctctcaccaaaatactcaaaaagaggaaagagatagttgtcgacgtcagtgcctgcagcagctgaagtcttcggagcaattgttgagggactattgtggtgccgtgcatctgcatctgtgtgggactgttgagggactgttgtggttccgcgcatctgcatttgtgtggagctcatttgtataattccccctactgctatcttcttcagtggtggttgatgagttaagttgtcactgcttgctttgcgtttaccttggccgaagaaaaaaattatttaagaacgcgtatctccgtgtttagaacgccaaaagaaaaaaaaa

SEQ ID NO: 14681 - DNA, 1636 bp, Arabidopsis thaliana
ctaaacgccgttgcaatgtctgcaaaggacagtaacatcagtgtcatacatggctattccatatctggagagattcaaaagagtttctcaggctctaccactccaattcagtcccaagacactgtgcaagaaacttcggaccaggcagaaaacgaacctgtagaagaagttcccaaagcattggtgttcccagagttgaatctaggcagccttaagaaaaagatgcaagttatttcttgagtaaagttacataacagatttgtatatctactttatttgtgtttttcttatctgttggcgtaaatgtgcaggcgtaaatctgaacaagctggggagggtgagtcatgtaaacgatgcaactgcaaaaagtctaagtgtttgaagctgtaagctcataccccctagcatctcgttaattcctacctgttcaaaataaaaaactgaattgccttgaagtagttaaccattgtttgactcccttttctttctgcagttactgtgaatgctttgctgctggggtttattgcatagagccatgttcatgtatagattgcttcaacaaacctatccatgaagaaactgttttggctacccgcaaacagattgaatcccgaaatccacttgcatttgctcctaaagtcatcagaaatgcagattccatcatggaagctagtgtaagagctctctattccatctttttattccccccccccccccccctctctaactctctctgtcctccattaatctaagggatgacatcgttatcttgcacaggatgatgccagtaaaaccccgggcttctgcacgacacaaacgtggctgcaactgcaagaaatcaaactgtatgaagaaatactgtgaatgctatcaggttttcctttcatcgtctattcatattgtattcaatatttttctgtgtaagttatattcaatggtctgatttagatactttgttcctaatgatcttgtagggtggagtcggctgttccatgaactgtagatgcgaaggatgcacaaatgtattcggcagaaaagatggttagtattcgtagctccattttccattactgtttataaccccagacccaaagtcttttgatttaacgttactttaatctcagggtctttacttgttatcatggaaagcaaactagaggagaatcaggagacatatgagaaaagaatagcaaaaatccaacacaacgtcgaggtgtcgaaagaagtggagcagaacccaagttctgatcaaccttcgacaccactgccaccgtacaggtaattgtattaatgtttcaaacaatatacaaacaaggcagctactgatttgctgtttacctttgttctgcagacatttggtggttcatcagccattcttgtctaagaacagactgcctccgacacagttttttcttggcacaggttcttcctctttcagaaaaccaaacagtgatttggcgcaatcacagaatgagaagaagcctcttgaaactgtgactgaggacaaaacagagattatgcctgagattctcctcaattcccctatagctaacatcaaggccatctctcccaacagcaagagagtctctcccctcaacccggctcctcggagtcaggctcaatcctaaggagaaga

SEQ ID NO: 14682 - DNA, 1026 bp, Arabidopsis thaliana
aaccattgttatatataccacaacaactagagctcataatacctctaaatttactactattactatccctaataatgggaagtaatgagggtcaagaaacacatgtcctaatggtagcattagcattccaaggtcatctcaatccaatgctcaaattcgcaaaacatctcgcacgaaccaatctacacttcactctcgccaccactgagcaagcccgtgacctcctctcttccaccgctgacgaacctcatagaccggtggacctcgctttcttctcagacggtctacctaaagacgatccaagagatcccgacactctcgcaaagtcattgaaaaaagatggagccaagaacttgtcaaaaatcatcgaagaaaagagatttgattgcatcatctctgtgccttttactccctgggttccagctgttgcagctgcacataacattccttgtgcaatcctctggatccaagcttgtggagctttttctgtttattaccgttattacatgaagacaaatcctttccccgaccttgaagatctgaatcaaacagtggagttaccagctttaccattgttggaagtccgagatctcccgtcattgatgttaccttctcaaggagctaatgtcaataccctaatggcggaatttgcagattgtttgaaagatgtgaaatgggttttggttaactcgttttacgaactcgaatcagagatcatcgagtctatgtctgatttaaaacctataatcccaattggtcctcttgtttctccattcctgttgggaaatgatgaagaaaaaaccctagatatgtggaaagttgatgattattgtatggagtggcttgacaagcaagctaggtcttcagttgtttacatatctttcggaagcatactcaaatcattggagaatcaagttgagaccatagcaacggcattaaaaaacagaggagttccatttctttgggtgatacggccgaaggagaaaggcgaaaacgtccaggttttgcaggagatggttaaagaag

SEQ ID NO: 14683 - DNA, 507 bp, Arabidopsis thaliana
tgaagttgagaagaagatgatctcaccaactcaacgatgacgccgactcgggtggaccagaagagacgttgacgttgagatatcgaaagtcaacctacccacccccgcctaaaccacaaattcaattctctttcctcgagaaccaaccggtacggttcggtttagaagaacccgacgattatctgaaagttggaaccattaatggaggcgtcaatcagaaaacttaaactcgcactcgtcttccactttgatccacttaaagcagctttaaagctttgaacatgtttagctataatccctgaggaactatcctcatgtctctctccagttgcttgcttcccttttctcaatcagcgacggctccgtcttcctccgtctgctcttgccatctcgccgcctctttttctaattttccggtaagcacatgtattcactctacctttcatgcatgctttcgttttatcaaaaggtcattactttgagaaacaaagattattatttttcttg

SEQ ID NO: 14684 - DNA, 943 bp, Arabidopsis thaliana columbia
taggaatacggttgcggcattattgactatgaaagagatgagaagaggaagttcgacttacagtgcattctcacttccgccgctaaatatctccgattccgataatgttctccgatctcttcatctatcttctccgattcctattccatgatgttgttgtcactttccttcggacaacatatatacgcaatatgacattatcgtaattatttatttgtaactctttttcgaattttaaaaccttttgagttacaacaacaaatgggccttagtccgtctcttacagataggcccatattgcaacacataatgacgggtctagagaatcgcaaaattagtagcaatttgtttgttacgttggtcttcttcttcttcttcgctcgaaaccctaaactcgcaaaatttcgatcatcggcgatgttttcattcttatcctctgtaggcgataagattgtgaagatctgtgaaggcaagtctcgaaagttgtcacctttatgtttcctttggaatttgtcttgtctcgaaacaaagagatttgattgattgttaaaatctggattcgattttgtattttgcagagtatggctactttgaaagaaatgaggtcagtaatatcaaagctaaaaacattcagggtctggaactagagctgacatcagagcgtcttcaggaatatgacttcaactctatcaaatccacttgtttcaataaagaggtgcgtgcgtgcgtgttataagtaacattgacgaaaattttcacgattttgcttgcttgcttactcttttactcgttattggtgttagattgggatcttgtataagcttaagtatggggaaataggtgctaagttgataccaaatcacccgtcctatggctcagttcactggtactgttagacacgtcggtaaactctctggtttggactcacttcgatgagtattgt

SEQ ID NO: 14685 - DNA, 809 bp, Arabidopsis thaliana
tcacagataaaataactgtgtacaccactactagacatgaaacctctgcttactctgattgagaccgaggtgaaatggccaagatttgcaaacatggcttcagtacctgatgagacagcgataatcactttagcaacataagaccattcactaaaggattcaaaacaagcagaaaataaataatattatggttatgccttgatccagaaccagaactacctgttacagaaagaagaacccctccaagagatatccatccatcttgaccagtcactctgaagaatttgatgatatacagtggggaaactgcatgtattatctttggattccaacggatgatgttgtataaaccgatgaagaatattgaaataagccagatgatcacaattggtgcaaacatgaaagccaccctgtgagtaccacaatgttgcaaagcaaacagtccgaccaatatgacacaggcaagcaccagtagttcgcctgcagtggattaagagacaaaacatcaaaacaaaagaaagtcacaagatgtaatcaaacaacaaacaaaacttgatacaggcacatagtggaagcaacacgtattagataccatcagtcacattcttctctgtagcttgcaagcctgacaaggacgacagaactgaaaggaagcaggagttagtcagtcagatattgccacaaacaaacaaaaaagatgctgatgaatagacagtaaggatggtcacgaagaaggtgggtggttacaactacaagtaagagacgatgaaattatcccaactctgaatataatatgtaggaggcaggca

SEQ ID NO: 14686 - DNA, 704 bp, Arabidopsis thaliana
tatcatctcttcgccttttactccatgggttccagctgttgcagcctctcataacatctcttgtgcaatactttggatccaagcttgtggagcttactcggtttattaccgttactacatgaagacaaactctttccctgatcttgaagatctgaatcaaacggtggagttaccagctttaccattgttggaagttcgagatcttccatcgtttatgttaccttctggtggtgctcacttctataatctaatggcggaatttgcagattgtttgaggtatgtgaaatgggttttggttaattcattctatgaactcgaatcagagataatcgaatcgatggctgatttaaaacctgtaattccaattggtcctctggtttctccatttctgttgggcgatggtgaggaggaaaccctagacggtaaaaacctagatttttgtaaatctgatgattgttgtatggagtggcttgacaagcaagctaggtcttctgttgtgtacatatctttcggaagtatgctcgaaacattggagaatcaggtcgagaccatagcgaaggcgctgaagaacagaggacttccatttctttgggtgataaggccaaaggagaaagcccaaaacgttgctgttttgcaggagatggtgaaagaaggacaaggggttgttctcgagtggagtcccaagagaagattttgagccacga

SEQ ID NO: 14687 - DNA, 1274 bp, Arabidopsis thaliana
tcccatagatcaagagggggctgaggatcttcctgaagaataaccttggatagctcaggtgtcaagagacgttatttttcgtgaggaagtgtttccttatgctggtgtcaactcctctactcttgcgagcacatcacttccgacagtttctgaagatgatgattgggcgatcccacctctagaggtgagggggagcattgattctgttgaaacagagagggtggtgtgtaccactgatgaggtcgttcttgacacctctgtttccgactccgaaattccaaatcaagaatttgtgcctgacgacacaccgccgtcgtctcctttgtctgtatctccttccggttctccgaatactcctacaacaccaatagttgtgccggtggcaagtccgatccctgtgtcaccacctaaacaacgaaagagtaaacgtgctacacatccgcctcctaagctcaatgactacgttctctacaatgctatgtacacaccatcgtctatacacgctcttcccgctgatccatcacagtcttctacggtcccaggtaaatctttgttcccgttaaccgattatgtctctgacgcagctttctcttcatcacatcgtgcttatttggctgccattaccgataatgtggagcctaagcattttaaggaagctgtccaaattaaagtatggaatgacgctatgtttactgaagttgatgcgttagaaattaacaagacatgggacatagtcgatttgccaccaggaaaggtcgctattggaagtcaatgggttttcaagactaaatataattcagatggaacggttgaaagatataaagctcgtcttgtggttcaagggaacaagcaagttgaaggagaagattacaaggagacttttgcgcctgttgttcgaatgactacggttcgcactcttctccgtaatgttgctgccaatcaatgggaagtttatcaaatggatgttcataatgccttccttcatggtgatcttgaagaggaagtctatatgaaacttccacctggatttcgtcattcacatccggataaagtttgtcgtcttcgtaagtcattgtatggtttgaaacaagctcctcgatgttggttcaagaagctgtccgattctctcttacgttttggatttgtcaatcatatgaagactactcacttttttcgtatacacggaacaatattgagcttcgcgtgttgatatatgtggatgatctttaatttgtggtaatgatggatcatgctctaaagtcaaggattcttga

SEQ ID NO: 14688 - DNA, 881 bp, Arabidopsis thaliana
cataataaaggctatcattccatttaccaaataccgtcgcagccttttttccagttacatcttctacaaaaccattaacctatatatatttgaccatgaagttatttcagaaatgccacgtagatcgaaaacacttaacagtgcatatctctgtgtaatcacctggtggggatttctatcaagaatcgattgctccttgaactttaacatacaagaatattggcgatttccacggattttcattatcccatggtgatcgcagtacagtttaccaagtaggatattgtatatagttgttgttacctaaaaacaaagataagcatagagtgatcagtctcagggacaagaaataaaatgcggaaaaggacaggagttttgtagtttgtattatacatactttgctccactggaaaatttctccatcatcaaactcgagagtcaagattctaacgggttcaagttggatcgatctcccccaaaacttcgaccggagtttgtgtcgccccagaacttccaccctttaccttcgcaatggcaggcgataactgttggatggtggctaacctattatgagagtacaataccctaacgaattatatgccaaacttcttaagaaaagattctcataattttttttctccatatgtttcattttttttaaatccggatacgagtgaagctgagtgtcaactacatgcatattaacatgtttagactttagagtactacagagctgctcctgaatcatagagcttctgcatgaatcaccgattttgtttattgaccatttatcagtcttagaaaactgacatttatgttcatctcatcaagacttcagtaaaaaaggtatatatgatattaccttctcagagaagaaacga

SEQ ID NO: 14689 - DNA, 1478 bp, Arabidopsis thaliana columbia
tcgccaatgcacccgaaaaaaaaaatgcagacaaacctcctcgctgacacttgttttgggttgtgaagaataaataggaaaatcttcagcagcctgacacaggatatttaaatctttagcagctacaaaggtatttatagaataaggtttgagtactaaacctcggcgtgtaccgcagttggaatgggtggaccgactggtggaacagcaggagagacatttggaatggggtccatctagatgccggaggtcgatgtatttggttcaacatcagatccgagagtggtatcctgaatggagtgatgattagtaataaagtcagcaactaacagcaatatcaggtaactgatagctaagaaaattagacaactaacctcggttatttcagattttgggggagggcttgacaaaggtcccgagacaccctgaccttcttcaccactggcgggggaccggttaagatcctagataggaaagcacaaaatttgcccactggtaaacacaaatgaataaaagtaactaataattttagaaccttaagagttagttaacagtaaatgaaattgttatcaattaagtatcttattagatttcccgaaatcaacaaaaattaaacgcgcaggctcctaaaaccctgtcacttatttattcatctacgtttaccatctaacctggtcgttaagaaccgtcgtatggtcaactcccatgacagcgtcgccctaaaaccatcacatcattcgtcacttaacttaaaataatttgggccaaatatataaaaccccaacaaaacatttaccagctaacgggttatttaactgatagtttttaatttaacgatcagtttttgggtcaatatgactggtagggaatcgtgatcttaactatcgttataagtaaaataccgaccataattttgctaaaatgatcgtgcaacccagtatagacctacatagacgaaaataaaaaagaaactagttagtaagtaagaaacaaagtatcaggtaaacaaacaattaacgcgtcaaaatagtatccgctaacataatacctgctcatcctcgcctgtagttggatcatcacccattaccacgtcgccctgcacattcggtatgatttagagaatataaaaacttcaatgtataagaaaatatcggttacgaaaatattaacagatatcgtaggtatccacagacctgaattttattctcttcattgaaattggtaccgccgcacgaatgacggaccggtacatcaaccgagttgtagaaagaaacaacgtcatctacagctgatatcgcttggtcaccctgaaacgcaggaagggtgaaatcagtctccataggtacaggatgacacggcggtggaataggattaacatccgcttcagcatttttgttagggggatcggggaggatacatcgttggtatttcatcagcatcggcagccgtatgttcagcctgagtaccgtgttcccaga

SEQ ID NO: 14690 - DNA, 579 bp, Arabidopsis thaliana
tagcttctttttgtaaccttctagcttcttgtaaaagagccacttgatgaggatataatctcttccatctcctcaagcactgattgtcagtacgacatgacagattagtagccaccttagaccagctatatccatgctctgcaattgcttctctcaacttttcatcctcttcctcagtccacttcccacgatttactttgggatctaaacaatttaaccatctctcccgacactgagtctgagtccgtccaggaacaaactgagaaattttatgccagttttgagatccaaagagtgtcacagctacctttacacgtttgtcttcctctaagctccatgtcccttttctggtagggcgaagcgactttttccatctgagagtatagagagaatgaaattagatattcaatcatgtatctgaatgcagacataaacaagcacataaaatgacagaacataaccttgtaactcaatctaaaatcctagaggattgtcaccaatgagacatgagtgcatattgaggttatgatataatcccacatcgactaaacatggactttatgggtggtttataaaccc

SEQ ID NO: 14691 - DNA, 1156 bp, Arabidopsis thaliana
tctttctctctgggaaaacagattctgacgcttagttatgttcataaattgctttgagtaaacatttttcatgcagttgttatagttcagttacttgtgtatattgaccttgtttactgtggtcaggtattttgctgcatctacgcttgtcctgataatggaggactctggaggttctgcttctactttagctggctttacgggtaggagaaggagaagcgctctgcctcgtcgaccccgcgatattaaagggagcttgcatagtttcaagtttctgccaccctcaacgcagacaaacactgctcttagcaatgaagctaacccaagttttaggaataccaatagtttatgtgggtctgtgagtgagaacaaactgaaagtgaagcttaagcttggtgctggtgttacccgtacgttgcaaaccaactctgaggcgggtacttataccaaagctttggtaaaggtcttatctgttaaaagctttgagtttgtccttcattatacttattgttagctttctttctttgctgatatacgagagtaatgcaggataatggacaaaaaccatttcaaagtaaggtaaaaggcaatggtcatgttcagaaaacactgtttctaggagatatacatcaatctagaggatatccgtctaagactgagaatggtgcgtccatgtccgagaagagcaaacgaggtcttaagaaacgtgtattggatccagagccagacagtgatgatggagatgaggaaatcagatacctcgtaaagttaaagtctaaaagggtcggggtctctcatgaaggtaaagagagtgaaggaggcagaaggatacacagcagtggtcatgacatggaagacggaaaacatctctcatcagacaaacttgctgtgtccggaaggaaaaagccggtgatgggaatggttgatccgctcccggcaggagaaacaagcggacaaattcctactacacgtactcgggctctccaatctggaaaggatccacattctgtcatcaggtcgagttctcttgagttccctgatggcttaccttgcccctcatctaaaagtgagttgcacctttttcctttctcaaatcaaactgatgactgcaaatacttaatctctaaaccttgaacaattctaggaccaaaacaga

SEQ ID NO: 14692 - DNA, 581 bp, Arabidopsis thaliana columbia
gttatcacgacaaagttatcattacagtttacagtatatgttatacgctaataggatattattcttgcaggctcatctagatcctattatttttccggattcctggatgaatcccgcggaagacttaacatggttgaacgacaaagatgatgttagggtcgagaacatcgtgaagattgccgaggaaggcaagcctttttcgaatgaaatgtttggtggcgggtgtataccaactgaggttgtcgttgcgtcgaaaaaacaaaagagaggtggtaaaaccaaggtagtccgtggtaggaaagcaccaactaatgctagatcagctactggtttgagaaggaaaaaccgaagtcccatcgaagagaaaggtgaagggtctggtgggatagatatccctgctttttcctgcatgattgatgataaactgaaggcgcaacgtgagaagatcatcaaagggatgattcattggtttacggaaaatttgagcgttgatgctggaaatcgaaaaggtttggtttctggggaacacggtactcaggctgaacatacggctgccgatgctgatggaaataccacgatgt

SEQ ID NO: 14693 - DNA, 544 bp, Arabidopsis thaliana
tcagagctttcaaattcttaacttgagtcatgcggggattgattcagacacgtcttctcgagacaggtactctaagaactgctttattcttgtcttgctatggacgagtcttttctagtgtcagtgatgggaaagggaaagtctcctatagagagagattgagaagtgggattgttgatatcaaggaagatgatgctgttgatctgtttcaagaaatgactaggtctcgtcctcgtcctcgtcttattgatttcagtagattgtttagtgttgttgccagaacaaagcaatatgatctagtgttagatctctgcaagcaaatggaattaaagggaattgcgcataacctctacactctgagtattatgattaattgctgttgtcgatgtcgtaaactctctttggctttttctgctatggggaagatcattaaacttgggtatgagcctgatacagtcacattttcaactttgataaacggattatgtctcgagggtagagttccgaagctctggaaatagttgatcgaatggttgaatgggac

SEQ ID NO: 14694 - DNA, 575 bp, Arabidopsis thaliana
taaagtatctgttatgcatgctggcaggctgtaaattattgcaaggacgttatcgactactggcggtggttggcgggctgttatgcgttctgttactggcaatggtcggctggaaaagtctctatgcgctgatcatgctggcggggttatggctgttgctgccaaaacgaaaaacgccggaaaatggcataaccacataatccggcgtttcgacattaatcctggcgatcgtctttatgatcaaggcggtcgcgctcatcatcctttcgctggtactcaccatcaaaagtattaccgccaccggtcccgggctaaaaccgccgccaggcatgcgagaaaagcgcaaatgcggcatcaacttcactgtcagatgcttttgcaccggcggcaataaaagtagaagaccgaggaagtcggtaaaaaagcccggtaataaaagcagcaaaccagcaatgatcagcgaaacacttttaatcatctccgccgctgggttttcacccgccgccattttttgctgcatcagcacgaaattcttaaagccctggttacgtaccagtgacataccgataacctta

SEQ ID NO: 14695 - DNA, 1519 bp, Arabidopsis thaliana
cgagacatgattcactctcgtcctcttcccactgttatagatttcagtagattgtttagtgccattgccaaaacgaaacagtatgatcttgtgttagctctctgcaagcaaatggaattaaagggaatcgcgcataacctctacactctgagtattatgattaattgcttttgtcgatgtcgtaaactctgtttggctttttctgctatggggaagatcattaaacttgggtatgagcctaacactatcacattttcaactttaatcaacggattatgtctcgagggtagagtttccgaagctctggaattagttgatcgaatggttgaaatgggacataaacccgatctcataactattaacactctggtcaatggactttgtctcagcggtaaagaggctgaagcaatgcttttgatagataaaatggtggaatatggctgtcaacccaatgcagtaacttatggaccggttttaaatgtaatgtgtaagtccggccaaactgcccttgccatggagttgctcagaaagatggaagaaagaaatatcaagctcgatgcagtcaaatacggtatcatcattgatggtctttgcaaagatgggagcctcgacaatgcattcaaccttttcaatgaaatggaaatcaaagggttcaaagctgatattattacctacaacactctcattggaggcttttgtaatgctggtagatgggatgatggtgccaagttattgagggatatgatcaagaggaaatcaaccccaacgttgtcacattcagtgttttgattgatagttttgtgaaagagggaaagcttcgagaggccgaagaactgcacaaggagatgatacatcgaggcatagctcctgatactatcacatacacttctttgatagatgggttttgcaaggagaaccacctagataaggccaaccagatggtggatctgatggttagcaaaggatgcgatcctaatatcaggacgtttaatatcctcataaatggatattgtaaggctaatcgaattgacgatggtttggaactcttccgcaaaatgtctttgagaggagtggttgcagatacagttacttataacactcttatccaaggattttgtgaattgggaaaacttaatgttgccaaagaactcttccaagagatggtttctcgtaaagttcctcctaatattgtgacctacaaaattttgctggatgggttgtgtgacaatggggaatcagaaaaagcgttggaaatatttgaaaaaatagagaagagtaagatggagcttgatattggtatctataacatcatcattcacgggatgtgcaatgctagtaaggtggatgatgcttgggatttattctgtagcctccccctcaaaggagtgaagcccggtgtcaaaacatacaatataatgattgggggactgtgtaagaaaggcctattgtctgaagcggaactgttgtttagaaaaatggaagaggatgggcatgcgccagatggttggacatcaacata

SEQ ID NO: 14696 - DNA, 890 bp, Arabidopsis thaliana
attgatgtacttcagaaacttgttaagagtgataaaggccgcacacggtatttatttatcttctagactttagttgatgacatcgtttccttcagaggtgtatatcattgctcagtttcttcatttctgctttgtccttgcagctgtgtacagatgaagaactggtttgattaccgaaatcatatttgcattgtaagtatcccaactaagctcattgatttccaccaccgttcaaatgcatctctaatatttaattggttctatgttcagtgacctgtgaggtttgttagtgttacaaatgaatgaatcataatatttctggctacctttctttgtttgatgcccaagtgacagaaatccaattccgtgtatagtgtttgtgtagtttgtttactcatgtggattttttcgaagtttggaactaaacggaaccttcctgtgaatgaactctaatggtgataccaggtgttcgagaagcttgggccaagtttgtttgactttctaaagagaaataaatactccgcatttcctctggcccttgttcgggattttggatgccagcttttggaatctgtagcatgtctgtgaattgttcctatctgctgctattttatacaattatcgtacctagcacgtcacctttatgtcccggttcagcagctgtagttcctacctaatgcctctctgttcttaacataatcttccttgtctacagatatgcacgagttacagttagttcacaccgacctcaagcctgagaacattctgttggtgtcttctgaaaatgtaaagcttcctgacaataaggtatctagaactgaaataggttaaggttgggtttgggtacactctctgtagtaaagtttgaaagaaaagaaaacttcaagagt

SEQ ID NO: 14697 - DNA, 1115 bp, Arabidopsis thaliana
tcacacctttgaaatcatggtatgttcttatgagagcgacgttttttcttactcgggcacttggccatgcgtctctcatatctcctaccacaccatgctctctgcaagttgaatgatgcccaaaagccattcatcagcagtcaaataagtaaatatgctttgatttgaaactagttgatcagtgtgtgaagaatggtttagccattcttgcattaactaggagccctgaaagaaaactctaggagattggtaaaaagcacaaaacttgtgaatgtgatattaaggtacctagatctgcccaacagaaaccgccctgttgttgattccttctgtgtgttgaatcctccacagtacacaaccggcaaagtgggaggtaatgatgctatgtgttgccatgtgagtaaagcacttcgcctacgggcacgagggctgatttcatccaagtttgtgttgactatctgaaacgaaaaaccaggcggctccgctcctttaagttggaatgtgtaggcagcttgtcaaagaaaaccaaaatactgatatataggacaaaaacaccaaaatcataaactaatctaattatagtttaactaaaatgaacccaactagtaaaaaggatatagcccatgtcgctatacaaggaactgcggaaccccatgccgtgcttccagggaccgagggagactctgacaaccaaaaagttccaccctctagcagctctaccttcaattagtataaagtatagtatcaagcagcgtattaattatttagagcgtagttatgtattgtcttatcaaccgaattaatactttttccttgttgaagaagatggtgcagtgttcatcattagcatccccaggtcctgttcttgatatgccaaattgatcataggctgcaagcaaagagtactaccatctatttaagttcaaagaaacaatgcaaactgaagtattattaaggcatgtgaaactagaagctaagctccatggttcacagtaacaaaaaccagataaacaataccaccatcatttcaaagaaagcacctgtaaatgtgagaatatcatgcattccattgccataaaacagatgcattaagtgcactagactccggcttttgt

SEQ ID NO: 14698 - DNA, 1345 bp, Arabidopsis thaliana
tggatttattttccctcgcttttcccaaataatgacaaaaatcacaaaaccaaccaatcaaatttagtttctttaaaataggaaataacccaagtagaatgaatagatcttttgaatgtttgccaaaattataaaaggaaaattaatgtgaccaaataaattacagttcatgaatttcttttcttccatgagtcaaagaaaaaaacaaaaatttatataataaagttacagttgtgagaaataaaaaaggattattttggtgtggtatatcatcaagtggaagaacaacaagagaaaccagagctttgtttggaggcagagttatcatccttaacaagacttacccgattcacggtgagttcgtctttataagtatctgagttgagttgcttacggctcacgttattgtagatatcaagtatcaccatctcgaaagctgttttaacattagtcgaatcaagagccgatgtttccacaaagaagagtccttcctcttcggctagagcctttccttcctccacgctcactgctcttatgttttctagatcacacttgttccccaccagcattctcgccaccgtcgtatccgaatggactgaaacaaccaagaaaagagcaaatgaatcaattttagatctcagaccaatctaaagatgttcattatgagatactttcctaagcggttcttgaataatcctctgttatgttctagctaggtcacaaattctataatctaccaaaactagattcaaaatttcccaattctaagtcaatccgtacgacctaattagatcatgaggatcccctaaatcgatagtcaatcgcataattcacatcgagacttactcttaagctcatcgagccaacgtccaacgctttcgaaagtggtgcggcgggtaatgtcgtaaacgacgagggcaccgacagcgccacggtaataagcggaagtgacggcacggaaacgctcctgaccagcagtgtcccaaatctgagccttgacctctttaccttcaatctccatgctctgcgtctgaaactcgactccgatcgtcgccttggagttagcgctgaactcgttacgtgcgtaacgagatagaagattagatttaccgacggcagagtcgccgataacaacaatcttgaagagatactcctctcttccttcgtcgtccgaagacatcgctcgcttcaccgtcttcttcttcttccctaggtttctagagagagaagtaggactggtttggagagagagagagagggaaagaggaggagacggaagacggtgcaacaagctggcacaagaggacatactgcgcattaagtgcaccttctttaatgtcgttac

SEQ ID NO: 14699 - DNA, 1678 bp, Arabidopsis thaliana
gcctcacgtttctttcttggtcattttttgcgttaccaaacccactgaataaaaatttataaaatactgaaaacaactttattagatcgtctccactttatcatttttacttatattgtaagcttataattaaaatcccaaaagatgaaaaacgatactctacttttttatgaatcctttaattgaacaaacggaaccaacacaacaacagattgtgaagaagaaagaaaaaacaacaatggcttcacaaaccaaactcaagaaacctaattctcattttagcctttgtactttcctcttcttcaccgtcctctttaccataccggctctctttctcctccgcacctccacttgctcctcctccaccgctgcagtctcctcctcctcctctgacacaaaccagccaccgtggtctggcgacctccaaaccgcccaatttgcctggaaccgccttgatttctccttaaccaaccctcctcccaaaacactaaaactcgctgttttctcccggaaatggcccacgggtcccaatcctggcggcatggaacgccacgccttcactctatacaccgccttagctcgccgtggacaccgtgtccacgttttcacctctcccttagaccaatcccctgaaaccaacaaaatccccccatgtttccgaccaaatcatttaccctataatccattctcacggcgacgcggacgccggaaaatggcggtacaacaaggcatgggagctttaccaagaagaaaacaagaaagaacctttcgatgcggttcactctgaaagtgttgctttacctcactggatcgcccgggaggttccaaacctcgctgtatcctggcacggcattgcgttagagagcttacaatcaagtatttaccaagacctgatccgtaaaccagacgaaccaagatcacaaggcttcaatgcaagtctatacggtgccgtgcttcccaagatactggacgaaatcagattcttccacaactacgctcaccacatcgctatcagcgatactgcggagaaatgctaagagacgtttaccaaatccctgagaaaagggttcatgtgatcctcaatggagtcgacgagaacggattcacatcagacaagaagctacgtactctgtttaggtcaaaattagggttaccagaaaactcatcagcgattgttttaggagctgctgggagattagtcaaagacaaaggacatccattgctcttcgaagctttcgcgaaaataatccaaacgtattcaaatgtttacctcgtagtagctggatcagggccatgggagcaacgttacaaggaattaggggaaaaagtttccattttgggatctctaaacccaaatgagctcaagggtttctacaacgggatcgatttgttcgtgaatccaacgcttagaccacaaggtcttgatttaacgttaatggaagcgatgttgagtggtaaaccagtgatggcatctaggtacgcaagcataaagaggactatagtggtgaatgatgagtttgggtttatgtttgcgccaaatgtggaagctttgacggcggttatggaggttgctgtggctgaaggagcggagagattggcggagagaggaaggaagtgtaaagagtatgctgcggagatgtttacggcgagtaaaatggctttggcttatgagaggctt

SEQ ID NO: 14700 - DNA, 940 bp, Arabidopsis thaliana
tgaccttttatcaatcaagatccaactacattcatggatttgatttcttttcccaaactttaacattttatatctaaaaccatttcatcttatgaatatcaacaacaatggcagaacaagaaactacgtcaaacataaacaccattaatgatcaagcagaagaagaaacaagaacaaaatctcagccattgatttcaggtctaccaaatgatatagctgagctttgtcttcttcgtcttccttacccataccatgctctatatcgctctgtttcatcttcatggaacaaaaccatcacaaaccctagattcctcttctccaagcaatctctttctatctcttctccttacctatttgtcttcgctttcaacaaatcaacggctaggattcaatggcaatcccttgaccttgcatctggccgttggtttgttttacctcccatgccaaactctttcaccaaaatctcgtctcctcacgcactctacatgcgcgtcgatgccacgtcaggggaagctttttgtactcggcggcggagatgtaaaccgctccgccgtcgtttacactgctctaacgaatcgttggtcgtgtatatctccgatgatgagcccgagaacgtacttcgtctccgggaatgttaacggtaaaatcatggccgttggtgggagtgtgggcggaaacggagaagcaactacggaagttgaatcgtatgatccagataatgacactgtggacggttgtgaagaagttgccgatggtgttggcgaagtatgactcagccgtgatcgggaaagagatgtgtgtacagaaggatgggcgtggcgttcatgtttccacgatgggacaagtgtacgctccgacgaagcacgtggcgagagatgagcggtgggatgaaagaagggtggacgggtgtgagcgtcgtgatcgcgacaggctgtttgtg

SEQ ID NO: 14701 - DNA, 1477 bp, Arabidopsis thaliana
  unsure (1)..(1477): unsure at all n locations
tcactatttactctaaatctcaccaaatcataacatatatgtaaacaaccaatagaatattacgattaaaaaataagttaccaaacacagtttagatatcttatctgatcaatctttaaatggataaatttgaatttgtattaattaaaagtcttgtggatttgactaaaccactcaccctaatacctctatataaacccttgattctctctaatacctctcattatatccaaaacataatctctctctatctctctctattttgctcaatcttaatcgtccgatcaaaacactccgactaaaaatggctgcatctaacggcgagaaaagcttgatcgtgagcttcggtgaaatgctcatcgatttcgtcccaaccgtctccggtgtatccctcgccgatgctcctggcttcatcaaagcccccggtggtgcacctgccaacgttgccatcgccatttcccgtctaggcggtcgtgccgctttcgttggaaaactcggtgacgacgagttcggtcacatgctcgccggaatcttgaaacagaacggtgtctctgctgaaggtatcaatttcgacactggagccaggactgcacttgcgttcgtgacactaagatctgatggagaacgtgagttcatgttctaccggaaccctagtgccgatatgctcctccgtcccgacgagctcaatcttgatgtcatcagatctgtacgttatttttatttttaattaatatatgacacgtaggcaaattcttttttgggtccgtgtctcacatttaattagcgaacggtgctacatcattaacgtaacggttgttggtatacgtaacgtagatgtcaagttaggttaatgagtgctctgttttgtttttgttttacacaggctaaggtgttccactacggatccataagcttgatcgttgagccatgtcgatctgctcacttgaaagccatggaggtggctaaggaagctggtgcgttgctttcatatgatccgaacttgaggcttcctttgtggccctcgaaggaggaggctcagaagcagattcttagcatctgggacaaagctgaagtgatcaaagtcagcgatgaagagcttatgttcttgactggatctgataaggttgatgatgagactgctttgtctctgtggcactctaatctgaaacttctcttggtcactctaggtgaaaagggttgtagatactacaccaaggtaatggttttcgaagagtttttctttcttgtggatttgactttaccattaatgttacttaagttgtgttcttgtatgtatatgattacagagcttccgtggatctgttgatccttccatgtggatgcagtagatacaactggtgctggtgattcatttgttggtgcattgctttgcaagattgttgatgactgtgctgtgcttgaggtatatacanataattcatcaaacattctgcaagttttatagattgtttcagat

SEQ ID NO: 14702 - DNA, 583 bp, Arabidopsis thaliana columbia
  unsure (1)..(583): unsure at all n locations
tcccctactgctctgttctcaaacgatccggcgtcgtttttggttttactagccgtggtgccttttgccgtatgtctcacggcggttttcttcctccgtgagatcccaccagcatcttccgcagctgaggagaacgaagagactcgttactttaccatattcaacattgtggccgttgttgtcgccgtgtatcttcagtcttacgacatcattggaatcaaaactggagtgttctctgtcgctttcgcttctatacttctcttcctcttggcttctccaatagccattcctttccactccttcatcaagagcttgaactacggtgaacaagatgacttagaaggacggattcaagaaccgttgcttagatccgagatagcggcacggangaaagaagtaatagttgtagctgcggtggcagcggaagaggaggagaagaagaggaagaaaccggttttgggagaagccacactataatggaagcagtgttgaccgttgacttttgggtgctttttgtgtcttcttgtgtggtgtaggactggtttactgtgatgacaatatgggtcaataggcttgccttgga

SEQ ID NO: 14703 - DNA, 657 bp, Arabidopsis thaliana
gtatcgcaaacgtccaataaaatgttggtcctttggtgaaaacatggttcgcttccttaaccatttccttaaacccgccttcgcaagccataccgattgtcgcgaaaaccgtcgctgcgaattccatcaccagttgcacctccatgaccatcgcgtaacaataaacggtacggtatagcttctccgtcacggggaggtaaagagcgaagagtaaaccggctccgatcgtggatacatacccgatgaaatacttggttttggttaaaccggacggtttatctttactcgaatcaagagccaacaaaacagagcttaacgtcaacaggacaacgcagttgaggtttgagaaagtgatcttctgtttcactatgatcctagacaaaatgagagtgaagacgagttgtgtcgagaggagaagcgatgacgtggacaccggaagggtacgaggttccccatgagaagaggaagttgttgaaaccgagaacaagcccgatcaacacggagaagatgagatggcggcggtgaagcgcgtgaaaggacggcgagtggtggttttgagaacgtagtgagggaagtagattaggatgaggaggagagggaagccagcagattgaacccacgtggagacccacggctcgagcacagtagacgaaatag

SEQ ID NO: 14704 - DNA, 550 bp, Arabidopsis thaliana
gaagagaataaagttgcttcacagcatcaaccgacccctgtgacacgctcgaagaacctctccttggcgatcagcaaggtcaggatccgggacagtccaccacccctgaccatggtcctgagcttatatttagtgaagtggaagacgagaaaccaaaagaagtagatttgcttcctgcagtggagagacataagagaattgctcagttgcaagcaaagctgatgcaagcagctgcagagggtgctgttcgggtcaagagacggaggggccctcacagaggcgaggattttactttaactcaagcactcgttaaagccgatttctggctcatcttcttctccctcttgctcggatctggttcgggtctaacggtcatagataaccttgggcagatgagtcagtctctcggttacgataacactcacgtctttgtgtccatgattagcatttggaacttccttggacgcattggaggcggttatttctcagaactcatcgtcaggtatgatcctgtcccagagaatgacaatgacatttggctgtggaattg

SEQ ID NO: 14705 - DNA, 1083 bp, Arabidopsis thaliana
cctgcaattgagtttgaatgagaaaagaacccaattttctggaagatgggtctccgggataacttccggcggagatcgccaaagatttaatcaccggcaagaaaacgccaccggctctagccatggtagacggcataatcaaacccataagcgtttcacagaacgcaagaccataagagagaccaagagtgcttttccccagccacttgacgaaataagtagcgattctgtcgccaagaccagttttgatgaatccacgagcgaagaagaaagaaatagcgattaaccaaatgagctcattggtaaaagcggcgaaacgggttgagaaaggaagcgttttggtgacgattgaagcggttaagccaatgaaagcccaagcgcctacagggagaggaccaaggacgagacctgagatggtgaagaggaagattgagagtaattgccatccttgtgaggttacttgttctggtcttgggattaagaatctgactatgaggccgattgagacggagatcgcgagaggaattagcttcgctccttgcggctgcggcggagaaggagggggaggttgaggtttgttttgttctccggcaaggaagaggcggtggcgcgtagagtgaatcgaggggaagagatggagagtgatcggagtgttggggatgtgtgtacggaaatcgacggtggaagtaacgcaaatgatttggaggaagatcgatggagagatagataggaggctgagagtgagattgaacggagagccaaactctccatcccgggagagagagtgtgtgttctccgatatcaaagtgttactttctcaccggaggagcgaaactctctgtttgttgtctttataaaaaaaagttaaataaaaacgttattcttattttccccattattcatattttactaattaaaagataatttagctaaaactttaaaattaagaagtattcaaaattttcacatttggattaacttgtttgtattttgtatgaccataaaacgaaattaccaaattacagtatgtgttatcttttcgaaaattcagaattatttactgaatcaagtaaaaactcatga

SEQ ID NO: 14706 - DNA, 851 bp, Arabidopsis thaliana
tcagaacaaaattagagaagcagaacaaaattcgaaaacttcaaaagtctctcaagtcaaatacaaacaacaagaaagaatctttcatctaaactagaaagcaacctataagaaaaatgaaagattctgcatttgaagtagaaacctcaaagcagtcctcagattaagacacaaattgatgcaaagttcaaactttgtttctcaggatcacactactaactaataattggagccaaatcatgaatcaaaggacataaaacaaagcagtaacctggaattgagattgaatcaagtaagagcctagtttcctcgaagaagaatcattcggtttacttccagccgagagcgatagagacttgatgatgggcaagaaaatgccaccagctctagcagtagtactaggcatcgcaggagcaattaaagcctcactaagcgtgagaccataagatagacctaaagtactcttcccaagccatttgacaaagtaagtagcgattctatcaccaagacctgttttgacgaatccacgagcgaagaagaaagagataacgatcaaccagataacctcgcttgtgaaagctgagaaagcggcggagaaagaaagcgttttggtgacgattgaagcggtgagaccaatgaaagcccaagctccgactgggagaggactaaggacgagaccagcgattgttgagaggaagattgagagtaattgccagccttgtggtgtgactccttctggtacaggaacagcgaatcggaggattaggccgacggagattgagagaacagagggatgagttcgctccttgaggagacggagacggtacggtgatgggggaggaggaggagga

SEQ ID NO: 14707 - DNA, 555 bp, Arabidopsis thaliana
ttttagataatggaactcaatctagaggtgatccaaagagaagtgatcaaaccttcatcacctgcacctcatgatcgccttcaactatcagtcatcgattttggcattgcagaagcttgcgtgcccatgatcttcttctacaacctcgcggatcttgcggaaaagtccccggatattgtctcaacaaggctgagaagctctctatcccaggcgctgtcacgtttctatcctctcgctggaaaaaaagaaggtgtctccatcagctgtaacgacgaaggagctgtgttcacagaggcacgcacaaatctcctcttgtctgagttcctaagaaacatcgatatcaactctctaaagattttgattccgacactcgcaccaggagaatctctggattctcggccgttgctgagtgtccaggctactttcttcgggtcgggatcaggtcttgctgttgggatctgcgtctctcactgtatctgtgacgcagcctcagtgtctacgtttgtccgaggctgggctgcaacagccagaggggattctaatgatgagttgagt

SEQ ID NO: 14708 - DNA, 512 bp, Arabidopsis thaliana
tacaatggcttgtcgttagccgcacgattcaacctataccttattggcaggtacttaatcaaaccctaatttctaaattgaaaaccctaatttgcctcaattttgacggtcactgtttcttgtgtgtagatgtgtgtgtttctctgtatgggaggaaacagtacgacgtggatgaacacggcggttctggttacttgtataagaaacttccggcgaaatcgtggtcctgtttcagggattcttaaaggatacgttggtttaagtactgcgattttcacggatctatgtaatgctctgttttcctctgacccagcttcgtttcttgtcctcctctccgtcgtgccttttgccgtttgtctcacggcggttttcttcctccgtgaaatccctccgtctactaccttcgccgaggataacgaagagtctaaatactttgctgtgtttaacatcgttgcggttgttgttgctgtgtaccttcagtcttacgacatcatcggaatcaaaacaggagc

SEQ ID NO: 14709 - DNA, 1288 bp, Arabidopsis thaliana
tcactgcaaggaaattggtcatagtcttcgtcattgtcggcaggctccagtcctatgttcaaactgctcttcaactactcatctaacgggtagctgtccaaatcttactgaacctggcctaaagaagcgtcgaaaccagcgtcggagaagatcaaagaccccagttcagatccctgtctccagcaaagagccatccaagagcacaattgcctcagggcaggaatggcaggtcaaatctatcactgaaactccaagtaagccaggaccagaggaaacggttagtctggcctcggctaagcttggtgctgttccgaaagaagtgtctattggtgagtccagcaagtcagacccttctagtgccttatcaatgacagctcttgttgctagctctagtttaccctctatgagtgcaaatgaaacagaagatgactcgtcagatgtcttgtcttctgatgaggatgttgcgagatttactcaggtgctgtcgaagcgtcagcggaaaacccagcggggcaagggccctaaacactctctttaattatgtgtacaaaccttttttgttggaatatcaggggctttaataatgtcagccaccgtagcggttttaaaaagtgggttaaggctaataagcctatttttggaggcgttatagagacgcacgtcaaacagccaaaggatagaaagtttataaatgctctccttcctggctggtcttttgttgaaaactatgctttttcagatttaggaaagatttgggtgatgtgggatccaagtgttcaggttgttgttgttgctaaatctctgcagatgatcacttgtgaggttttgcttcctggctctccttcttggatcattgtttcagtggtgtatgctgctaatgaggttgcctctaggaaagagttgtggatagaaattgtgaacatggtggtttcaggtattattggtgataggccttggctggtcttaggtgattttaaccaagtgctgaatcctcaagagcattccaatccagtgtctttgaatgtggacatcaatatgagagacttcagagattgtcttcttgctgcggagttatctgacttacgctataagggcaatactttcacttggtggaacaagagtcatactacaccggtggctaaaaagattgatcgtattttggttaacgatagttggaatgccctttttccttcctcgcttgggatttttgggagtcttgatttttctgatcatgtctcgtgcggtgtagtgcttgaagagacatctatcaaagcaaaaagacccttta

SEQ ID NO: 14710 - DNA, 645 bp, Arabidopsis thaliana
tagtttattagtaagaaataaaatgcgtttatgaccacaatgtgaagaatgccactattgcaaatttaaataattgattacgtcgtccttattaattgggccataaaaaggccttaaataaatgtgtctaattataattcacaaatatcgaagatgataaacaaacagtgtagttatcaacaagcttcaaaaatgggggaagaagaagagaaccctaattcgatcgacattcttcccgagctacttgaagaagttctccttagattgcccacgaaatcgatcctcaaatgcagaatcgtctcaaaacaatggaggtcactcctggaatcgagtaggttcgcggagaggcatatgagtcttcaaaacagccgccggagaatcttagctgcttacaactgcgactgcggcggacggaggaagctcctacccgagtcacggtttgaaggggacgaagagattgtctatctgcactgcgacgcctcacgaccctcgatgacttgccaaggtgtgatctgcttccccgagcaagattggatcatcgttttgaacccatcgactagccaacttcggcgattcccttccggcttgaaccataactgcagatttagaattggtaataactaataatctgttactttataagta

SEQ ID NO: 14711 - DNA, 1939 bp, Arabidopsis thaliana
tggagagaacagagacggcggcagaagagaagcgatagttgaaggcggcagaggaacgaggagcggtgaaagagaggaaggtcgtagcaatctctagtgttgatagcgtcgccattttagttaaagaaagcaagcgagaggtcaatggcgattggcgagtttaaacctcgtcccactctgtagcttcttctagatacacacaccagataattttcactcgattttttttctctgtctcttctcaatattttctcaaaattactatttttgaagatatttatcattgtagatatataagtctgtgggccgtgggcgtcataggcgttagtaattcttccttcgtatctcaaaacgaatatccaaacctatctcgaagctgcacgtggcattcaatccttagttcgtgcttagattcggagtgcaaaattgcaaattcgtccttttgcaaaactgatatttctcaagaccaaaatatcagaggcaagcaacatcgaattaaccaattaagaagaacttgtaagctattaattcatttaccttgttagaatgctttcttccccccacacaaacaaaacaataataaatcggaaaagatctaaaacccccacaaaaaaaacagagtaagaaactgaagcagatcatctctgaggctggtcagaggcagaagctccaacggaaggtgtagccgtgacagcgctggctgagccattttcaggcggtggagctactccccatttaccttctgactcaagcggctcgaatatatggacccctccgtctgacagacccactgcaaacatgttggattcttgcggatgagccgctatcaccagtggatggacattcgagttgctgcacaaaacatcaacatgaagactcaagattcatgatccaacattgcactagtttatattcatttcattaactcacctgagagaagctggcaaatatgcagagggattgactctgcaacgcaatcgaaggtttgcagagctgaagacgcatattgtagcgtccatgaaacttgtgtatatcaattggctatcacatgagaatgtggcatgtgttattggagctgctgattcacgcacaggccactggaatcaaaataaagacatttctttcttctataagggttactcagatgcaaggagagagaatgaacatatataaagactaaaacctgtttcatgcattcaagcttggttgtttcgtatatagcgagctgagtttcatggaccacaaggaagtgtacttgatcttgatgaaactgaacacgcgtgtctgacaaagaagacgtggatcttccctgtggaatttgcagaaccttgcttttctgcttctcccatccatccgtgttccatacgcaaagctgcatacaaaaaccaaaagattcacactaagacttctaaggatttggattctttattacaaaacatgagatgaatcagcacctgagcgtctgctccagacgaaaccagaacgtttaatacattggagaaagcgagcccggttattctcttagaatgtcctttaagcttgctcttaacctcatcaacacgaacattgtaaatctgtattgtactgtcatccatcccgatcgcaatgatattgttatcttgagggtgaaaagcaagaaacgttgcggcaggaggaggcggcatgaaagtagccattgtctgcgcttagccaacaacacaattaaatgtaacagatgaagcattgtttgcatacattagacatagtgctgtctgtagctgggattttaccttaaacgtcatcatattaaacaaagagatctttcctcccgatgctgacatcacgtaggaatcatttttcgataaagcaaaacagggtacggcttcttctggattagtttcagccacatcgtttgtcattaagatcccgctcgctggttgccactgctgaggagggtatc

SEQ ID NO: 14712 - DNA, 853 bp, Arabidopsis thaliana
tgagggagaagaagtttcagcaatggaaagctaatgatgatcacactagtaagatcaagagcaagcttgagattaaggtaattaaaactctggaattgagacagcatttggaaagattggatgatatgttttgtgattaattaagaacaaaggactgagtttgctactttgcttgatctaaatgttgcagagaaatgaggagaaatctcctatgttgttgattccaaaggtggaaactggtttaggcctcggtttaagttcgagttcgataagaagaaaagggattgttgcctcatgtggctttacttctaactctatgccacaaccaccaacaccagcagtaccacaacaaccagcatttcttaagcagcaagctttacggaagcaaagaaggtgttggaatccagagttgcatcgccgatttgtcgatgcattgcaacagctaggtggaccgggatgtataaaagatcttcttcttgtgttcttgagtttggttacctgatacagaatgtgttgtaatatctttgtatgttttgttgtgttaataacagtggcaactcctaaacaaattagagacatatgcaagaagaaggcttaaccaatgatgaagtcaagagtcatttacaggtaactgatttgcagctaaaagttgagatctttgagtcttacagtgaatgttactaagaactcattttctctgttatatgtagaaatacaggttacacatcaggaagccaaattcgaatgcggagaaacaatcagcagttgttttagggtttaacttgtggaattcttcagcacaagatgaagaagagacatgtgaaggaggagaatcattgaagagaagcaatgc

SEQ ID NO: 14713 - DNA, 565 bp, Arabidopsis thaliana
tgtttcatatggattgattctacattggttactacttttaaaactgaaatttgaactttgaaaccatgacatagagaataactgtaccggaaatcgaaaagcacccgtggttcttgaagggccctttggttgtgccgccggaggaagagaaatgcgataatggagttgaagaagaagaagaagaagaagagaagtgtcgacagagtgttgaagagatagtgaagataatagaggaagcaagaaagggagtaaatggtacggataataatggtggattagggttaatagatgggagcattgatcttgatgatattgatgatgctgatatttatgatgatgttgatgatgatgaggagagaaatggtgatttcgtatgtgctctatgatttcatatgcatgcacgcgtgagtatgtctatgcatatgttttacatgtatgccgcttgagaatatcagatgatcttgtgttgtatgtttgtatgatgaagtggaaatcattcacctctaatcaagttaaataaagtacgtataagctttgtgcgtctttatttatgttattatgtata

SEQ ID NO: 14714 - DNA, 1360 bp, Arabidopsis thaliana
caaaagatatcaagtctaatagcttaaacatgcaaaacaagacaatagaagaggtttaagtctaaaaattgatgatgtcgtctctctcgaaaggcaattttttgggcgatcgacgccatttgcttgttctccactggagatttttttccgacctgagatgttcgcagaattccttctagagtcttcaacgccggtttttgtctgccaaatgacaatggtagttattcttctcccctctttacgggaggtaatcgtcaaccaaaaccgtcatggatcattctatttaaccctttcaatcatctattcctttttctctcaccactgttttaccaactcgacaaaaaccaacaatcaattatgagtgattttctaagaaagtttgtccaagatctgaatttgggaatcgacgatgctccaaatttcctgtcacaggaattcgtctcacaggcgttcgctgttaaccgcttctcactaatcgtcacaccagtgaatccccgaaaaaaaacctacgagcgttaatcagtcaaatgcctagagtttagggactggcggattcttgcgttgggcgaatcgttggcaatggaaaggtgcaaatccaggttcgaaacagatgaatcaatgaacttggtcctgcgacgtggtcattcaatgactggatgttgtcaatcaatcgatggtacctgaatatcacagagaatgagatgaagataattcttttctgggtttaaatccaaggtatccctcttcttttcttaaccaatgcaatggctagggcagttggaaacagactaggatatgttgtagatgttgattttgatgagaacacaaatcaactaggattcattagggttaagttggcttgaaatttagatgatccactccggttccaaagaaacattcaatttcaggcgaatgagaatactatcatcaaattcagatttgagagattgagaaacttctgtaccaagtgtggttcccttaagcacgatgcaaatgaatgtgccttgacctttgaagaggataatcctgcacatgatgatgaagggagtgatgataaccaccaggagcatgaacatggagaacaagatatgactggtgatggctcgctaccaagcattgatccggctacattgataccaggtcttcagaaccattcgactacaggaccaagacaggaataagactcagactttgttccatctgaaatggcaagtacttttgaagatacagatttaactactcatagactaaggtacctgcatgccaaatatgtatgtgaatctctgatggatcaaagagaagcagggctgctagaggagttttcagacaatgtaatgaacgagtatgcatttgttaagag

SEQ ID NO: 14715 - DNA, 430 bp, Arabidopsis thaliana
atcccctggatgtaggaagatctgttttggttcagaaagagccaaggacaaggcttgatgcaggaacttggggaactatgggtgttggtttaggttattgtattgctgctgctgttgcttctcctgatcggcttgttgtcgctgttgaaggagactctggttttggcttcagcgccatggaagtcgaggtagtaaaaagatttacatacttattagcataatgtggaaattgtcttttgtctgaacttttgtctttaatgatgattgcagacattggttcgatacaatcttgctgtggtgattatagtcttcaacaatggtggtgtctacggcggtgatcgaaggggacctgaagaaatctccggtcctcataaagaagatccagcaccaacatcatttgttcctaatgcaggctaccacaagctcattg

SEQ ID NO: 14716 - DNA, 1588 bp, Arabidopsis thaliana
gctctagagttacctttgctgttaaaggtgaagttgttgatagacctccggtttggcttatgaggcaagctgggaggtacatgaaggcaagcttgcttccatttattttgtttactaactcacattttgcttgttcctatttctttcgaattcgtgtgacctgagtgtttattaatgtgatgaacagagttatcaaactctctgtgagaagtatccttctttcagagatagatcagagaatgcagatcttgtggtggaaatttctttgcagccatggaaggtgtttaagccagatggggtgagttctttcttctctatgtccatttagttttggagtttttatttttatgatctcttaagttgacatgtctgtgtttcaaaatgtatgaaaaggtgattctgttctcagacattctcactccattgtctggaatgaacatacctttcgacattgttaaaggaaaaggtcctatcatctttaacccgcctcaatcagctgccgacgttgctcaagttagagaattcgtaccagaggaatctgttccttatgttggagaagcactcagaagattaagaaatgaggtactaaagatagtgtgatgatcgaagcaacaaatgctcttaatctctttatccaaaaaacaaaaaataacaaatgctcttaagctgaagaatatgttttatttcaggtgaacaatgaagccgctgttctgggatttgttggagctccatttacactttcttcgtatgtaatcgaaggtggctcatctaagaacttcacacagataaaaagattagctttttctcaacccaaggtggattagtaaaagcttaaagcaattgtacaacttgacaatttggttaatatctcagagattgaacagattttctttcttctcaggttctacatgccttactccagaagttcacaacctcgatgataacgtacatacgctatcaagcagatagcggcgtcaagctgtgcaaatattcgactcttgggcaaccgagcttagcccggtggattttgaggagtttagcttaccttatctcaaacagattgtggaagctgtgaaacaaactcacccaaacctacctctcatactttatgctagtggatcaggaggtttgctagagagactggctcggaccggtgtggatgttgtgagcttggactggactgtggacatggctgaaggaagagaccggctaggaagagacatagcagttcaaggaaacgttgatccgggagttctatttggatcgaaagaatttatcacaagccggattcatgatactgtgaagaaagctgggagagataaacacattctcaacttggggcatggtattaaagttggaacccctgaagagaatgtagcacacttctttgaggttgctcaagaaattagatattaagagaaagaatgaatgtgatgattattatgctttgttgttaatttcggccttccatctttttttcttttccatttgagatgtgtaattttatttttatattttaactgtaatttttttttgtagactacttggaagaaagtaatgattaccgtgcaatgggatatcatatatg

SEQ ID NO: 14717 - DNA, 2275 bp, Arabidopsis thaliana
ttgactatctggcacatcttcggaaatggttcaggcatgtttgttccaggggcaacaagatcaagctggtaaggatttaagtatcccttaatttttctatttttttctatgatcgatgaggcccctttaccattctgtctaaataggctattctatttgtacagatatggaagaggggctccttcaattattctttgtttattagagtttaatccaagtttttttgtttcagcgcggggtagagcagtttggtagctcgcaaggctcataaccttgaggtcacgggttcaaatcctgtctccgcaacttttttttttcaagaaatgtaagtttgattctactaacaagtcataaattaatacgtgtcttttgggacgcgaggaaaaaattacaatatttcccggtcaactataccgaatattttctctttttgaatccatttatatttgggcggatagcgggaatcgaacccgcgtcttctccttggcaaggagaaattttaccattcgactatatccgcattttttgcccttctttataagaaatttatggataatatttgttcaaagctagacgagatacactctttggtttggggtcatttcataaaattctaccaccaaataaattcaattaacaattctattaatatatatatatatattataaatatatatattaataatatatattatatttattctatatattaatatattaatattaattcttgaatattaatttaatttaatattgaattccagattcaagaatatattattcttatatttccataaaatattatattctatattgacttgatatcagatctcaattttttattcgttttttttatttatttttttttattactatttcatatttaggaactatttcatatttagtaactatttattaatcttttattcatatttcattcaagttccataagttcgaccccccctctaattttttctttatttgcattttatggacttatattgaatttgaatgtgtaattcaaggaatgggagggggtcatctcatttttggatctgcaacgaatgaattcaagagataagagaattaaggatacccaccaagaagactaatccaatccataaagatgtaccagaaaatacaacatttttgttactcgaccaaccatcaggagacgcaaatacaacgggtacactaatcagtaagattgatgaagtaataattaatgcaaaaactgccaattggaaagcaatagtcatgtttttaatcctccaagctattaacaaaagaatatacaccatttaatcctcttacccactaaaaatttttaataaataaagggattttatcatgaatccgttgattcgagatgacttagttccaatttctttttaccacttttagtctattcggacatgaagttaaaggttcttttttacttcacaaacgggtatactggatcgcgtatctcatttatttatatagccagatttatagacctattaaagaaagtcacaccctatatctttctctacatagtgatcgtattaactcatagggctatgttctatttggcgaaaaaaaaataaaatagaaattatctttcggagagatggccgagtggttgatggctccggtcttgaaaaccggtatagttcataaaaataactatcgagggttcgaatccctctctctccttttgttggatgaatctatttttctctttattggctttttttacttcttagcatgataaataaatttttctggctcggctggatagtatagccgagccagaaaaatttagattgaattgaaagaaacaaagaagactttttaatatgaacctatttgttttacctactactttagttaagaggagtcatggaaagaacaggttcaaaatcacgatcaattcctttttcaaatcccgctgccgctgcccgagcccttcccgcgtgccataaatgacccacgaataggaaaaatcctagaacaaaatgagaggtagataaccaacttctcggagagacataattgactgcattgatctcagtagctacgccccctacagaatttaacgaacctaaaggagcatgagtcatatattctgccgaacgtcgttcttgccaaggttgtatgtcttttttcaacctactcaagtccaaaccgttaggaccccttaaaggttctaaccagggagcacgcagatcccaaaaacgcattgtttctcctccaaaaataacttctccagtcggagaacgcattaagtatt

SEQ ID NO: 14718 - DNA, 736 bp, Arabidopsis thaliana
cttggattagcttcgcatttaattcgttaatatttttacgaaattttgcaaaagaaatggcgttggcgttgggactatcagaggctacaagaaaaacttgtttgaatttgtgaaaacatgtgctattgccggtatattaaagattaaaaaaaatggaagaggtagacagagcatttatggagagtggtgaattgcatttaacgacgcggactttgatgccacagtatcagcccatatatacccagtctcttatgttcatacaacttataactcaaacaaatacaattcgtcgatatgtgtgatccactagagacgatggctccagccgaagcagagtggtgagtactatgcaaaagagggcgtattttcagagacaatggccgttggtcgatgtcgtaagagcgtcagtcgttgtgattgtgcactttttgtgtctcttggcgccgtttaacttcagatgggaagctttacggttcggtttggtgctcttcgcgttgactacactcagcatcacattctcattccataggaacttgtctcaccgtagcttcaagataccaaaatggctcgaatatccttgggcttattctgctgttttcgctcttcaggttaacaccagcgttttgagaatctaactaagtgttaccaccatgtcaaatgcttttctttctttttcccaagtatatgattagagaagaaaaaatatattttcagggtgatccaatggattgggtga

SEQ ID NO: 14719 - DNA, 580 bp, Arabidopsis thaliana
  unsure (1)..(580): unsure at all n locations
catctttcttcttcctctctctatgctcttgaatcaaatcagcaagtggcatattactcacagtatctccactaacaagaacgaaatcaccttgaatctgagacgtctctgtctgttgttcatacatgtaacgcaaagcatctccagcactgatggatttgtgcgactcaatcgttctcacaagcaagtttggatgcgaataccactcggatttctccagatattcgataacctgcatcgaatgagcacaacagaagacgaaaacctcctctattccagcagattcgagccatgccaatgtgtaatcaatcatcggaacattaactatcggtaacagtacctttgggcgttctagggttacgggacgaaatttcgtggcgaaactgtcggcaagaagaattgcttgcaatcggtggcgactctgtacctccgcatcctctgaaaccctagcggcggcgcgatnttcttctgagcacccatatctcctcctctctcactgatcaaattcgatctcacgggaaaatctaaaaccctgagtataaactgaagttaatttatgacgaattgagaaaagaggatt

SEQ ID NO: 14720 - DNA, 1797 bp, Arabidopsis thaliana
gcattgaagagaagtatcttaagcaggtatcaaagcttcattggttaaaggttggggataaaaacaacaaaactttccatcgcgcagaaccgctagagcagctcaaaactctattcgcgaaattcagaaggaagatggtagtactgccacaactaaagatgatatcaagaacgagactgaaaggttttttcaagaatttcttcagctaatcccgaatgattatgagggaataacagtggagaaattaacatctctattgccttatcattgttccccagcggaaaaggatatgctcactgcatcagtttcagcaaaagagataaggggagccttattctcaatgccaaatgataaatctccgggtccggacggttacacttctgaattctacaagcaggcatgggatataattggtgcagaatttgttttggcagtcaaatcattttttgaaaagggttttctaccaaagggtgttaatactaccattctagctctcatcccaaagaaactggaggcgaaagaaatgaaagactatcgaccgatatcgtgctgcaacgtcatttataaagtcatctcaaaaatcattgcaaatagattgaaacatgttctcccgaatttcatcgcgggaaaccaatctgcatttgtaaaagaccggctcctaattgagaatctgctattagccacagagttagtaaaggactatcacaaggacacaatttcgggtcgatgtgctattaaaatcgacatttcaaaggcttttgattctgttcagtggtcatttcttaaaaacgttttgtcggctttggactttccaccggagtttgttcattgggttatgctttgtgttactacggcttctttttcggtgcaagtcaatggagaattggcaggctattttcaaagttcaagaggtctacgtcagggttgctctctttccccttatctatttgttataagcatggatgttctatcaaaaatgcttgatcaagcaacagaagcaaagcaaattggctaccacccgcggtgtaaaagtattggtctgtcccacttgagctttgctgatgatctcatgatcctttcggacggaaaagtttgatctatagagggtattgtgaaagtttttgacgtttttgctaaaagttcaggtttaaaaattagtatggagaagacaaccatatatctagcgggaacttcagaagtgtctcaccaatggatcaaagaccggttcagttttgatgtagggactctaccggtgaggtatttgggactcctctagtaaccaaatgcctaaccgctgcagattacttacctcttatagaacagcttaaaaagaagattgggtcatggacagctagatttctttcctacgccggtcgcttaaacttgataagctcggtcctatggagcatttgtaacttttggcttgctgcgttccgctcccgcgaaaatgtatcagagaaatcgataagttatgttctgctttcctctggtctggtccggatttaaattctcacaaagctaaggtagcttgggacgatgtttgtaagccgaagaaagaaggtggactcggtttaaggtctataaaggaggcgaatgatgtgagttgtttaaagctgatatggaggatactctctcgaggagattctttgtgggtaaaatgggttgagacttatcttttaaagaaggaaagtttttggtctatcaaagaatcgacaagcaaaggttcatggatgtggagaaaacttatcaagtttagggatatggtgaagtagttttgcaaaaaagaagtaaacaatg

SEQ ID NO: 14721 - DNA, 570 bp, Arabidopsis thaliana
taccagggtttataacaaccaaagcaaccgtgttttcgtctgcaagagcctcgacagcatcaagatcgatctcccatccattttccggaagaagatcgacgtagcgaacttcaaggtgtctaaacttagcacagagttcatagattgggaaaccaggccttggaagaagtatattagccctgggacgagctaacatcgacaatgctacatcgatcgcttgcgtgcaacccgatgtgataaacacatcatcctgtgaaagtttgtatggaagatcacgcgatagatactctgctattgccctgtttttatcattacacaaaaagtgtgagacttgatttgcaagttagtctctcatagaataaaaaaatgaaatattccgttgcaatcagaaggttcaaaacaacctaattatacaatcatcctaactaaaaattcggtttagtcatctaatcggttatttctgattccggttgaattaaaccaactctaacagagaaatggggaaaagacgaaagtgaccttcgagcttggggaagacgacggtaggagagtaccatgggacttgtggag

SEQ ID NO: 14722 - DNA, 563 bp, Arabidopsis thaliana
aaggtgaaaacttttttcagtcttttaacacaaaatttaaaaatttccactctgattttcgatcatatttctatattgttgcaggctatagatgatgcaggtcatgataaggcgacaatgttcaaagttcgaggtttagaagctgttgataaggcgatacgtcagcttgctaagcttttatggcaagctgagtcttctacacattaccagtatttcttgtgtgtgaccggtgatcattcaactcctgttgagtatggagaccacagctttgagcctgtcccattcacaatgtgccggttaagggactttgtgagcgcggtgggaggagaatcagccgtactagagacgtctttggacccttttccacttccaacggttgtggaatcaggtgaagatgttaccaaacaagaggaagagagtgggaggagggaagctcctctggcacttggtggagatttagttgcagagttgaatgaggttgcactgcaagaggatgtcttggccgttccatggcggtgaaatgatgggagtcacactaactttcttaatctagaggtatgagt

SEQ ID NO: 14723 - DNA, 568 bp, Arabidopsis thaliana
cccaaggcctatcccaactccgactctgactcctgcattgaaccatgagagctgaccatcctcatcaacgtacattccttcagggtaatatctctgtgccattttcatatctgagtcatcgtattcatcaacttctgattccatcatctgcataaacgaaacgacaaacaagataaagcaccaaaaaaagtgcaaagagagtctattgacctatatccatatctcaatttctgatcagtcaacaattctacaattttcaaattcagctgtagagtcaaagaaaacattcaagcaggagctaaattcaccagaaacttgcgagtgatcttaataactaaatatctgctacagcattcataactcacaaaactagacgaaagaagcaaccttttcaaatctcaatcccaagttattaagaatcgtaacttaagggcttggacaatcaccaaacagagaattgtgaaatcagaatcatacctgtactttgctttgacgggccaattcatcaccaatggtaccaatgtcttgctctttgccaacttcctcatcctcagggatagcgtcgagt

SEQ ID NO: 14724 - DNA, 1393 bp, Arabidopsis thaliana
gttttgaatgatgacttattaattagacaatatttttccgacctttataattaaattaccaaatacggaaagttcagagaactcattcaggttcgtaccaagttttgacttttgagggtacaagtaaaatcattcttttgaactttgaactttgaagtgcatgttgacgttatactcttcttcagaggacaagaagaaaacagaacatcttcttgcactagacggtgcaaaagaaagactcaaattgttcaaagcagatcttttggaagaatcttcttttgatcaagctatcgatggttgtgatgctgtcttccacactgcttctccagttctattcactgtcacagatcctcaggtttgtcagggaattattttaactattaatttgcaaagtcatatgagttaaaatcaaaatttgtgtttcttttcctattagactgagctgattgatccagccttaaagggtactattaacgtccttaatacatgcaaacaagtttcttctgtcaagagggtcattctgacatcatccacggctgcggttctctttcgtcagccacctgtggaggcaagcgatgtggtggacgagactttcttctccgatccaagtctatgcagggagacaaaggttcttaagttttgttgtgatttgtgaacatatcaatttcgagattttggaatctttcttacacttttctttttcttctttagaattggtatccactctccaaaattttggcagagaatgcagcgtgggaatttgccaaagacaacggaatcgacatggtcgtgttgaatccaggatttatattcggaccactcttgcaaccaactctgaacttttcggtagagctaattgtggatttcataaatggtaagaatcctttcaatagtagattctacaggttcgtggacgtaagagatgttgccttagctcatatcaaagctctggagactccttcagccaatggcagatacatcattgatggtccaattatgagtgtaagtgacattatagatattctgcgggagctacttccagacttgtgtattgctgatacgtgagttctctttcccgctacctttacttatgaagtccataaatttaatgaaagattttgaaaaacttacgttcgattttaatttttgtaggaatgaagaaagtgtgatgaatgaaatgttatgcaaagtgtgtgtggagaaagtgaagaatttgggagttgagttcactccaatgaaatcgagccttagagacactattgttagcctcaaggagaaatgtcttttatgattctgttcttatatttataactactgtgtattttatatttttgttagtataactaattcaagtggtttaagctgttaaggctctttaagatctaagcatttt

SEQ ID NO: 14725 - DNA, 1185 bp, Arabidopsis thaliana
gcctctcaagcacattctttgtgtcgatatcgtctagaagactcaagtggcacgcctcttttaaatcagcaatatcatatttctcagctgcttggaggagtgccaatctgtgtataagaaagtcttcgttttggatattgccgtagatataactgagaaaagcttggcaagcatcaagtggcatgtcgagtacgtttatttctgatagttctttctctttcaggtcgtgtaaaaacatgctgcggaaaacaggtgaacgggcagcgagaactgctcggtgagctccaatgcttccatcagaggcattgcccgtcatgtcggtgtacatcctttctgtcaacatacgtccaagggatgttaccgcagttacttgcgattgattctcagttgaaccgttggcccagatagagtaaagttctccactctgccgaattcaggtaatttatcagttcagcacacatgtttcaccaaacatactgattcaatgttgcatagaatagttaatttaagaaagaaaaggctagtcaatctataagtaatatctctaagtgatgagacagacacttacatcttgagacaaaaccttcaagtcaagaaactcgacgtcgatgatgattttcccagttaagggaacttcaatagtccaaataaaatcttcgtttgtcttaatccgcttatctattacttctgcattcgagtaatcattaaagaaacagtgtcagcattctgaaagattcatcttttgtggaacagaaacaaaagtaaaccataatcaaactattgagtcaagagatcttctctacctggatgagatagagcctttctctcaccagtagaagagacaacacgaagagcaaaggaagcaaccggtggattttctctggtaaggtttgatacctctggatacaacttaacatttaatagcatcttgcttttctccacagacaagtgccttcaaattaaaaccaaaattgtcaaaatctatctgattatctttaccaaacacatcaactacaaaaaggcggccactattctcatttatgtcggataataattgatcaggtgaaaaacacaggagagtgaagacacataccaattccaaagacccatcttgaaaggatcggacttgcggtaagtggaggaagaaagattgtggattcgccattggcgaggtctagaaatggt

SEQ ID NO: 14726 - DNA, 1391 bp, Arabidopsis thaliana
taaagaaggatcccctgcaagttttgtgatgattaaacctcattaaacatactaactgcttattccactgccaacatgtaaacattagtttggattcaattgaatgaaaatgagaatcatatatttccatttaaaggtttctgaaagtatgagcttaaagctttagttgttgtgaaagataattaaggtgggagaaaagaagcgagaagccacaaggacactaatatgatgcctattttgtatgggtacacatgcacatgcttgcacatgtgttccggccaattagctcttgtttttccatgtggttcggtatctctatatacactcatgcacccaatatatattacacgtcatggtcattagccatcgcatccatataagtcttcatcatccaatccacgattccactcccttcaataatgcaaaatcttcaacagttttgtgtttcataaagttttacattctgtccttgtccaatgaagacacttacataaatgtataagttttaaaacaaaagcaaatcattgagacataaatggagatagtatatatgatgaacaaaaagaaaagagacggaaaaactgttagtgtaggccttcttcgcatttgacaataatttgatcgacattaggtgaaatgacgttcttgcccaccaagtcatgagccttcaaggactctttgttccaatctgtgttataaacaacggtcaaaatggagattgcacaagctagctgtgccccaagcaagccatagcataggcccatgaagcctaaaccccacacaaacgctaaaacaaccgccactgggctccaactacatagaaggcgtagaaattaatcttggcccctatacctggcctcgcactgccacgtaagattccacagctaatggtctgaggacagttggcaagctcacaagctccaatcaccggaataaccgccgccgtcagctcgaggacaactttgtcggcggtgaaaacttttccccaagcttctctccccacggtggtccccacaagtccaaacactgacactgccacggcggctccgacagccacagtcgccgctgtttttgctttctctggccgtcctgctcctaactcgttgcttaccctcgtggataccgcggccgagagggccgttgggattgtatacatcaatgaggttgtttgtatcacgatggcggctgctgctagcgccaccttcggctcggggagatatccagcgaggaccgtcatgaactcgtaccaccaccactccaagcaaaccgctatacagctcggaacagcgaatttaaccagcgttgaccacacatcattttcaccggagtctctcgaaccatacagcatcaacggcgtatcaagacaaagagacttggaagtggttttgtcg

SEQ ID NO: 14727 - DNA, 781 bp, Arabidopsis thaliana
tcatcttattgtaagtactattaaacatgaagagagaggatatggatcaatatatctacgagtttaagtgcttgaaattaactgattaggtaagaccctactttgtggcatccttagcctctcctgctttaccctccgcgaactctgccgccttgtttgcggcttcttttcctttctcctccacatacgccgcagctttctcagcttctttacccaatgtatctgcggtttcactgtttttttcaacaacgtagtctttcgctttctcaccatctgctaatgcctcttttgttttatccgtcacgaaatctgaagctttctttctatatcattttcaaattaaaatttattttagtatttatcaaaggtttcaaaacacatatccaaaagtagtcaacagaatcatcaaataaacttagagctatacatgtaaactagaaaaatagagatatataatgtacggtatatgaatctttatctttgataatagtcaaatatgatcataaaataagttcaaaacaaacatatttccactaaaatctatactaatatagtataccataaacattgcctgctaagatccttacttatgaggcaagatactaaaagaagaaagaatgtagacttacgtggcctcgttgaggtcatcgaggatgttgccgtcacctttagcggcgtagatcaacgacttcttgcgttgagaaacgacgacgaactgagttttctggctgactctgacagcgccgaagctgctctgcttggctccgctgtggaaagaaga

SEQ ID NO: 14728 - DNA, 573 bp, Arabidopsis thaliana columbia
taaataagtcactgtatcagattgtgtgtatttttaattactcacgaatagttatcaactacagttaagttctagacttttatgatccactatacaatgaaggtatcccacgttagtagtccacgagtcggagtcggaacggacctcgaaaggcaaactttattgatggcaaatccaaaagttcgaaaagtgcttttaaaattcggtgttgagaagaagaaacaacagatgtttttggcttatagaaaacatgagcatcacgagtcacagatgattagttaattctcgagtagcggagttcttttagtttgaagagagctgagcaacgagctgcgtgagattatcttccttcttgatactctccacccaattggcattgatatgtaccctttcaatgctctgcttcaaggttcttgccatcgaaggctttgatcttgttgcaaaaaactcctccacttctttggctttctcaaacgacgcaaactgagacaatcaacataaagtgtaatcaatgggaaaggccagcgagaggatcaatagctattttatggatatgcgataaggggaggagga

SEQ ID NO: 14729 - DNA, 686 bp, Arabidopsis thaliana columbia
cttctcggattccaggattgattacattctgagtcttgatcttctgatagacttcctctgagatacaagaacaagctaaaccaaactctatccttcttgatacctcttctaacgcaaaatcaatagcatcaataaaatcaggtagactactctgctttgccatttgggagaaatgctgtcgaaaaggcttaatccgtgacgcctcattccaagcaaaggtgcaatctccaaaataagttactaagaaacttcctttcttgaaatgcttcttcgccttgtctgttgcagccgaggcatcaaacacctgtccaggccaccacggatggctccttactttagcccaaaccaaatctgagtcagagatcttcaccttcgcagctacatgggcaatttcatcatccaaaatactctcatccttgctctcatgcggttctaaacccataaaacatacaacatccaagtcctcaacttttgttccttgcttttctaagccatcgggttttctatcctgaacaaggtcttcactatccagtctgccatcagaatacttcacatcactgagatcagcgccatgagaacagaccatgtcaggttccactatcatctcaacaagaagcccccttttctctaccatcatgacctcttcgcaatctactagaacctacgcgtcactttggttactctct

SEQ ID NO: 14730 - DNA, 724 bp, Arabidopsis thaliana
atccccaatctaatcttgaagttaaaaagctaaattttctggtttgaaaaatgacaggtatagaagaaagagagataaattagtggaacgtgcttctgcggctcggatcccaacaatgtggggacctttcactgcttactgctataggtccatattagacggaatagagcacatagcaatggttaaggttagagcaatgctagagaaatatatcttgttgatttgtcttcagaacatccaaggacttaagctaaacccatttgtctgaaattgtggcagggtgagattggtgacggtcaagacattctcgtgagggttcattctgaatgtctaacaggggacatatttgggtctgcaaggtgtgattgcgggaaccagctagcactctcgatgcagcagatcgaggctactggtcgcggtgtgctggtttacctacgtggacatgaaggaagagggatcggtttaggacacaagcttcgagcttacaatctgcaagatgctggtcgagacacggttgaagctaatgaggaattaggacttcctgttgattctagagagtatggaattggtgcacaggtattaaccaagatcacattatcatccaaaaaagacaacaattttttttccgggtattttactaaatcttcttgaatctgcagataataagggatttaggtgttaggacaatgaagctgatgacaaataatcccgcaaagtatgttgg

SEQ ID NO: 14731 - DNA, 582 bp, Arabidopsis thaliana columbia
ttagagctagatttgttaatattaagatttggtgattgcagatgatgaccatgcatgacaggtggcaagtgtttagaggagggagtacggaggagggtgctctactatacacggtgaaaagatcgtcgatgattcagctagcccctaaacttgaggtgtttttggctaacaacgtagaggagaagatatgtgatttcaaagtcaaaggggcctggctcgacgactcttgtgttgtctacgccggcgattctgacaccattattgcccacgtaaacaaactctctttccttatttttgttttagaagacagtattttacatgtaaatgtttatatcatatattttctaaatatcgaataaagtttttttttaaaatgcatttagtgatacattattttactacaagttttacagtatattaaatatttaaaaattaaagaagataaaaattttttgatacatctggaataaacatgtgtatatattatacgcatcgatatatattattatgaactgggagtttccaatgtgttattaattgttaaacttgaaaaataaagtggtatggtttgaatggcagatg

SEQ ID NO: 14732 - DNA, 598 bp, Arabidopsis thaliana
tttataaataacaaaatcaagttcctcatgaattattcttatctcatcaataatacacacaccttttgaatatttacttttcttgtatctttattctgtctaatttttttgtttattctattcatttcccctttttttattaataaaatctagccagtgtttactttttttccgtagaatcaaaccggcggcgacagtgacggcggcgaaaagcggcggtgttggccgcaaaaacgatgcaaaaccagctatggtcattaccgctaacgatttatcaaaatgggaaaattttcctaaaggacttaaggttcttcttctcctcaacggctgtgacagcgacggagatggctcctcagccgccgagactcgatcagagctcgaatcaatggactatatcggtaagccactaattttcctctgtttcttactttaaaggttatttaatcagtggttatgcataaatatttaatcataagttatgtgagtgagactatactagtttaatattagagttgctttagctcttacatgtcccgtgacaattctaaattgtatcgccttctattatatttgcataaatacacacagacatacacaa

SEQ ID NO: 14733 - DNA, 852 bp, Arabidopsis thaliana
gcaagcatttggagtaggaccagtacgtctacagtacaaaaattcaattctccactcatttttttttccgtcaattctccactcattattagtacaaaaatagtgagataatcctttaaattttaattctccactcattattttcttctagtatcataaccctttcacaactacttgcctcaattaaaaaaaaaaaaaaaaactactgcctcaatccatactcattgattagatcagtaactaatactatacacataagttaaatgtacttaagtatattttacctatctagctagcaaacaaaaacatatggcataataaattaaaagacaaaaaaataaaataacagtttacctctgccacagagagattcaactccttggttaaatccgactgaacaggtgatgaatatcctatctgccaaaattttcaacgaaattagaaattaagattcaaacacaaaacacaacacacaattactgaacaaaagcaaaaattagtaattgtaaactcacagctgagccaaagacaaaggaaccagacacggctacaaaagtggtgagcaagagagtagttgttattgtcgccgatgagtcttgattctctttgttaataagtgaagtttcaggagcaagattagcttcatcgatttctcctctcattttctctttcctttttgtgattctatctttcttagtgaaatacttgagtaaagacaaagtagagttgttggagagatctcaagaactaatatatagagaagagataaggttattttattattttgtctttgtcttcaagttgctattatatatagagaaaaagtgaagagtaattcacaaatatatatat

SEQ ID NO: 14734 - DNA, 581 bp, Arabidopsis thaliana columbia
gtacgcatacccgcaaggtagtgcccctcgggagctccgactccacaagccggagacgtggtagtggatccaaagtactgcgctccttaccctatagatatggcgatcgtacggaagatgatgtcgttaacggacggcaatttcgtgataacggacgtcaacggaaacctgctgttcaaggtgaaggaaccggtgtttggtctccacgacaagagggtcttgctggatggttctggtactccggtcgtcactttgagagaaaaggtcaacaatttatagtattagttaaaaaaacagagccgcaagcacacacacaacatgtatacaagtatagatgggattttattaataaagtagtaatagtttgtttggtgtcgcgtgatgattgcagatggtgagcatgcatgacaggtggcaagtgtttagaggagggagtacggatcagcgtgatctgctgtacacggtgaaaagatcgtcgatgcttcagctaaagaccaaactcgatgtgtttttgggacacaacaaagatgagaagagatgtgatttcagagtcaaagggagttggctcgagcgttcttggg

SEQ ID NO: 14735 - DNA, 510 bp, Arabidopsis thaliana
gattatcagttgtaaatgctcttcatatagaactgcaaaaagcaaaccaaatccttgttgacttattatataataccacaatacatattcacagagatgatacacccgattcaaacaagttcagggtatttagtcaatatacgaattagactagactgtatatatattagtgtgatcagtaggagccaagagtagtggagaggtctaagcgtgaacgagatcgccactctcgtatagccgatctgagagtgtggttcggtgtaagatcagaatgtttgagccgatgcttagtaacaggagacacatcttgatgtttttgaatccattcttttatcgcttttcgttcgtatgtgaaaccatctgctgctatttgtggatcttccattaattcctacattcacccagaatcaacattttaaaacctgagccatcgagaattgtggttggtgtgcatcggttattcgatttaccttaagaattggacagtaatagtgagttggtgctcgtgcg

SEQ ID NO: 14736 - DNA, 561 bp, Arabidopsis thaliana
gccagtgtgctctaaagctgggtcatgacatcgttggcgttgttcagatcatcgagggtttcaaacagcggacgaaccaggcatcgcaaacccgatacccgcttctttcagcagcaggtggacagccagtacgtcggacggcgttttcgccatcgagatcacgtaggcggcaatggagccttgcggtgcttcggcaatcacctggcaggtatcgagcacttcgcgcgtttcggcgcttggttgccagttgcgcggcagaagcggacgtttggagttcagttcgcggatcaggaacgcctgtttgtcggcctctgaccagctttcgtagtcgccgataccgaggtagcgggtcagctcgcccagcgcttcggtatgacgcgtgctctcctgacggatatcaatacggaccagcggtaccgcgaaacatttcacgcggcgcagggtgtcgagcagatcgccgttgcgataatacccatgccacacgcctgaagtgactggtagcaagcgtagagcggttccacagttcttcgttttgtgtcacaggccttctggttttggcag

SEQ ID NO: 14737 - DNA, 1169 bp, Arabidopsis thaliana columbia
ggtgaggtaatagctgagttagaattctacacacctcaacatgtagcaagagccgagaaatcatggaaattgattgcagactcgttccaatctgtgttaggatgcaacgttgagatccaaatgaatcttgttatctctgcgtgttctccaccaaagagtgctaaagcagcagcaagtcttttctttggacttttcagttgttctcgtagaatgcttcacaagtcgtatttgactacaagaaccgactctgactgcgcatctgaaaagcctgcagttacaaattctctgagaagttgccaaggaaatgtcttgagggctcgaagtgttcgttcttcagccaatgcatcatcgcgtatgagctgttccagtgatcaaggcgatgcaacttctgctatgtgtactccacacattcctccgggtgaaaaaaggtaaaacatggttcatatttattcatttcaaaagtaagttgttttgtgatttggctagctactcaagtatactctgcctctgactttgtgcaggccagaagatgacactgatgtgttgtgttggaagaagactcccctaggcaaggtaaacatctcgactatgcctaagaattcggtttcagatctctgtctgtacctttttggtgtttctaatttgtgatgatgatacatgtcttatagggtcagagcgagacacagaacagcaagagctcacggcttatcggccgagtccttccctgcagcactgcagctaattaagggagctcgatgagggtaatacccattttgtggaagtggaaccaataggttttagcaaacccattgtttaggacaatgtgacacaaaaatgtatagttgcaaaatgtgtttcaagaccatattttagattagcatatactaatcactcctttaacagacctgaattttactgtctttggacccttttattgactgagctcattatgttttcacaaattatctcattcattaaaacgaatcagaataaagtgaatacattagtcttcaacttttttgttacaaaaagtggataatgtttaattttttcaataaactgatttgaaattagaaacataatttggataaggttttagtaatttgggataagatattgacagagagatatttataaattatctggtttcactattttggtaggaaaac

SEQ ID NO: 14738 - DNA, 615 bp, Arabidopsis thaliana
tattaactgttcacgtcaagattagatatatgaatggaagcacaataaatacaaattattataagtgttatgattaatgatatatgtttatagtaggattacctgatcaccagaaacgattgaagccgcgttgctcatcacataaacatcttgttgtctgcattaggagatgtcatttatgcacttgcacaaaagagttcccacgttccctacagaaatagcaagcttacacaagttctgcaggactccttaggtaaacgaacacaaaaactaagttttgtaagccattttatttccccgtgctttgttgtagcttcatctctcatctatgaaactatgtgcaggtggacaagcaaaaactttaatgtttgtacatattaatccttgaagttaatgcggtaggggagactatcagcatcctttaagtttgccaaagggttgcatcgattgagcttggagcagctcgatcaaacaaggaacccggtgagattcgagatcttaaggatgaggtcatatggcatcagtgtcattttcgatgtgcaaacttaataaatatgttgtacaaactatcttcacatatttagatatctagcgttaatcggcatggagaagaag

SEQ ID NO: 14739 - DNA, 538 bp, Arabidopsis thaliana
ttagaagacaataacacaacaagtaataatagatgagaaaacttttgtctactctctattaagaaccttaggctttttgttacttttcgtggaaagccgctctttgccgaataatttcctgccccatgtacctacacatagcactttcacaatgatttttattcaaacatcatatcttatttattgatgttgtgattatttagtttttgtgcttaccttccaagcatcatgaccgtggcttgaggattagtcccgggagacttgagaaatgtggatccatcgatgacccttaagccatctatgcctaagactttgtaattcttgtcaaccacttttccaacttggcaacctccatggtaatgccaaacactcgtcacggtgtcgatgcaaaactgcttcaagttgaacgctgaggtcaagtgccttggcctcaaattgatgggaagggccaacatgagattgagcagttcacgtgccgtcacaccctggatacttgtacttggagaaagctctggaatttatcattctaataatggtg

SEQ ID NO: 14740 - DNA, 748 bp, Arabidopsis thaliana
ctataaaagcattcaagaatcaaaagctatcaacattaaacagcaaaatccaaatataaagtaagtctctttgtattctcaacatcaaagtttttaactttttcataaatcagatagctagtatatcttcaattatgaacagattgattcgaatgcagaatgagaacacaataaacgcagattcccctaaaccggaattctaagagcatttatcaaatagttcccgaaaaccaattcccagattgtaaagatcggagactatgaagagaaatctaaagaaagctggtgaagacaaaccaaaccttgagactgagagtgagggaatactcgagcttgtgagccatgtatcggaaccaagtcgagattgaagccatgaccaaaacccttaaaatgaatttcgcttttaaaaaataaatgctagagggtttcgaagctggcttctccgctttgtcggtcttctccgcctcgtcgccgccgtggtcgataggaacagaacagcaacaacacaaccctatgggtttggtttggtttttgataaaaatgggtttttgtttcacaaaaatcttgttgatgcgttgaaacgaaatcagaagtaaaatattaatttacataatgaaccttcatttcattatctattcatggtattcacctgtaatttattattcaaaaattagtcctacaagacaatttgtagtattgagacggccattaataaccggcccaacagtactgctgcaataaacaaaca

SEQ ID NO: 14741 - DNA, 582 bp, Arabidopsis thaliana
ccctccaaggcattctccaaattcaagtacccggacgcgaccatacatggactactcgatctaatgctaagcgttcctaccaatctgaggccgcggcatataacctcgatgttcaatttaaggcagttttgcattgacactgtgatgacaatttggcactaccatggaggttgccaagttggaagagtggttgacaagaattacagagtcttaggcattgattccttaagggtcatcgatggatccacatttctcaagtctccggggactaatcctcaagctactgttatgatgctcggaaggtaaatgcataaaccaaatgatccaaataatctaaaacatgttaatgatttgattaagaactgattgtgtcagagtgttttgtgtaggtatatgggccaaaggattcttcaagagagggagatatacaacaaaccggataaagaagcgtgagatattacttgttttgagaaaatcttgatcttggaattgttttaatcaatgtatgattaacttaaagagtatgaatgtgtacatctgttcatgttctgtttctaatatgtataataatggtggaattat

SEQ ID NO: 14742 - DNA, 791 bp, Arabidopsis thaliana columbia
catttagtttgcagaggtttttccttcattctgaagaagagttactgggaaagggaccttctgagttggttactgagacgtctgttccaaaatcgaagaagactattggaaaaattaaactccaaggtatacacatttgtatcttttttcccttccactgtattttaccacttgtagaaatcgcagtagtgcttacaagagtaagattttgtacagttcgtagaattaaaatgggattagatccaccacctggctgtaacattgcaacactgacggtctccaaggaaaagctcgaagttgttcgtcaccatattgtggaactgaattcgactttatcttctggatggaaagcagcgaggaaagttcatgtcactccccaagttcctctaaatggttcactttcgcgtcaaagtttggcttacatgcaggctgctgctcgctaccttaagcaggtctcaaaagccgttaaaaaggaaattgttacatctcacactggaccacaaacttatgaagcagtacaaggtatttcattgtactttggacataactctttgtcttattttcgtcatcagtatttgattctttctgttttcagaaacatattcatgttcattgaggttaaagagctctcctgaagaggatcaaattaagacgcaacctggatctggcgaaacgtttattttgtatgtaccttgtttattgacatgatctgtaatgagcattcgttctattcctttcttttgtggatcttagtattcttttctcttggagcttaccagatagtcttggtg

SEQ ID NO: 14743 - DNA, 540 bp, Arabidopsis thaliana
gagctccaactgttcaacaaataagaaacaaacatgggactagagaggtgatagtggacaacgggattattagtgtcagtttctcgagtccccaaggacttataactggcatcaaatacaaaggagtcaataatgttctccatccacatcaacgagctcgagaatactttgtaccggagccatacaagaacacaatgaaccctttatatctaatccacacggacaagtttaggcagtacggattatggcaacgatacacagagttatatccaactcatgatctcgtctacacagttggagttagtaactatagccaagactggttctacgcccaagtcacaaggttagaagttacatgaaaaccaaaaagtttgaaactttcagtgaattcttgaattaacattaacttcgattcgcttcttctgcaggaaaaccggtgatttaacgtacgtaccaacaatatggcagatcgtgtttcatcttccatacgtaaactcgcgaggcagctacacattgcaggtagctttagcctcggctgca

SEQ ID NO: 14744 - DNA, 418 bp, Arabidopsis thaliana
ctcaagatgttgtgtctctttctctgcattttacaacaactctgcagttccttgcaacacttgtgcttgcggatgaatgacatcgataccgacacttgcaatgctaacagtaacccgctcctcctccctcctgacgctctccttgttccgttcgataaccgaaccttaaaagctaaagcttgggctaaacaaaatcacatgccagtaccaaagaaacttccttgtccagataactgcggagtcagcattaactggcacgttagcacggattacaaaaatggttggaccgcaaggttaaccgtttttaattggagagatttcgcgtttgaggattggtttgtggcgattgatatgggaaaggcaggtccaggatatgaaaacgtttactcctttaatggaacacgtgttccaccaagca

SEQ ID NO: 14745 - DNA, 851 bp, Arabidopsis thaliana
gttttggattcccatcttgtgttaaaatcagtttattttgttgaggagtaaacaacggatctgattgttgttggtcagttaatggatgaaaatcgttgtgttgttcaactcgctgatcagtttcttgtggttcaggaccgcgtttcgaggatggtgattggtgcggtaggagagaggctggaacctacactacaagaaaacagtcaatttgcgaggaagggttgcgagggaaggcattcctcgcagtttttgagagggtattgcgagaaaggtgctacgtaccgcacgcgcgtagaagttccgtcgcaaaacttgcgagggaagacttcctcgcaaatttgcgagggaagtacgatggtttcgcaagaaagatattatccgtcgcaaatcccaagcagatacgtcgcaaatctttaccctaaaccctaaaatacataaaagtgtattgcaatctttgattttcatttatagatatgaattcaagtagattatatggtttgaacaaaaaaatattgtattggtttcaatattaacatttcattttgaaaatgttaaacattcatgattcatatttaatgaaaaccataagatcatcattgatgtatttggggaaaaaacacattcgaattatatgatgataaaataggttcaaatgaagataattaacgttctaatgatttaaaaaaatgaatccaaatgattttgaatagtgattgttgtatttttcaaaattgattatacattgcgaggaatttgcgaggtgtttgctagtacgcgtacagttccctcgcaatatttacactaaaccctaaaatatttagaatttttagtcatgttcttattttgctgag

SEQ ID NO: 14746 - DNA, 253 bp, Arabidopsis thaliana
tgtatacccccaatctattagggtaaatagatttttgtagatcatgttaataatttaagacgatgaaagcatcgtaaaatgatctgttttcgaagcagcaatctgtgtaatcattcgataaaattattttgacactggcgtctagcctgctctcaaacgtattcttgaatctgcaaatagtagactcaagacagaacaagctaacgcacgagcaccaactcactattactgtccaattcttaaggtaaatcga

SEQ ID NO: 14747 - DNA, 680 bp, Arabidopsis thaliana
gtgtatcagttgatctctaatgttttggaagatatttagggttatatgcgttcttgtctatgcttcaggaatatctgaaagaagaaccatacacggctgaggagattgagaaaatcctagaggagaaattaccatcaatcgtgaacaatgatccaacatctttggctgtactcaatgctgccacgcatttcaaattgcatcaggtaaagtgtacaactctgtggaatattgtgttttttcttaccctgactcttaataataatggtctgctgcttacggtcatcaacagagagctgcacacgtttattccgaagcccggagggttcatggtttcaaggacacagttaattcaaacttaaggtgagaccgattttcgacatggaacttctgattaaatctttacaggaaccttgatacttttgaaatataaactgtgtgcagtgacgaagagaagttaaagaaacttggtgatctcatgaatgaaagccattacagctgcagtgtcctatacgagtgcaggtgcataaatttaagatccaatgttaagagtgaaactgtttaatgtgaaaaggattgattttgaatttggtgaaatcgtgcagttgcccgagctagaagaacttgttcaagtttgcaaggagaatggagcacttggagcaagactgaccggagctggatgg

SEQ ID NO: 14748 - DNA, 904 bp, Arabidopsis thaliana
tagacctccatccacggcaatgcatcttgaatcccgtcaaaatatcctctgtgatagagccatagatccaacccagctgcaatttcgagatacacaaacgttttttacaatggccagctactaaatcacaaataagaaggtgatttctacgattcagtattattacctcagttccccactcagtcttgtcttcataaccgcagcttatgacatggattgcctctttaaggagcactgcaggacttgatgacggaggaacaccaccttcttccatcaaagttgaggttacaaagatggatgattgcccaaatgttttctcaaagttcatttcagacatcaaatgctccttatcaccttctgctcctgccaaaaaacactatcagatccgcaagattccaacataaacgaaatctactgcaagaatggactgatattataaggttgttgggataatttacctccaagggctgctacgtcaccattcatgtcattcttggaaaatttcttattctttctccggcgcccaaagcaaggacaacaaccacagcttatcatctttggacgtttaggaccctttggtggttcataaccatacagagcttgtcgtttgaaaacacaaccagtaccaacgtaaactggaccttggattccatctagacctttcatattgatctgtagcaaacaagagtgtaagcaagagggtacattttcatttagaccagaagttggaaaaatatgaattgagtcttacatcaaagaagactgtgtttctgttggcgtaacgatcgtttgtgtcaatgccatcaaacctttgagggaactgaacatagcagaccttctttccaatctgaggatcatcaaaaaacacattgcttcctcacggccttgctgttgtttcatagtg

SEQ ID NO: 14749 - DNA, 944 bp, Arabidopsis thaliana
cttctacaagcagtgtttctcacccgtttgaaattattcattatgacatttggacatctccagttttaagttctagtggaatcaaatactatcttatttttattgatcaattttctcattatgtctgcgtatatcctcttcatcacgaaagcgatacatttgccaaatatcttcacttttctaactatgtgcagacacaatttcactgcaaaatcaaggctttagaatgtgacaatggtggagagtatgataaccgttctttcaaagaacaattggcattcgatgggactattttccacttctcatgtcagtacacctctcagcaaaatggtcgtgctgaaagaatgctgtaccatcaacaacctgatttgtacgtttctacttcaagcttctatgcctctcaggtattgggtggaagctctcaatgatgcagtccacactctcaatctattaccatcgtttgcaatcaacaatgatgttccacgtacaaagctgttcaagactccaccatcctatcatcatctcaaaacatttgggtgtttgtgttactccaacctactgccatcgacgccacataaactagctccacgctttattccatgcacatttattggttacccaactgatcattgaggattttgatgtctcgacatgattacaatgaaaatcatactctcttgccatgtcacatttgatgaagcttcctttccattttccacttcataaacaccatttgtaagttatgtttctcttcctattttaattccaccatcaccaatttctcattctcttaaccttcttcctccacaaaatattctatctacaatcctcctgctcctcaaattccaactccacctcctctccctcctcattccatgcaaactcgacgtaaaactggtattgttaaaccacatgttcgaatatgtcttcataatgacaccggg

SEQ ID NO: 14750 - DNA, 857 bp, Arabidopsis thaliana columbia
caccaagtgaagtcattgcaaaaatcatattgtagattcggatattttctctgaaatttctgcttagcgcatcatcaccggtaagaaggttgtttataagcgcaggcgaatctttaagaagtggtaacttaacatttccttttccacaacacagtgtaaacgtaggagatttgttttgctgcttcttatttatacgctcagcaaaccacatcaacgccccacagtagttgcacttgtatgttgcatcaccatgatcaaggtaagctttacatgtaaatagaaaatcattaggaaacccatagtaactcttaaatattatacatacttcttgtaatgtaaagaccgcattatacctgattttgttgcagtctcagccgaattggttgtatctttattcaatcgtggccttcctcttttctttggctgcggcaaattcgggtttgctgctgcttttgcagccgttttcttaagagtagcaatgaatttttcatgttctgcacatttggcgatatgaggcgttgtaggttctgtcgggtttgcattgttctggcagatgtcagatgatgggtcagcaactggaatagaaatagtagattcatcatcagtatcatcttcagttggactgagatagtagtgttgatcctcatctgttgcattggttgatgaactatcatagttgaaatcaggcatggattcatcatcagacatttcacaatgaaagtcattattgatggtggccgaactttgacctaataattcaaaacagaatgtgtaaagattagatgactaacattgtgtgattagacattataaattgcacttcataggtaccttgagtaataggagagtggaaggca

SEQ ID NO: 14751 - DNA, 575 bp, Arabidopsis thaliana
tgcacgtggcgcgattatgtcttgcgcctgtgcaacgggaacaacgtgttagttgacgttgtggtccctgcgaagaacacatgctagttagagaaatcaacaatcaaatagagtcaatttctgtccaaaaacaatacatttaccgtaaatttccctcttgatatgattctctctttttgggcctacccggtggcctccgtgttgctggaaagaacaggtggagggatgctattaattcaggcaaagcgaaaacgtcaccaacatcatgaacaggttttattgttctttggtaagacattctccagctttcaattgaatattcgggcgccatcagtccttgaattggaactccctctgccactgctgcagctattgcatgggggcaaggcaggtgaagcaaatcaaatgctctacaggaacaggtgcgttccattagcttgacgtggaagacactagatccttctcccctgaccttataatcgtacctatcgatccgatgcacagcaaatgtgactgacttttcaaagttttgatcacaacttgcgtcatctttggtaggagtgccgatgttttgg

SEQ ID NO: 14752 - DNA, 510 bp, Arabidopsis thaliana
gttcacgtccaaggaaaagaattggcctcaggatccattttaagaggctgccttcatttagtggatttggctggaagtgaaagagtagaaaaatccgaagctgtaggcgagagactcaaagaagctcaacacataaacaaatcgttgtctgcattaggagatgtcatttatgcacttgcactaaagagttcccacgttccctacagaaatagcaagcttacacaagttctgcaggactccttaggtaaacgaacacaaaaactaagttttggaagccattttatttccccgtgctttgttgtagcttcatctctcatctatgaaactatgtgcaggtggacaagcaaaaactttaatgtttgtacatattaatcctgaagttaatgcggtaggggagactatcagcacccttaagtttgcccaaagggttgcatgcattgagcttggagcagctcgatcaaacaaggaaaccggtgaaattcgagatcttaaggatgaggtacatatggc

SEQ ID NO: 14753 - DNA, 466 bp, Arabidopsis thaliana columbia
aagaggtatctgcaactctacctccttgatgttcttggcaaacataactctatacttatgtgccaatgctttcttgtgacggccaggaaatgaagggtgtggtttgtaaggaggaggaacaaagaccttttctttgtttttgacaacaactggtttcacagcagttggtgctgttattgggaagggtggtcgagtgaaatggtcgagtggttgctcgagtgactggtcaagtggctgctcgagttccttgtcagcttgatctttagtgagactgaaatcctccccatcatgatctacactgtcctcagtgactataacgcccccgaatcgctatatggccagacaagccaagggcaacccggaaaagccacattgatagctcacacggacaacccaacttaggttccaaacggatttagacccttagccgaattacccacatgaaccatccctcacgaacgcggtt

SEQ ID NO: 14754 - DNA, 1266 bp, Arabidopsis thaliana
tggcgctgaattcatcaaattttagagtagatgcaagcaccaacatgaatttataaattacaatgacgaaacctagctaatcgtctgtgttcatctaattgcattcactgagtttatatgtaagcaaaacataatcaactttttggttcttttctccgcaatctacgtagtatttgttctttgtttaataaagctttacgtttaacttacaaagaaaaaaaacgttaaaacaaagaaatttgtgtcaataagatttataattaaatgcgcatgtgtgtacacgagagatatgttaagcggagttccagaagtccatatatggtctccgctcataatcatcgccatgatttgctctttaagtcaaatttacgtccacaaataaaaatagattgaatattagttgtgattttgaatctgattttcttttaggctatgacgttttggtatgtaatcttttatatctgatctacagatccacagatttaaaatcccattgttcagtgtaatatactatttttttttgtcactcagtatattagatatatataaatacaatgcaatattttttggatcaagaaatatgaatatcgatattttttgaatatcagtttcttaacgacctttttacagaagtatagaaaattatataattgaaatcgaacaatatttattttacttttgtaataatttaatgggccaaaaaaacactaacattatcaagcacaggcccacaaagatgtccaaaatcatgaagcttggtatgataaaacccactatagaaagttatccttgtgcgattcgaatcggcacgaaacgcgaaacgccccactttgaacgctcctttatcattagattcgaatgtaaccttaaacgccgatattcccgcaaacgcctccaccatcatcgatccgtgacaaccattgtgtgcgtctcccacaacaaacgagagaatgtagtttttaccggagacggtacggatgatctgagcgattgcgctttctcttccggcaacaagctcgattgctgcgagacctgagggaaccttgaagtggcggttatcgatgtacttaaccggttttagagattcgacgatccatcccggaagcggtgagattaggtcttgtatcttcgccggaattaaaattccggtagagaagttgctgaatacgtgtggaccggtctcaaatcctgccgtttttcacaaggttccctggttgatttttacgtaaacaaattaaaagttaggggcgaaagagaaaataatat

SEQ ID NO: 14755 - DNA, 743 bp, Arabidopsis thaliana
ttgccaatatctctcttcatcacggtaagcaacggtgagctctctctgtatatgtgatatagttcgtctctccgttctattaacacttgacatagctttatctaaagccgcttggagttggtttatccggattcgggaattcaaattagatttatgtttcaactttgccatcgcctgtctgcaggtccttacttgatccggaaggtgttttctctgaccattgatcgccttattccaaccagctttgacatatgttttgaagtgtggcacctcaagaagtcgtttgtcaaaacgaaatggtcgcatctttcttgtttcagttttttcgagagataggaataatggtttgtgatcagatcctgtgaactcaagaaattccaactcagcaaaggggaataagaatgctccttcagagttgatgaacgctctatctaaacaacacttcaccgtatgagagtgacgctcccccacccatgagaatcggtctcctattgaacgaatatcctttaaatcacaagtgctaaccatatttctgaaacctctaaaagtccactcatctctctgcggtccccaatcttttcattgtttgataaaatctcattaaaatctcctatcaaaatccatggatcattgcgtgtttttgataaattttcaaagtgagtccataagctatgtctttcactttgacatggatgcccatcacacgagacaaatagaagtctatattattgatagagatatgt

SEQ ID NO: 14756 - DNA, 860 bp, Arabidopsis thaliana
atgtttccattgtttattgttctctgaaatatcctaatgcctaatgtctttaaatctcgaaagttaaatcgtttaatttatatgcatttttatttacaatctgataactcaaacaaaaaccatctttccgctttagctaagaacgagtctcggaaatctttaaagtatctttggtccttgtggatcgacctcgaatattctacttcggttagatatttcgggtaatcaatcaagttggcgccgttgccggggaccaattacgttacctaaggatttaggattagtttttagtctaaagcatttttatttactaatactgatattcatttccgtgttatctttggtgttttcaggtgtatgacccgtagcaaaggctcatcacatctagtaaactaccacgaggatatcgaaaggtttgaaagagagaacaagaaaaagaaacagttagcggttcagagagaagctgaaatggataatgttgtggatgatgatggaatccaatttgaaggagaacatcatggagtgtttcaagatccaccacctcctgatggaaatcttcctggtgatggtggaaacgctgtcaatgcagttgctgccaacgctgcccgtgtagctgctgctaatgctgctcgtgcagctgcgctgaatgctaggcctgcgcctgctcggcaaactctgagatatcccgaacattaaggtacctacaagaagactcgatctgatcgtcgtgaaacttccttgtcggaaagaagggaattggtcgagagacgtcgggagattgcatctacagctagcggctgcaactgtggcggcttcggcaaagggttttcaggggacatgtgttttttgtatctagatgc

SEQ ID NO: 14757 - DNA, 882 bp, Arabidopsis thaliana
ccggactggtatcacctgctccaagaacaacgcccgtgtaaccgcactccgtttgcctggatctggactttatggacctttaccagagaaaacatttgagaagcttgatgccctcaggatcattagccttagatccaaccaccttcaagggaacattccatctgtcattctttcacttccttttatccgatcactatactttcatgaaaacaacttttctggtactatccctcccgtcctttctcatcgcctcgttaatcttgatctctccgccaactcgctctcgggaaacattcccacgagtctacaaaaccttacccagctcactgatctcagcctgcaaaacaattctcttagtggtccaattcctaacctccctcctcgccttaaatacttgaatttgagcttcaataaccttaacgggtcagttccatcttctgtcaagtccttcccagcatcctcatttcaaggtaatagccttctatgcggtgctcctctgactccatgcccagaaaacaccactgcaccatctccttcaccgacaacaccaacagaaggtcctggtacaaccaatataggtcgtggtaccgccaaaaaagttctctccactggtgctattgtgggcattgcagttggaggttcggttctgttgtttatcattcttgccatcataaccctttgctgtgccaagaaaagagatggcgggcaagatagcaccgcagtgccaaaagctaaacccgggaggagtgacaacaaggctgaggagtttgggagtggggtgcaagaggcggagaagaacaagctggtcttctttgaaggaagttcatataactttgatcttgaggacttgctcagagcctcggctgaagttttagggaaagg

SEQ ID NO: 14758 - DNA, 771 bp, Arabidopsis thaliana
caagcctttgaggtttgtatcactaaatattcttctaacatcttttttcgttgtagtttcctcaacttgccaaatactatgcttcagaattgggtcaatgttgggtctatttctgcaacttgatcttcttaaacatatgactgttactagttaagggtccacatctggtgaagatgtcttcagaatcataatttaagttacataattttaggagtggtagatactaaattggatgtctatgtgttatactatctgcaaaacacagatagaaggtaggatcttattgataatttatcggactaggtaaactagaagattaagtgattagagaccctgagtttatgttgttagtttcgctgatctccattgttacatcaacactttaaacttgtaatgggtgcagggaatacgaatcaaaatggttgctgctggtgcagaacacactgctgcagttacagaagatggtgacctctatggatggggctggggaagatacggaaatttgggattaggtgaccggactgaccgcttagttcctgaaagagttacctctactggtgtaagctagaagactcttgttctataatttttgtttaagcacctgctacttgtttaaacttgcatttgaagttcagtatacgtgaaagaaatcgtgaatagctcaatatgcactgcactattctggattagctgtctatattgatggagtcacacgtatatgcagtctaatttcagttggtgggtgtcagggaagtgaccataaaactttta

SEQ ID NO: 14759 - DNA, 815 bp, Arabidopsis thaliana
ttttgaattttttttcagaatggtgagtattcagcaaaggtgtgtgctctatagtccagatgaattgctggatggcaggtgcaacaatttgagttaaatccccccccccttcttaaaccatgctgtccttagtattgtggggctgatgatttggtcgagactcatcttcttgctggatgttgttagcattaatagtaacatagtccttaggattctaaactgctttccctagaagttgttgaggatgcttcagagcagaggttgatgccaattgactctccacatacttgactttggaatttagagcttcaaacttgacatttagatcgttgtaagaacaatctatcttgttgtgtaatttagctatttcttgtcaaatgtcatagctccaatagcttgtccttgaatgatttgttgaataggttgcttaacttcaggatcttgtactgctggggcttgttgtggttgttgagtgaatcctgttagtggattctgctgttggtatcgtccattgaactgctgcttagggacagaaccttggttatattaaacaaatggtttagactgattctgttgtggtggatacacttgatcttgggggttagctacattagtgcttctgtaggagaggttcgggttgggtttgtagttgttgtagcccttgttgaaccctcccttgttctgaatatagtaaagctcttcagtttgatcattcccccttcttgcatttggaagtgctcttcatcagtgatgtagtgtatctgcttccactgagcaagcagaagcttttctaagctttcattcagggccttgat

SEQ ID NO: 14760 - DNA, 888 bp, Arabidopsis thaliana
tcggttctgaaactatatatatatatatatatatatatatataaatcatatagtaatctttttcataggaactgaaattgtttcaaagaaacaacatcgatagatttattaaaattgtttcgataaaatttattgagtttattagacaataaaagaaggaggacaagtacaccaatcttttagagttaaacgacatcaaaaaatgcgattaaataacataaatgcacctggtctatgaccaaagaaatacatttcagttcttatatatttgaaaatttatattttttttcttttattgtttatcatatggagggggtggtggagagttgtagatgatggaatatgaggaacaaacttgtaaacatatggtggggtggtggagaactatagataaatggaatacgaggagcagaattgtaaacatatggagggggtggtggagagctgtagatgaatggaacacgaggagcagaattgtaaacatatggaggaggtggtagagagctatagatgaatggaatacgaggagcagaattgtaaacatatggagggggttgtggagagctgtagatgaatggaatacgaggaacagactcgtaaacatatggaggtggtggtggagagctttagatatatggaacacgaggagcagaattgtaaacatatgaaggaggtggtggagagctatagatgaatggaatacgaggagcagaattgtaaacatatggagggggtggtggatagctgtagatgaatgaaatacgaggaacagacttgtaaacatatggaggttgttgttgagagctgtagataattagaacaggaggagcagtattgtaatcatatggatgttgtggtggagagctattgatgaatggaatacgagga

SEQ ID NO: 14761 - DNA, 901 bp, Arabidopsis thaliana
agagtctacacgtggacactctgagggcggtcttggctttagaacgttggaagaatttaatttagctcttttagctaaacagttgtggcgtcttatccgctttccaaactctctcttgagtagggtcttgaggggagatactttcgttatagtgatccattacatataggagcatctactcgtccgtcttttggatggagaagcatcatggctgccaaaccttttatctatcgggacttcggaggaccataggttctggaatgctaacccgtgtatgggaagatccatggattcccaccatcccagcgcggccagcgaagagcattcttgacataagagatccctactctatgtcaatgatttaattgaccaaaacataaatttatgaaaattggaccgtctccaaacactgatcgatcccgttgatattccacttatattagggattcgcccaagtcgtacctacttgagtgatggttttagctggtcttatactaaattcggtaactatactgttaagtcaggatattgggccgcgagagacctatcccgtcctacttgtaaacccccttttcagggacgaggtgtttcggcacttcaggcacaagtatgaaagcttaaaactatgcggaaacttatgcattttgcgtggcaactgtatctctagctgtctagccacttgtcaaaaattgacatatcgtcacataggtgcggttaaaggttgtccccattgcggagaagtagaagagacaatcaaccatctcttgtttcactgtctaccctcgagacagacttgggctttatcgcgtattccaccttagggaatattttccctagaaactctctcttctataattttgatttcattttttggcgtggcgaaaatttggagtggagagga

SEQ ID NO: 14762 - DNA, 590 bp, Arabidopsis thaliana
tattggaataaccttcaaaattacttgtaaaagtttgatagtaattttaacaaacgagagtaatgacacgacacaatgaagaaaatattaaaaaacccaacaatattattctttggagataaacatatatctaaattgcagcaacacaagttgatttgttgtgacccgaccgaccacacctactgcatttgtgtaattttggttttggctgagaccgtccatgctcccaaacagaaggtatcctctttttctcccgtctgccactaggtacacgagtagaaggtgggagacaaataacttcactaatagtttctagaatctcccaatattccatatcaccatttgggtgaatgctctctgaatatgcttgacgccacctgtaaattacagcgatgtaaactgagattaaaaccacataaacatagataaaaccataaaaagagatattaaaacatttaaaaacgcctgtaaagttgtgaagaatagagataaaacctgtaagtagaatgaaactcatcaacaaacatgttttcgttcagattgatatgtttagcagaagcaattccatgtgcgcaaggaaatttatcaat

SEQ ID NO: 14763 - DNA, 564 bp, Arabidopsis thaliana columbia
acaaacctataaaccaggctcatcaaatagttgttctggtaaaaatacctatggtggatatgtctattatctcgtatcaagttctagttaattacactagaactagcattaagagcaactaaagatgaagaatcctacagataaccttgcaagggagcgatctactaaattatatgaatccctactgagaaatcctaaccctaacaagcagactactcagacatgatggatgaaacaaacaacatgtatgaatacaaaatcataaacaaatcaatagcaaaaagagttagagaagatctcttcactcttattgaaatctttgatgaaacatggatgaatatcttatgaaagtgctttggaaaaagacttggttctagaaaacttgataaaaagcttgatacgtctaaacaatgacctttaaaactatatatatgacctaaaaaacgtgcagtgactaataatgaaaatagagaagcattcgagaacaaatttccaatttttcaaacttaaaagcgtaatggacgtctctaggccgcaactggtgtagctcgacaccaagagtgt

SEQ ID NO: 14764 - DNA, 804 bp, Arabidopsis thaliana
ctttcactcttagttatttactattttcttctccaatgcaaactatacacctaaaaatagactctacacaatttcagactatacaccaaaagaactggttttctatttaatcttctcatcagcagtacggttcagccaatcagactcgttctgtggcagctctttctcctcttctttcactcctctatcgataatcacgttgattctccacaacacaaacttactttcccatctcatgcctttgattgcatagagtctccaaagcaaacccttaacgagtttgtattcgcttgtactgtaccattccaattggtccttcacaatgatttcaacatctctgaaagctctcctcacaagcccaacttccattcctctttccacaagctctttcacagaatttatcatcttatatgcaatctcactaacgtcgtcaccgtaacctgggtcctctatcaagcgaactgctgcacagaagccacccgtaaacgcaaaaacccagcaactgttgtctaccaacacctctcttggtgggtctagccttgtgattatctcttggtaaaggctatccatcacaggatacaaaaacttttcatcatcaaaatccattgttaagcattggaagatataaaccgctctctgaaactctgttgtactcgatgctatataatcgcgtagatcgtaccatgtctcctcttggcagatcaacatctcatatgcaacatggttcaccacctcagctaggactttgaacatactgaaagagactccttcttcctttaagcaagtgataagcaatggttgcag

SEQ ID NO: 14765 - DNA, 1016 bp, Arabidopsis thaliana
gactatagaataattcatgcttcattgctacctgatatgatggtacacctcatgtaacaggggactacaatttccggtgtctcgaacaacataatcactagtagcaggcttgaaaaaatagaagagaaaatcaggaaaggatatagcagttcgacaaaacccccaaacagaagatatggcatctcagactaatgtccgaattgacatctgatcatgtatacataccgggggaggattagcctgattactctggcgagtttcaaatacagttgggctggagcttgaacctggccttgggatttgattaggatcaattcttgagggtccaggaacagtggcaccaggttggcccatggcagtgggtatgttggtcatcgactgatttggcaaaggacccatcccatatcttggtggttgcatttgaccaggaaagcctagaggtggggcaacctactaactttcaaatttgagaaccatcagaatctgccacacaaaggaaatacataaagtgaaaagattttgcttaacaataaaaaagggagccacaagctaaagcgctacattaattgttgcttaattaatcagataaaagaatcctgccaatgccagttcaaatctttcacggtcaaaatattccaaagatcggtcaactagtatggtcctatctgctgaatgaataaaaatacacatctacatgttttcatcattccatacataggattcacaaaagttacatagcaagaatatataccataaccgtatctcgacatacctgcgctgatggtggaccataaggcaagcctgataccgctggcctgccatgaggggctccaggaaaggttgctggtgggggcattgaaggagcagtaaacggagttaatggtggatttccggaaagagaatgtgaacctagtggctgcggaggagtccgagcgtaaggtgctgaaggaggcgcacatagggtcctgtggagttgtacagcacaccggggactgggttccctcggaaatcccctg

SEQ ID NO: 14766 - DNA, 1517 bp, Arabidopsis thaliana
cccataagagacggatttgcatcaggataaaagatggaaagtgcactcattgcagtgacaagagctcctactggatgtacatcattaggcatggactgtatcatatcctgtgaaaacattcagataaatcatctcacctcgaagatctagagaaagttaggaaagagtagaagaaactcaccaatactccttgtggcacagctgaattctgagaaatcgcaaactcccaatcagctagctgtctttgagaaggcagattcccataaactgcatgcaaaaacaaaaaaagcagtagtaaactagagcactaagggagacaaaattttaaagaaatacccacacaaaagcaagactatgagctatacaagatgatcaagatgatcataattaagcaacaacaatgagctatacaagatgatcaagacttacttaggagataagtaacctctgtataagtacttttctcagccaactcctcaactgggtatcccgataacgtaggattccctcatctccatcgatgtaagaaatcgaagatcgaacaggagccgtgttcaagtaacctggatcgtataacttaagccccttgtcttccttccccgtcactatctgcaagccaaacaacacgcaacaaagcaaattctcagctcaaaatcccacagtgataggaaaatggtcatttagaaaaagggttaaacctttttgaaatcaacggctttaacggtaccatcatctgagaccggaactttataattttttccggtgcgttcgtcgacgatcgtcagtgttcccttcaaagatccaagcggtgcgacactcgtatccgccgacgtgcaccatcgctcgatcgctggagaatcctgttttccttccgataaatgacctgagagaacagctaatcgagctcgaactctctctgatatctccattcaaccaaaatcaaaattcaaagaaggagagaagaagaagaaagggagcgaagaaattattagaaaccattcttactcttcgttaatataacacgtgtcttatcccctgcggtcaggagtattgaacagtatccacgtgtatgcgatctaacggatatcttgatatccaacggcgtaagccttattgacccaacttggactaacggtgatgatcttctccatctctaagctgtcagaattatgtgggacccacttatcagtattatctagttagtcaattgctttcctcgatttgctaaatatcaattagattcgtacgcaatgctgaatgggccgaattgtcttaatatgggcttctgtatattcatctttaggcccaacagtataccactttttatttgggccttttttgttgatacggctcgctttaccatcggaaccaacccaacattcatttttcgaactatgactgaaatcttattaaaaaaatgaatgtaaagctaaatatggatgttgcgttcaaaataaaactcatgagtttatggatgttcttcataaattatagttatcattaatcaaaagatggaa

SEQ ID NO: 14767 - DNA, 517 bp, Arabidopsis thaliana columbia
ttctgttgaagtagctggagctcggacgcgagttctatcgggtaaagccaatgattagaggcattgggggcgcaaccctcgacctattctcaaactttaaataggtaggacgtgtcggctgctttgttgacgccgtagcacggtatcatgacagtgctgcaagataccttctatttcatcttctaagacacacctccaatagattttatctttgtagagagtgtagaggcttctttcttttgaagaacttctttgaagcgatttatgtctttgaagaacttctttcttttgtaccctgacaaattcagaggctcttcaccacatgccaagtagttgacataatcagcgtaccacggaagtttctcctccattgcaagcatctcatcccaaaactggctgcttttgaattttttgttcacttctcggatggccataagctgttcctcaggcttggtgtcgtcaatagggactgcatcttcaattttcattcgcgataagtgatcagctacaccttttt

SEQ ID NO: 14768 - DNA, 661 bp, Arabidopsis thaliana
  unsure (1)..(661): unsure at all n locations
acaaacgcgccatctattacatcgatctgcccatattgcagaaagatcatggagacgcgatctttgagtggaatgggattaaggggaagccaggtcattttattacacctcaatcacagtggagccaaagatagcaagccacatcccatcgatttagctggcccaataccttgctgtacaagatctattannactggcgcgtcgttgatggtgagcacaccttcaaagcaaaccgtttggatctttccacttttaccatcaccagaaaaatactgtggccgttccgatatgggatgcacatcttcaacgcgcgccgcattgcccaatttacgttgcaaccacgcgatttgttctgcttcttttattaacggaacccgacagcgtttaatattccctttactgtccaggcgcttttgattgtcgagaatagttttgatcggatttgcccgaagccgaaaatagagtggaacaccaacctgaagttgaaattcaacctgtttagttttaatgactgtcgcaacggcagttgaaacaggcatttgcgctgactgcaataaaacatgacagccttctggtgtgtttcgcttctcaacatgaaaaagaaaatcacgagcagcatccggtctgtttggaaataaatgccataatccctggtgaagtt

SEQ ID NO: 14769 - DNA, 553 bp, Arabidopsis thaliana
cccctcgccccacttgggagggaagtctcaagcctatctttgtacatatctttaattttccttattgtttttgatgcatcttgttagtgttttcaggagataagtatgaagagctgagggaaaaagattctggctttgaaggagcaacaatatactcgaccacagagcaatcaaaatcgacattgttctggctttcaccctaggaaatcactcgaccacaccctacagggaccgaatgacgatgtggtcgagtatagcaaatgatgcagtcacaacttctccatgtcagtaattcactcgaccgcggtgctggccgcagcagaagaagagaggtcgagtatcatcagagcggtgctggccgcgacgaaggagcagaggtcgagtacccccagggggaagctgagacacaacagggagattcttcgatggcctgggagcaatcacaggcagctattgacgaccaactccgctccttcttccactgaggtatgcactcactccaccattgcaatataccatctcttgttcttattttgtttttgtgatgtgtttt

SEQ ID NO: 14770 - DNA, 926 bp, Arabidopsis thaliana columbia
tacaacaaaaatgacctaccatacattgaaacccactctcccatcaattacaactcaaccactctttcaatatatctcaactaatcaatcagttcacatttataacactaaaatgttcccacaataaaaattgtaacagttaatcttacatattaaacgctactactttttttctatggtttttgttaagttaaaagttgaaagttacttctaatttgcgaatatgtcaacggtgttttgagaaagtagcgtaattattaaaagattaacgtataattcgtaacttcttcaaaccaataataagtaaataaaaaacaatcataacgacttatgagtaaaggtttattgataaagaaggcatggaacattttataaacaagagagaacagaattcaatatagtgatcagagaagagagagcaaagggaaagggttaatcctcagcaatgggctctcacctttccaaacaactcgagcggcgaaaagccatctccacggagaagaaagccctcaccgatctcgagaaatcgtgcggctgcgagtttccggggtgtgattacatgccttccgatcgtaaaaactggatggccggcgttggaccttaaaagcttcacatcaacaagatcgtctggcctgggacgcacgactctgccaccaacaaaatcggtatccgattcgtgtctcgtccctttgctaagtgccaatctctctccatctataaccagctcgtggcgggtactcgagtccttgacattcgtgtccaagaagatcgccgtgtatgccacggtatcctcaagacttatagtgtcgacgttgtcttggccgatctcaaacggtttctatccgaaacagagtcggagattgtcattcttgagatcagaacagagtttggacacgaagacccaccggagtttgataagtacttgt

SEQ ID NO: 14771 - DNA, 876 bp, Arabidopsis thaliana
ttataagaagctgaagacatatactatttatagtggagaaacaactcaaaaagggtctaaaactacatatgtctatagatgtccaaagtgtgttttttaaaaacagcataacctataaacagcatatacatctgtgtgtcatttgtttacaaattgtttctttgttatcaaaaggaacacaacatttattttgttatcgtcttccccattttgacaagaactcacttaagattttgaagtcatggaaatggggaacgggacaggacccgggatgtcgggggcttttagtggaggcggcaacgagattttgggaatgggaggtggcggcggcataatgggaggcggtgatatttcacatatgagtcctgaagtaaaatggatatttgagatggcttggtatggtgaaactgtaagatatgatgggttaatttgtgaggagcatccccctaagctctcttcagatggtatttgggagaaacttattattaaatcggcaggtctatatttttggcaatatcgtcttccgaagctcgagattgtcatcttgctcgtcttctttctatggcaaggctttaatatcttgtttaagaaattgggtctttctattcccaagttatcctctatgatgcttgtgagctcttcttcttcttgtttgtcttttttttttcttcaaaacttgtgtgtttgctgctgagaaaatcgatgttgcattgcaggcagggctactcttgaatgttctagttactttatcgggagagaactcgatcattgcggatatcttggtcacgaaaaacagaatcgacgtagcaggatgccttggatcatttggattcttgattttctggttcctcaaaggtgtaagaatggacgtcaaga

SEQ ID NO: 14772 - DNA, 792 bp, Arabidopsis thaliana
gaggtttatcaagataaaatacatctgaaacaaaagaaagaaaaagtcgtcaagcagcccaacttttttgcaaaatgtggtgaggttaagagtgcttattcttctaagcaaccaatgttattgttagttgataaatgtgcattttacatgttttgagcatccatttgttatcactattgcatcatatcaccactgtttcataccatttctcatcatttgtcatcactttgcatgtttaggatagttttgcatgcatgttgcatatttgtgttaatttcaggtgatttcgagctgttgacgagctaactagaagaagcggacttgatcatgtgaaaccactcgaccgcctggtcgagtagatgcttcacaacctcaacagatcactcgacccctggtcgagtagaagacttcatcacttcacgtcaccactcgacccctggtcgagtaccaccaagacaaccactcgatcacatcactcgaccccctggtcgagtatcatcacgtccaccacatcaccttcactcgatcaccctactgcaccacatggtcgagtaccttcatcaccttcactcgatcactctaccaccaagccgagtaccaccatctctatcactcgactacatactcgactgccagcttcatagtcttccccattccacattcaaccagacacttgagcgcaaggaagaaaaggaagaaaagaagagtacagttattaatccgtcccaatactgtgtcgttctgagtattagggtttcagaatatttcactataagtagcatgtactttaca

SEQ ID NO: 14773 - DNA, 666 bp, Arabidopsis thaliana
cttcaggaaaatgagactaatgatgtagtggtttaatggtaagtgaatgtgttgttgcagcaacatatattacataaatgataatctggacaagaggacatggacatacatatttggagcatgttgtgcaaccacagtctttattccttccttccacaactacaggatctggtcttttcttggactcttgatgaccacttacactgcttggtacctcaccattgcctctatcctccatggacaggtaactagttctttctttaatctaattagtttcaacgagttaaagattagaatagctggtgatgttgtggcttaaggggactcaaaaacatcaacaaagttgtctttttgcttatgtcttttggcacttgtgtttcaagcaacatgtggtttgggaccactttacccaaacccataacattggtgtgtcagacttagtttaatgcataaatgttatatacttgtagagttgtagataattgaattttcttatagaaggagaataatgtaatgtaccaatgttggaataataaaaataggtagaaggagtgaagcattcaggaccaagcaagctggttttatactcacaggggcccaaacattctttcacattcggtggacatgctgttactgtgtatgttcctttttttacccttttacccc

SEQ ID NO: 14774 - DNA, 856 bp, Arabidopsis thaliana
tctgggcccaaattccagttgatcagaaagcaatttgcattaagaataactaatccagaagggatatataaatcaaactcaaccgcctagcaaaccaaggattttaagctactctaacccatcctcagaaacatagtcactactccgacttcattacagataaaataaacgatgacatgtatgaaaacatcataacaacagagtaataacaagatgataacaggatgaacaacttagtaaacgaaatgaaaagaaaatattgaatagattaacagaaatctggattacaaaatgtcaagaacacaaactgctgcagaataaaacttagtctcgagaataaaagatacatcctacatatagcaaaatattccaaaaccctaatattcaaaacggcagagtattgggatggattaagaacagtagtcgaccctagtacttgagtgatgggtcgagtgatgagctggagccttcatctcgtccttatgctcgaatgtctgggttagtgcggaatagagacgactctaaagctggcagtcgagtatcaagtcgagtggtggatgatggtagaactcgacttggtggtagagtgagaaagagagtgagagtgaatggtggtactcgaccctggggtcagtggcagtgatcgagtgcatggcgaaaagtggagatggtgttactcgaccaggcggtcgagtggatggtgagaaagtgtgatgactgctactcgaccaaggggtcgtggtgggtcagaatgtagtggtcgagtggatagctgcgaaggtcgtgaccgagtacttcaggaaagccaagatgacactactcgacctcgtggtcgagtatgttgattggttcagat

SEQ ID NO: 14775 - DNA, 733 bp, Arabidopsis thaliana
gaggatcccctccagtgcttaacaacgccgcttgaggatgacgagtttgtgattcatgtgatggagaatcttctcccagagataagaataaggctaaacccaccaagagacttgttggtagataacagttgctgggttttggcgtttactggtgcattctgtgcgaccatacacttgagagaatttccaagccaagctgaatccgttaaggagattgcaaataagatgatagattctgtgagagagcttgtggaaataggaattgaagttgggcttgtgaggagagctttcagagatcttgaaaacattgtcaagaaacaaatggaatggtacgaaacgatcgagtacaaattcgttaagggtctgctatgggaactccatgcaatcaaaggcatgaaatgggaaagtaagatcgtgttgtggagaatcaatgtgattgtggagagaggagtgaatgagaaggttaaagacctcccaaaggataagtttgattggctgaacctacctgaggctgagggatttgaacagtctgaaaatctgcttgcagactcagggttattaatacatagtttgcagttgtataaagtattaacgttgtatagaataacaattattggtcttggttctttggtaggggcttaggtccttctgattttgtttagactaccactaatcataaacccacaattgttagaatagaagtttcttacaaggcatgcagatatcctttaca

SEQ ID NO: 14776 - DNA, 552 bp, Arabidopsis thaliana
tagtaacgtccgccagtgtgctctaaaggggaagaagatgaagcagttaacgtcatgaccagaccttcttgatgatgggcaccggaagtggcgcgaaacaggtaaacggcgagcattctacccgtggaaataaaaaattaacagttgcgatttctcccctggcaggctttttctgcgccgtcgttgccggagcacaatggaacattaataattagtatgttgtaactaaagtcggattttttttaaaaattacaggccatcaagaccgcgaatcggtttaatggttgaccaggcccgacaagacggacaatgccagtagagggtgtatgcggtaaaaccacatttctggcaacgataacgaggcttactacgtaccttctcgccaaccatgtcacgcagcaccatcaggctctctttggcacgccttcttccgcttcatttaagtggtaatccattaacttatggaacacacgcatggtcggatgacgctgaagctggcgcgtaatatagacctgtgcggcctcactaccgtcgcgcgcttcgatgatatca

SEQ ID NO: 14777 - DNA, 630 bp, Arabidopsis thaliana
agtaacgtccgccagtgtgctctaaagacctccacgcggcccagcagataatgatgatgctggtggacatggctgatgatgcggcacatatcgttcagctccggtggtacgttgttaaactgacctttgctgtcgatgtttaacacccagctttggttattcagacgtactcgtacccggcaatcttccacaaggaagcctgggttgctgctgttatcaaagtcttgcgccaggctgaagacggtgattttgtctttgtacggtttaccgttccacggacagaactgagcgcagttgccgcattcgttacagtaagcgtcgaggtgcagcgtctggaaacggttctggaagcctgggaccgcaatggagacgttggcgcggttcgggcagacatccacacacttgctgcaaacgtagttacattcgaggcagcgagcggcttcctgggcgacaaacgcgtcacgatcgtcactgttcaccagcgtgatagagatatcgcctttacgttgatagatttccgctggattgacgttgtccagtatttatcgttctggtgggacggatattttcccgctaaggatggcatcggtcgccgacgcgcggttccgacagcagcgacaatggaggatg

SEQ ID NO: 14778 - DNA, 449 bp, Arabidopsis thaliana
gctccccttccttactagatctcgacaactatttaaaaccaaaatttgtttgacaaactaaaatacaattgccatcccgtaaaatatttattttaattatatatttccctcccccgtgtacggggtttttttacccgaccggtttggcggaaccctttggaaggaccctacttaataacaattgtaaattatccaataaaaatattttatagatacatatcccccacaaccctttatatatcctgattttccctaactaaattgtctctgcggtgtaccgtgggttatagtgtagtctatcaatgtattttcaaccattaatttctgtctaagttccatatcaagtgtttacggttttcacgcgcatctattacgaaaagaccttcctctgagtggatatgtggaagtacgctatgatgatccagagaaacgtgtggtttgtgaaccat

SEQ ID NO: 14779 - DNA, 953 bp, Arabidopsis thaliana
aacgctccctgcaaccaataccttggtacagggccatgaatctctggaattagtggttcagacattccgtcgaacaccttttgggcgcggaaatgtctgggcttaaattccagttgatcagaaagcaataggcattaagaacaactaatccagaagggatctatcaatcgatactcaatcacctagcatactgagaattctacactactctagcccatcctcagaaaccaattcactactcagacatcatagtagaaagcataaacgttgaacaggttggaaacatgataacaacagtgtaacagcaggatgataacaggatgaacaacagtaaacgaaatcaagaacaaatactgaatactgaatactgaatagataaaaagaaatccggattacaaaaggtcaagaacacagtgtctgcggaataaaattagaaaaaaaacttgtttgcgaaaatgtgaagtacatgctacttatagccaaatattccgaaaccctaatacttaaaacgacgaagtattgggacaaattaagaactatactcgacccaaacaaggaaaatgagaactctaaaagccctactcaatcattgataaaccaacatgtaacaaatttaagaactaaaatgcaatcaacaggtgacacaaataacaggtaaataaaaatgcaatcagggggtaaatacaaataaatctaagaagaatagaagtcctaaggatggattcattgataagggcaactctaaggttcatcagatggctaaccaggtggaagggcataaaccctagacgatagattcaaaaactggttcaatccactctcgtgatagagaccccataaccctaccacttcctaatctcaactctcgttgatgaaacatagcagagcagggtttaagcaacaatctagcaaagccaataaatagactagccaatctcttggtcaagtctaca

SEQ ID NO: 14780 - DNA, 563 bp, Arabidopsis thaliana
  unsure (1)..(563): unsure at all n locations
nnnnnnnnnnnnnnnnnnnnnnctaaaggtgcgccatattccgatgggtgtaccgctacagaccgaaatgcacgcgtatatggagatcctgaaaaaatatccaccacgcgcgcagattaaatctgactaagccggcgctatcgctgagatctgcctttgccggatgcgatgctgacgcatcttatccagcctacagaacgctgcaatttattgaatttgcacgatcatgtaggccggataaggcgtttacgcgcgatccggcaatcaaccgcaggcggccgtccgatttctacttactcaccaccagcaaatgcgcatgcataatgtcgctggccgggcgaccgtgcgccacataatcagccattgctttaagatatggcggtagatggcggaaataacgctgatacccggcacacaaataattcagtcccggtttgccgctggcatcgagcatgaagcggtgtttcgggcagcctcccagcacgcttttaacacgttacaactgcgacactgcgccggtaactgcttaaatttatcttcatcaaacgcctgctgttgcgggg

SEQ ID NO: 14781 - DNA, 632 bp, Arabidopsis thaliana
cctatggagactggccaacgacgtggtggcagcagttttgtgttcttttgaagagaggccttaagcaaaggcgtcacgattctttctctggcatgaaagttgctcagatattcatcgtctctttcctctgtggtcttctttggtggcaaacgaaaatttctcgattacaagatcaggtattttagctttaactacacacttttgtctacatcattgtctatatccatgaggtgaccatacttgtggtttattgttgcagatagggctgttgttctttatctcatccttttgggcattcttccctctcttccaacaaatcttcacatttcctcaagagcgagcaatgctccagaaagaacgttcttcggggatgtacaggctctcgccttacttcctgtcccgagtagtcggggatctaccaatggagcttatattaccaacttgttttcttgtcatcacatattggatggccggtctaaaccataacctcgcaaacttttttgtgacccttttggtactcctcgtccatgtccttgtctcgtgtgggctagggctagcaataggtgccctagttatggaccagaagtcagccacaacactcgggtcagtcataatgctcacgtttttgttag

SEQ ID NO: 14782 - DNA, 472 bp, Arabidopsis thaliana
taatctctctttcttcttcatctctctttctctttctctcttcatggctacaaggattccattcacagaatcacaatgggaagaacttgaaaaccaagctcttgtgttcaagtacttagctgcaaatatgcctgttccacctcatcttctcttcctcatcaaaagaccctttctcttctcttcttcttcttcttcatcttcttcttcaagcttcttctctcccactctttctccacactgtaagcacactttatcttctttgctttgtgctctatgatggttatccttagggtttggtgataatgtaaacgaatttgactcttttttttcagttgggtggaatgtgtatgagatgggaatgggaagaaagatagatgcagagccaggaagatgtagaagaactgatggcaagaaatggagatgctctaaagaagcttaccctgactctaagtactgtgagagacatatgcat

SEQ ID NO: 14783 - DNA, 497 bp, Arabidopsis thaliana
aggatgacgattccaagagatggtggactgttgcattgtgtgacgagtttgacataattaaagaggagtcgaatgagatgaagaaggacctggacgcagccaacaagcacgtcgagccttaggcggaaaagaactttcttatgggaaagaaatttgaaacgctagagaagaagtatgagagcttgaacaagtataagtgagcttagctaaatttggttttttcagtttggacttccttgtactgtcaattttaaataagtcagccagtcttgcgataactcagccatcacgtactaataactcaaccaacatcgaatttaaatacgataactcaaccattacgttagaataactcagccatcacacacgaataactcaaccaaacatcaagttaatctacggtaagtccgccttaacgttagaataactcaaccatcacacacgaataactcaaccaaacatcaagttaatctacaataatctgaaagagagacaga

SEQ ID NO: 14784 - DNA, 475 bp, Arabidopsis thaliana columbia
aaactaggaagctctatgcaacatacaatgctcttttagaaatcaaagatttgatgcttaaggagacatcattattgaattccataggttcacaggtaaaatacaggcattattattttgttgattttctataactagcatcatctgctttgtactgttctccacgttgtacctttagttgtcatgtacttatatcgttgagaatagcttatgttcattactaagttgatttacgtctctgctttccccttttagtatatctcttggtgagtcaaagtttcaccataattccgttgacttgattgtagtttcaagacgtgattggtactcctgctggccgtgtgaagcttattgattcaatggaaggagtcatgaaaggaatccaacaggtaatctgagttatattgaatcaggtatttgaggcacaaagcatgaactaacccatcttacctatctatagctgtatgatttgtca

SEQ ID NO: 14785 - DNA, 530 bp, Arabidopsis thaliana
gactcatccccaaagaccaatgcagatcgtgtcaaaaaagtaacattatatttttgtaaacaatatagccccgcggtgtacccgatctaaattctagttgctatatatagatttagcaatcgattttctaattttttttgtcacctatacaaagacatattgatatgaacgcatgtacaattctttaagaaaaatatttataaaagaaatcaaattacacggcgatcttagctagtgtcttcaacattacacagtatacgaaacaatacactatatatattagttattaattaatggttacaaggacataacaacatcaaacccaacatacatactgcataaagatggtaatgttaaaaaaaataaaatatgctatttgtcaatatgatcggcatacaattaaaaagattcaaatatttatgtatttgtgtgatagacctaatattaagagaccgttaatttggccatgcaaacggctgattcgatgacggtgctggctggtagtaaaacggagctgccggatgctgcac

SEQ ID NO: 14786 - DNA, 768 bp, Arabidopsis thaliana
gttcttaattgctttatctccacaagcagattcagccgctctttatgtgatctgggatcaatcatcaagctcatgcccaagtctgttgctaggagactaggcatgactcactacaggcctactaccatcactctgctcttcgcggatcgttccaagcgaatccctgaaggtatccttgaagatgttcctgttaaggttggtaactccataatcccttctgatttcgtggtcctggactatgagaaggaacccaaggatccccttatccttggaagagcattcctagctacagctggtgctaagtttgatgtgaagagagggagaatctctctcaaggtttgtgattcagagatggagtttggcatggatggttcagagcttactaagcctatcagttgcattgcctccagcacacacacacctccctagactgatcagaatcccaccacagagccacacacaacgctccaaacccgttcagctcgccaatgagagttgtagaggaacggtgtcgatcgacaccactacccctgtcgatcgacaccctcgggtttcacagacagaggattctgcacattctcttcagcccacaccaattgaggacctatgtgataagttctcatctttctcttctcctgttttatctttgattaattctttagattattcgaagactgcttcactagataacaagcctagagttcctcgaaagcttgtttctcttattgttcttgcaggtgacgagaagagtgtcgattaacacaccac

SEQ ID NO: 14787 - DNA, 569 bp, Arabidopsis thaliana
ccgagagtatgctgcaaccatccatcgctcggggattcgcggaagtctttgtgttggtggtctcttaacgccaatcctaggagctgcagggatacaattccgaaccgctgacgtgttcctcaagttcctcgacctcgattatctcaaggggaaggatattcttgacaagataactccggcggatcactacctcttcaagttcaaccatccggagcttggaccttctttgttacccctaccttgcgagaaccaaacttctattaagacaaggcgtaacatcaacttcatgtcatctccctctgccctgaacatcgacatcggaagagctagagaagatgaaccagagtatactcaagctgagtatgagcaacaagagtattatcatgttgagtttgagcaacaagtcgaattcgagcaacatagcgaacaaccggagcaagagaccaacgaattcgagcaagctcactatgaagaagatgctgatcaaggaggagatgagatagctgaagttcacaagaagctcagtgtgcttgaagagcttgggaacttcacaacaaaacaatgaaagg

SEQ ID NO: 14788 - DNA, 583 bp, Arabidopsis thaliana
aatcaagagatgagtgacctagaggattctcagaacaagagcaaccacagttacggcgacgatgagagttcgtgagagacgaggtcggcggcgttaccgcggctagaacctaggcgcgtcataaccctaggcggaatggatccaatccgtcggccgtcggcagagccgacaagccgaagaaagaagaaagctcccagtcaaaagggaggcgcgccgataacgaacaatgatttggtggacctccggagagatgccaggttccggcggaggtgactgtaacgcccctgttctgtactagaactcgaccagtctggcatggcccggggacgtcacaatggaaatgagttcccatagagtagccgaggttcggaaacacattccgacccttagcccactcaaggttgcccatttccccacttgggatccatttaggcttgccaaccctcacttgacccaagtgttgtgtcgactcggactaagtcttatcagttgaaacccgtatactttaaaataaataccgatttcattaccaaagagttatgaaaatacaaggaaaaaccacaacataaacatcgtttttatg

SEQ ID NO: 14789 - DNA, 528 bp, Arabidopsis thaliana columbia
caagttcttcttcagcaccttcctctgtgataaagcatcccatctccatcctcatcatacattggaaactcatctactctcaaaacaccagaggcaatcaactgcttggcttcccatctctcaggagagctcatcttcttcaacggtctacgtgaaggcgcaacatcattctcctccacaatcctgatccctgaaatcccagtcttagtcacttgcccatccttagttctatacgacggattactcctggatgaatcatcttcatctgaaggcttcctcaaaggaatcaaatctctacctgtattctgatcaacatccctcatagaaagactatacttatcactcgaaatcgatataactttcacataaacctccatatctctcttcacaaactccttagccttatcaacccttctagtagccatctgagaaacatgaactaaaccttcttttcctctaaacttatcaaactgaacaaaacaacctgcatccataaccctagtaactctccctttatatacctgatac

SEQ ID NO: 14790 - DNA, 914 bp, Arabidopsis thaliana
tgcgacacgtcacagagcaaaacccctatgtgagacagacagatagaaagatatgtaaagccccagctgcaaaacctgtaaatggaagtaccaaaccattctctcttctcacttgaagcacttggcgtccaagagagcctcaccttcaaatggctctgcgtcttcaatcatctggctaacacgctccttctgggcttcatctgagatatcaaccttagtccactcatacagctccatgtcgtacacctcgtccattatgaactttgggatctctggtccacggaacagccataaacccttcaccttgaacggaccctctgacccacaaatcagcatctttccaaaggagtatttacgtgccaagtccatacgctgaaggaacccaccaaccttgttgagcgtgacaaatgacaccatgttctcatcgttgtacttgtagtcacagaaccatagtgagtatccctctgggtcatacatgtcccagaatcctgcatttgagccacaatattagacatgataaaaaacaattgattccaatagctaaataattccctgatagcaaagctgaaaaactaggtagaggaagatatcaccacacacctttaatagcaacctcgcggaagttagatttggtgtttgagtaaagcctcttccaatcatctagaaccatagggcttggtggtagcaagtcaagagggttcttggctttgggctttggtgcctcttcctcttcagcaagcttaggtgcctctgctactggggcttcctttttcttaggctcttctttgggctttgcaggctgggcagctttcttggaagcaataggagggacagcttcagtctgtttgacatcacccaacactttagtgaagtttggttggttaaccacagtccagaagtacctctcaacatga

SEQ ID NO: 14791 - DNA, 557 bp, Arabidopsis thaliana
tgttgagagatacttctggacaatggttaaccagccagaattcaagaaggtgttgggtgatgccaaacaaaccgaagctgtccctccagttcctactaagaaagctccacagcctgctaagcccaaggaggagcccaagaaggcagcccctgtagcagaggcaccaaagcctgctgaggaggaggaagcaccaaagcctaaagccaagaatcctcttgacttgctaccaccaagcccaatggttctcgatgactggaagaggctttactcgaacaccaaatccaacttccgtgaggttgctatcaaaggtatgttatatgatgacttctgttaattgttctttagaagaaattgttctaggtttatggaatcaacttgttaagaagaaagctacaaaaatccgagacaatgtgctgtgacatccttataataccagtgcttactaacgactctctaaacaattcacagctgctctagtctactaaattgcctcctaagctagatatagtagacttagaggggtaccactatggtttatgggacatgtatggcccaga

SEQ ID NO: 14792 - DNA, 545 bp, Arabidopsis thaliana
taccggggactctctagtaacgtgcgccagtgtgctctaaagactgatcgagtacatagttgcgaccatttgctaccatcgcgccccattcagcactcggttattgagcacccaggccaataaatcccaacgtggcggccattaaaatcgcgctaccgatatccagcgatgcctgcacgatcagcggcggtagggagttacgtaaaatatgccagttgatcagatgccaacgagacgcgccaaaggttttcgccgcctgaacataggtatactggcgtacaactaatgcttgcccccgcgccaggcgcacataaaagggaattcgcacaatagcaatagccagcatggcgttaaacaaactcggcccgagagcggcacgcagtgccattgtcagtaccaacgaaggaatcgacagcataatgtccatgatgcgcatgatgatggcgtctgcgcgtccaccaagcacaccggatagacatccgagtagcgaaccaatcatacccgcaatggcaaccacgactaatccggcgagaattgattgctga

SEQ ID NO: 14793 - DNA, 540 bp, Arabidopsis thaliana columbia
gagaatcttaagctgaatcttcaattgtacgacggacatggcttgaatctcttgacctacgacgagctcctttcttttgagctccatctcgaatcttctctacaacatgctcgagctcgcaaggtaaaataatactgttaatatacacactttatatagtctatacatttattaaaggttcttgtctcttgtttactaataatgtagtctgagttcatgcatcagcagcagcagcaacaaacagatcaaaagcttaagggaaaagaaaaggtgagttcttggctttggtatattttttccattaaatacatgttaattttatgtaattatcaaagcttaatttacatataaccattttatcaactgtttgtattattttaatctaataggaaatacttattgatgaataaactcaacatttatgtttcgtctgtatatgtgacttttacatgtaaaataagttaaatgtataaaatagctaactcatttttaatttctacttaattagggtcaaggaagctcttgggagcagctgatgtg

SEQ ID NO: 14794 - DNA, 528 bp, Arabidopsis thaliana columbia
tgttgttagctgtaagtgggtttatactattaagtatactacagatggctcgtagaaagatataaagctcgtcttgttactaaaggctttacacagcatgaaggagtcgattactttgataccttttctcttgtggctaaattggctagtgtgaagttgattcttggtttagcagcaaggtttggatggagtttaacacagatggacgtcactaatgctttcttgcatagtgatttagatgaagagatatacatgagtttgcctcagggttatacatcaccgactggttcaaatgttgaaagatttacacattgctatggattttctccgaagcttttttgtgacaacaagtcagccctgagtattgctggaaatcctgtttttcatgagatgatcaaacatgtggaaatagattgtcacacaactcgtgatcaagtgcagaatgggtttatgagtgttctacatgtatcttcgggtaatcaacttgcagatgtactgaccaagcccttgcatccgggtccattttat

SEQ ID NO: 14795 - DNA, 468 bp, Arabidopsis thaliana columbia
ctcgtatgaagttttttgaaacaagtcgttatcaaacacctaagaatagtgtaaacctgatgaaaatcccactcatctctcatcccaagggtgacttctgtttataacccctaaagcagctagccatgaatgcaaacttggaaacaatgataaatctgctctgtaatggatgaccaactacccaagacaagttctagagcctaaacaacgagtaggcaaaaaaaaatgaatgataatcaaagttccttattctagagagtagagcctacacaatgagttaaacaggcaaggaagaagtacacaagatatgctttttcagaaaatatggaaagtgcatagaacacaccgttcaaaaagcctctcgattgtttggaactgcttctcggatgagacgagagtttctctgacgctaatgagacttgtaacatacgatttaagagactcaaagtctctcctgacgcgactgag

SEQ ID NO: 14796 - DNA, 501 bp, Arabidopsis thaliana
tcatataacagttaatcatgttgtcaaatgcagattaaggcaaagaaaccttcttggaagattggttcatcatttgctctcaaaaagcctgtaacaaatctctttaagattgatctagatgacgacgtggatcttattgatgaagattctcttttaacagaggaggacttgatgaagccacagcttcctgttggtaattaaagacagccacatgatctttgttatccttatatcattccttgtgtttaagatatcttgcatcttttgcagccagcggttgtgagaccactaaaaaagcttgcaagaactgcgtctgtggtagagctgaaattgaggagaaagctgtgaagctgggcctcacagaggatcaaatcgagaatccacaatcatcatgcggcacgtaacgttctttacccatctctttctcagtatgcattggatttttggtccacaagactgaaaatttcttaacaattctttcagtgtgggctcggtgatgct

SEQ ID NO: 14797 - DNA, 785 bp, Arabidopsis thaliana
tataaaattcgtttaggttcctatattatcatatcatacggcactagatgtagtacttgccactctattttcttttttaactgattaattttgtaccttcgttcatagatctagtccgaaaatggtaatattaattcgggtagaatcggctgaattcttggtggaatgaatctgttgcagaaaaactgaaaatattattttgatataattattttaaagcgttatgccaaaattgactgaaaaattaatcaaactaacataactggtgggaaaaaaaatggaaacatgagtttaataaattcatcaggctagttgaacatggatggagcctcgagagagaatcccgggttagcagcagcgggaggtgcggtgcgtgatgggaacgagaactgggttggggtttttgctttgaatatcgaaatctgttcagcgccactagcagagttgtggggactctactatgggttacacatagtctgggagcaaggaataacacgccttgagctggaagtggattcgaagatcgtggttgggtttttacagacagggataccggattctcatcctctatctttcctactacgtttgtgttatggcttcatatcaagggactggttagtccgtatttctcacgtgtatagggaggtcaatcgtcttgcggacgggttagctaactatgcgttttctttacctcttggtttgtatgtttttaattcagttccggattctattgcttcttttgttttggaggatgtaatgggctgcgtttcaagactatcgaatgt

SEQ ID NO: 14798 - DNA, 640 bp, Arabidopsis thaliana
gatcaggagtagagaagaatcttttgagaagcgttgaggagagaaaagaagagtatgataaagctcgggctcgtatcttcaacagccctagcagttcagactctgaagattcttcaacacgagctcctcctcctccctatcctcgtctcgactcaaaacataatactgcatgtccgagtagaaatgagactgaagtggtggttaattataatagtaatcctgttgatgtagagaggaatggtgttatcagagactcagggcggacttctcgggttgccattattagagatagagagaaggatcgttatgatcctgattatgaccgtaacaggttaaactaatccctctgttgcctctaatatctgtacgccatggtttcttcatcaatattaacagttttgcggtgttgcaggtatgtgagggttgcgccaccggtacaaaacttcaatccgataccgattccgcttccgttccatgacgcaattttcccacagatgccaagaactcaagccagcctaaactatggacaccccttaaacccagctatgacggcaccttcttatacagagtaggctagtgcactatgacttatgcacaaacattgaatgcgtcagacgtacatcatttcaggttaacttca

SEQ ID NO: 14799 - DNA, 1035 bp, Arabidopsis thaliana
ttctctttagcaaacatttttcgttgattattctttggtagaatccacttttgatgtgagcttgataccatatatatatgatatgtgcgtttgttggtgtgtatttacatatttcaacacatacttttcccatgaactaaacaaccctcccctaagggaatgtagaattatcatggtcccgtaaaacatgtttctgttatggtcgggttcatgaaaacccctaaacataaattggtagtatagtatatatatatatataactaatttagccatctatactatatccaccggtgatcaatggagtgacttgcaaggttttgccgtgggtgattgttctttcaaagtcccaaatgcggtgtactacatacattgcttgatcactcattcatctaattgattcaaaacaagatattttccggtgaaattcactaagccaagtctttgctttaattacatttactgggcaccttattcttacgttagatttttacaaaattcttctgcttacaaaacaacattagcaacgattggattacacagaagaggaattaacgtttaatttggtcactaatcaactaattaataagttacaaaaaagatagatcattcagcatcaaccattaataaaaaaaagcttctaactttagaaactttcatggaggagatgaagtgtagtattgattattactctctctcaatccaacacttatcgcagcacaagccaaaggctgcgtcggaatcctaaaacagctcatagctccgccggaataaccggaacaatccggctgcggccgctgcgaattcctcccgggaatacaattcccaacgaaatcaaacccgaaactaaccctggaagaacattcagagctaaacccagagaagaaattgaacgcaacagtgagattaataagattcctcaacgaacaaaccaaatcaggaacctccccagagaatttattgtgagcgagattcaacatttcaatcgccgacaagcaagagatcgtatctggaacatgacccatcaatgcattgtag

SEQ ID NO: 14800 - DNA, 1306 bp, Arabidopsis thaliana
gcactgttagtgaagcccctatcttcgaccttgccatgtgttctctgtgacaacaccgtcttcggattcccgagactccagcgggtgattctagtcacgcaggattacgcatctgcgcctgttgagaaacgctccatctcagtcgccaggaaagggtggattcaactcgctagagatcgcctcaatcgcatcagcttcagcgattgtctcggtactaattgctcttgtaattctcttcttctacacaaggaaatggcatccgaaatcgaagatcatggccactacaaaacgagaagtcactatgttcatggatatcggagttccaataacctttgacaacgtggttagagccacaggaaacttcaacgcaagcaatctgattggaaatggtggatttggagcgacctacaaagcagaaatctctcaagatgtggttgtcgcaatcaaacgcctctcgatcggacggtttcagggagtccaacagttccacgcagaaatcaaaactcttggtagacttcgacacccgaacctcgtgactctcatcggttaccacgctagcgaaactgagatgttcttggtgtacaactatctcccaggaggcaacctcgagaaattcatccaagaaagatccacaagagattggagagttcttcataagatcgctctggacatagctcgagcactcgcttacctccacgaccaatgcgtcccacgggtgcttcaccgagatgttaaaccgagtaacatcctcctagatgatgactgcaatgcgtatttatcagatttcgggttagcgagattgcttgggacatcggaaacgcacgcaacaactggtgtggcgggtacgtttgggtatgtagctcccgagtacgcaatgacatgcagggtatcagacaaagcagatgtatacagctacggagtggtgcttctagagctgctttcggacaagaaagcacttgatccgtcatttgtgtcgtatggtaatggtttcaacatagtgcaatgggcttgtatgttgttgagacaaggaagggcaaaggagtttttcacagcgggattgtgggacgcaggtccgcatgatgatctagtagaggttctgcatttagcggttgtttgtacggtggattctctgtcgacgaggccgacgatgaagcaagttgtaagacggttgaagcagctacaacctccgtcgtgttagcacctccctccgcaggatttgattattattctttctttaaaaaaagttctctcagttgtaaacttgtatgtgtacgtagtagttgttagaagaagaaagagaggttga

SEQ ID NO: 14801 - DNA, 560 bp, Arabidopsis thaliana
tcacattacaaaaaaaaatgtaaaaaccaaacaagaatcgaacaataatccggattggatacttaccgctgtttttctcctcgcgtactccgtagccgcaagagcggagatgcacaaaaccgatattacatacccagcccacattctcaccataactcccaatcgaaagggttctcttagagcccaagaaagtaatgggacgataacaagatcgtaaagaccaaggaagagcaaaaaggagatgaccaagaaaatgccgtaagagcctggaggaatctcgaaaccctgaatgaaggtgtggcgatccatggtcttagcttgaaggactatgaaggagacttggcaagccgtgacaagtgacaagatgatccctgttgaccaaattggtatgacattgatgagagatttaagatcttctacttgttgcaccctacatagcttccatggattccttgagttccctgttagggctaggtcttgcttcgaattagttgtgacgcaagctttattcaaatacctatattagacaatatttatgcatcaggtttcgttacacaatc

SEQ ID NO: 14802 - DNA, 611 bp, Arabidopsis thaliana columbia
tccatcagccgtcaccaacgtaactacctccgccgtcaccggaaatctcagatcggatgctcaccgtctccggccacaaccaccgtaatcgccaccatcaacaaatcgatctacagatgtcatcgaacttttctctgtttgttttctcgtcacgcaacaaaaggattcaaaatcctcaaacctcgcgaagattttcagaattctccgtattcattgtttcacgaaagatctggtaaatcattcgacgagacgaagaagacgatcgtgttagatctagacgaaactcttgttcattcatcaatggagaaaccagaagtaccgtatgatttcgtcgtgaatcccaaaatcgacggtcagatcttaacgtttttcgtgatcaaacggccaggagtcgacgagtttttgaagaagatcggagaaaagtaccagatcgttgttttcacggcgggattgagagagtacgcgtcgttagtgctcgataaattggatccagagcggcgcgtgatatcgcgtacgttttacagagacgcgtgtacgaaattgatgggaggttagtgaaggatctagggtttgtgatgagagatttgaggcgcgtggtgattgttgatgat

SEQ ID NO: 14803 - DNA, 584 bp, Arabidopsis thaliana columbia
tgaagagacgagagtattactagaagacaatgattgggacactcttcttgagagagaccaggttttgtaaatttttaaatgtcttttctattttcaattatttcctccgttttactaacttgtctgatctctactgattcagctaaacatggaaagaggagcaggaagagtcttttcaggatttcaagaaggtcaaatcttctttgctccaacctataagtactctcagaactcagatgcttacgccggagaaatgaccaagtccaagaaaaaacgccgtactccggcttggtaataaatctaaaacactaaaccacattttttggtgtgttttgattcttaaaaagctctgtttttttttacgtagtgtgattgtttggatttggaatgtttgcaggtgtgataggattctatggaaaggagaaggaatagaacagctttcatatattcgcggcgaatcgcggttttcagatcatagaccagtttgcgcgatctttgcagtagaagttgatgtgaagagtctaaacaaaggtagattcaggaaaggttattcttgtgcggctgtaagattggttgaagatgtg

SEQ ID NO: 14804 - DNA, 451 bp, Arabidopsis thaliana
gtatggcactgcattcatgactcaagactaccattccttaaacttcttgaattctttccatgatcatatctttcaagaacttgtgagaatctggaataagcataaaggcatctacgagtggcatcttgagctctatctcattgatgtgcctagagaacatggctatgtacttttccaaaatctgcttcttgaaccttcctggaaagggaagtttgggtttatagggcggtggaatgaacactttccacttatcttcttcagcagctggtttctcatgaactggaacttgtgctcggttggcaggcagagtatcctggtcgagttcaactctctggtctttttctggagttaaatcctccccttcttgaacttcactgtcctcagtgactagtgtgtaatctaggatagatttccctttgagttgggagctatgtgctggtgctgaagtaga

SEQ ID NO: 14805 - DNA, 552 bp, Arabidopsis thaliana
aaagattagcgagaaaaagagacaaacaagatgatgatatttgatttatgtctaaatgtttgttctctcatatgcatgttctgagtgaactaaaccctccatatcccaaatctcctccagacaaatctccctggctctgttcctgtcacattcacaaaatcttcatgtcagaaatcacaataatctcccaaatcagaatggttaatattggcaaaagctttaatgtcacacctgcttcatcgtggagttgactatatcatctaaggaaccagcatctgcaaccatgaatccaccactctgtaacttctgttggcctacgacgaacccttctttcgggttactactactcaacagagccatagcatccgtggatggaccataaaagactccaggttgcacatttgtgtttgaatcgaagtccgtgtttctacagaaagctcggggatttgttgtatcaaggctggagaactcaatgtattggcagagtcacagaatggtatagagtagcttgatgacacattgttccattccaaggggtcgggtctagaatgc

SEQ ID NO: 14806 - DNA, 504 bp, Arabidopsis thaliana columbia
cctgctgagcttatcttagtgttttaacatggatcctttagttgaaactgttaaatcacgataacacacatcaataaggttcaacaaagcataagaaaataagtgcaacaagtttcgaagcaaataacaaactgtctcaaagaaacaaaaaatgtataaagagaaagaaaaactaagtgaaaacaagaagtaaagatagggagaatggctaatcctcatgctcaaagcctgaagtgggtattggagagcaacgacaacaatgagtaggggcaatacaaccagaacaagaaagtgtagctatcgcaatccaaacgctcttaaaactgtcaactacatgctgctgaaaggctgatggctccatcggaatgggtggatgagtaggaagctcgaaagtcaaggctgaagaagatgaccctaaacaaagaccccaacagggtcaactgactcatcgactgtctgtgttggtgcggatctcatggttgtgctctctatcgcgtagtgtgt

SEQ ID NO: 14807 - DNA, 850 bp, Arabidopsis thaliana
gttacatcacttttaaagttaaggatgtcaagtatgctctagatatcagtcaccttgataccattttcaggtttccaagtagagaggaaatccgccaagattatgacaaagacgagctactctctctttgggcaaaaatcgtcagtccaaagccctactcgtccactaagagcaagagttctgcgattcgaagtcccgtgataaggtacctccaccaatgcatcgccaacacactttttccgaagaagactactggatttgttgatgaaggagagctatgcatgctcgatcaagctttggttttcattttgagagagaccaaggatggaaggaagatggcggttgacagagcagacactttgctggatgttgttcttttggaccacctaatgagctatagagagtatgctacaaccatccatcgatcggagattcgcggaagtctttgtgttggtgttctcttaacaccaatcctaggagctgtggggatacatacacttgggaacccctgatgtgcaccccaagtatcttgaccttgattatctcaggggaaaggattatcttgacaagacgacttcggcagaacattacattttcaagttcaaccatccagagcttggacctttttgttactcctaccttgcgagaatcgaacattagttaggacaaggcacaacatcaatttcatgttatttccctctgccctgaacatcgacatcggaggagctagagaagatgaacaagagtatactcaagctgactatgagcatcaagagtactatcctactagtttgagcaacaggttgaattcgagtaacatggcgaaccaccggagcaagagaccaacgag

SEQ ID NO: 14808 - DNA, 539 bp, Arabidopsis thaliana
  unsure (1)..(539): unsure at all n locations
taaaaatattttataaatagatacaatttgcaaatttttatatatactaactttaaaaaataaattattcccgcggtgtaccgatntaaaaatctagtaatatacacaacctcaacaattttagatgtataagaaactagcaaaatctaatttgagtatatcaaagtgatgtaatatttgcaaaaacataaaattgtagtaaacttgatgatttagaaaaatagatatatcataatatatttttactttgtttattaataaataacaatatacactataactttcttcttgttatttaagaataactagaacaattacaataacaataactacagcttgggtctacatcattattgctcaagtctcgagccttggatcacaactgattgttcgagcaattttggatcctatcgaaaagtctgacatcatcctgttctgactgcttcgtttagcgatctctctcatcgatcttgtgaagtcgagtttagggttcaccttgtagtagaattgaaggcacacaaattcctttgtgccagcaa

SEQ ID NO: 14809 - DNA, 751 bp, Arabidopsis thaliana
ggatccccggatagagtacaaagctcaggaggataccattgggaagttaactaataagatggaagagttaaacagcaccattctggaccttcaagaaatgattaaaggctaccccagttttgaaattgagaattggtcaaaggaacgtggttcacaagaagaagactactctgctgatcaaaaggaagcttattttgaagaaaaatcaaatgagtactcatcctaccatatgtcaagggaggatgtagagtatgattcaggcactaagattcaaccactgaagatgaggacttctcagttcctcccttcaaccttttttctgactaagctttgtaagagtcaagcttagtgacttaaaataagctcacttgcgaggaagtcttatgtctatccatgtatataactttatattttccttgttatttttaatgtttttgttttacgtgtttcaggtttatttcattgaccatgaagaagtcaacggtcgagtaaactcaaaccaagtcaagtggtgatctccaccgttgatcgagtaacattaggtggagtgtcttgagtcgtgcgattgaatgacgaaataagagaagcctcatcaccatttgatcgagtaaattcatgaggtttattcaagtccgtttgatcaagcattttaaagaatggagcaacctccaccatctgatcaagtattacgcacttcaagggatactcgatcaattactcgagcgggaatgattcgacgaccaaggagtga

SEQ ID NO: 14810 - DNA, 723 bp, Arabidopsis thaliana
tgtttttttttcctttgtaagtaattgttctctctaatggcttatggcttggtttgtttcgtcctaaaccaggaacatcctctggtttaatccggtcagggtcttccttcttcattctttaacacaataacaaagattttttagatagcctgaatcgcgctgttgcctttactcaaatctgcaccattaaccgagccattcgagtgaaacgctgatggccttgagggctctagtctcaaagatagcggggaaggggaagtttcggtttcgtgtcttgtcgccattcctatgctaagctgagacataccgaccaactcgtccatgttcacacgttctttagcaaatccaggttttggttttaggacctgatgctgctgagaagaagtctcagcgtttaaggcatgttctgttccgtgaagtgacgcagggagccaaatcgtgtaagtcactggaaaacaaggaggaaagaagccacccgggactagcattggtgaaacaccatttgatggttctatagcttcttgagatttttcctgtcgtggcgccgtggctacgacctcttcagcttctgtggtattattgagtgagagctcaagtgaaggaaggtagcttttcttttcaggttccttgcttggagaggaaccgtttaaggtctgctcttcctgtgttggcgatgaatcggttactaaatgcggcaataacagaggagacattcaatacaag

SEQ ID NO: 14811 - DNA, 575 bp, Arabidopsis thaliana
cattgtcttgtgggagcttatccacaacaaattaccttttgaaggcatgtcaaatctccaagccgcttacgctgctgcattcaaggtttcattcttgattttcaagtgtttcaaccatttggttctccaaccggacaatgtttttctgattgttgtctgctttataatatttcgggttagaacgtgaggccaagcgcagacgatttaccaaaggatttagcaatgattgtaacatcttgctggaaagaggatccaaacgatcgaccaaacttcacagagattattcaaatgcttctacgttgcctctccacaatctcatcaactgagcttgttctccggccattaaacgtgttttctcgtcggaaaacacggtcttgccaccagaatcgccgggaacttgctcattgatgactgttagagacaaagatcagattcctaccgatgcaaactcggcgcagaatgaagttagaggaagcttcttcttcttctgctgctaatatttgatttattggttataaagtgaaacatgagagaatgtggtttgatatatcatatgtaatgtattaatttgaatg

SEQ ID NO: 14812 - DNA, 736 bp, Arabidopsis thaliana
gtagtatcatagtttggattggatatttagtgaatatagtacttctagttgatgttttgttagtccattgattgagaattactcgtgaacgtctgtaaatgatgtgctggttaagtgttgatttctagcttatgacgaaatagctttttgttggattttgcaggtgacacattcaccaaaaggaatggagacacttcggcatttcctctttgatgtgtgtggagtatctgcggattggaaaatggaagatctgatggaagaagagatcaaagtgattaacaaaaccgttgcatctgacgaacatgtcatttgcgccttgtcaggaggtgtagactctactgttgccgcaactcttgttcacaaggcaattggagataggcttcattgcatctttgttgataacgggctattaaggttagagaagaagcaatttttcaatttgatatgcacttttaatttgttttttctttaattgagaatggttccttttgtaggtataaggagcaagaacgtgtgatggatacctttgagagagacttgcatctacctgttacttgtgttgatgcatccgagcggtttttgagtgaacttaaaggcgttgtggatccgagacaaagagaaagataatcgggagggagttcacaacatttttgatcaatttgccaagagttagagaaaaagcatgggaagaaaccgcttttctagttcaagggactctgtaccctgatgtgattga

SEQ ID NO: 14813 - DNA, 509 bp, Arabidopsis thaliana
tctagtaacttccgccagtgtgctctaaagggttgtcctgcgtctcgtttgcagcaatcggtatgattttgtggttcgacgggcaaaccagcctcgcaatctggtgctttgcgatgatcgccgccatcctgccatacatcatgcttaaccttggtatcctgggtcgccgctacaaagtctttatgggtgatgcgggcagtacgctgattggttttaccgttatctggatcctgctcgaaacgacccagggcaaaacccatcccatcagcccggttaccgctttgtggataatcgccattccgctaatggatatggtggcgattatgtaccgtcgcctgcgtaaaggcatgagccattctctcctgaccgtcagcatattcaccatttgatcatgcgtgccgggtttacttcccgtcaggcgtttgtgctgattaccttgccgcagcactgctcgcttccattggcgtgctggcagaatattctcattttgtcccggagtgggtcatgct

SEQ ID NO: 14814 - DNA, 706 bp, Arabidopsis thaliana
atcatccccactatcgctattgctcccagctagtcccagaattcagtccaggtcatcttcttcttcatcatcttcatcttcatcttccgtctcatcatcatcatcgggatccgagtcatcatctgttggtctccttctaccaatctcatacatcctggccgaggaaaacatatcttcttggtcttccattgtgatcagcccaaggaacgaatctgttggttctgtggcaaagtcaagaagacaccggtctacaggtatagtggcaatgtctgagtagttgatcgcatcaagagtgcggaaagcagcaaacaagggatgtttcacacggcgtgtgtgaaccgctgacataacgtcctcgatgtttctcctcagcattgcgtatataacatctcccctagagttgaacgtaatagctgtctggtccagtgatggtacactccgaagaagtttgaaagtcctcatgtcccagatctctgagtttatgatcacctgtaataagtaacatgttgaaaagccaagaaacagtgagtaactttttatctatattgtagccgaggagttaatgtagaatatctgaagttgttgtgaaatggttctggagcagttagtgagggacttttataaagctgtcttcgactgtttaatggagtggattgttctagggtttggtcactagaataggtatgacaatttcatagctttggta

SEQ ID NO: 14815 - DNA, 568 bp, Arabidopsis thaliana
cataaccaatctaatgaactcccattcaatacgatcatacgctttgctcatatccttttttactgccatgtagcatcttttctttgcacctgaagtctttaggtagtgtagagcttcatgagtgataagaacattgtcatccgttgcggcttcaaaagatgaggaattggtaaggactggctcttcaagatgcataatcggcaggaaaatcgtaaacagagattgattaggtaagagaacattcgagatccgcctatcagcgctatccccaaagaaatcgtcctcgaacaaagggttaaaagggttaaaggaggggggttaagcatgattgagaaattcgccaaaagcagagtaaaaaggagatcttgagggagtagatgaaaataaggaaccagaggtcccgatgccggccagcaagagcttcgccgacgccagagtttatgagcaaggaaaggtcctcgattatcgggtcagagagaaaagtcgggaattctgaaaatatgattattatcaaccatgcatcttttcttctacgattaatccatgtcagtttggtagtatttacaga

SEQ ID NO: 14816 - DNA, 447 bp, Arabidopsis thaliana columbia
cctatctccctcaaacaggttgagtatcccatcacattctctctttactttataaatgacttgtgtgcttatccaggctaatcgtttttccctacttccttttagccgggtcctagaggatcacttgttcaatgctatattatgagaaaccgcagcaatcaaacctactatctatacctcgggttaaaccaaggtgaaactaacagatgcttcttcttttctctttgcatacctaatctctttctgaataacactcaaaggtttactttttctggtccagcagcagcttcaaatgatgatggaaagttccttcttgctgccaagaggtttcggaggccaacttgcactgactacatcatctccttaaactgcgatgatgtctctcgaggaagcaatacctatatcggaaagcttaggtacttagctacagattgaccccatggtttt

SEQ ID NO: 14817 - DNA, 369 bp, Arabidopsis thaliana columbia
tagtagcttccgccattgtgctctaaagttgattaaaaggatagcgagtggaatgagttgagttatgtaaagtccgtatcgggcagtgactatcgcttccttgatgcagggcgtgatgctttagcatacttgcccctggttgaatctgttaaatggacccctcatgttcaatcgtcgttatgtaacattgcttcctcttgttgtatcgcttgccgcctgtagcagcaagccaaaacctactgagactgatacgatccacggaacgccggctggggctttcctgcttgagccgcagcacaactgtgatgccagataggcggtgatttcgctaataattcgaatgcccagcagttcatcgactgaatggtg

SEQ ID NO: 14818 - DNA, 590 bp, Arabidopsis thaliana columbia
aaccatggtggctttgtaagagtgaaaattgactggaatttagatgatccgcttagatttcaaaggaatttccagtttgctgttgatgaaaacactgtgattaagtaccgtttcgagcgtctgaggaacttctgttccaagtgtggatctctgaaacatgatgtgaaggagtgtgttcttgcctttgatgatgaagacccttcggaaccgagtgatgatgacaatgaggatgatgacaatcagatggataacaaagacaacaacatgagtgacacagatacgcttcagacaatagacccagcgactctcattccgggtcttaacaaccctctcccaaatgcaaaccagggtcagaccactacccacactacggccttcgctgtcccaagcgttttcgaggacacggatcttactgttggaaggctccgttatcttcatgctaaactagcaagggtgagaactcagacaccggttaccaatgatcttctcttggaatcatctgacaatgcacagaaccccggttatcctcatgtagcgtacggggtccattttgaagacatgtttcaacaagtggaggcaacagatgagat

SEQ ID NO: 14819 - DNA, 590 bp, Arabidopsis thaliana
tatgcgtatgtatcttagtcggaccggagatgactaacgacgagtaacgatagagatttgtccggtctaacattccggttcggtccagctcaaaagaccaagatcaaagccaaaagtcctcggttattatagatgtagtagtatcacaaacaagaaactcagagaaaactgggagaattttatgcctggttcaattatggaagacaaagaacatgaatcatatcgaatacatgtaaacaacacagcacatacacaaaaataaagagaatttgaattcaagattcgggaacggctgctacagctgcagcagctgcggtacacgagcagtagcgcgtttgatggaagcagatttgatgagatgattgtaacttcctttctccttgaaaagctgagcgaaatggtgcttgcagtacaatattccctctagagctgcatagttcgatggagatatcggacagcctccatgagaacacttgaagcaagatttatggtaacactggctttccacagttacctacaatttttagaaaacagaacaatgagatataagaattgactgtattaaagagatctcaactttatgtgattcg

SEQ ID NO: 14820 - DNA, 482 bp, Arabidopsis thaliana
tagaggatcgaggatccccctgaaatcaaggactgaatggattgcggatgagaagacagcagccaatcacaactctcaggcactgtctgtgatttttggatctttgttaaggaataagttcactcaggttcaaggatgcttatcagcaaaggaagtatgggaaattctgcaagtctcatttgaatgcaccaacaatgtgaagcgtactcgtctggacatgcttgcgtcagagtttgagaatctgaccatggaagctgaagaatccgtggatgacttcaacggcaaattgagctccatcacacaagaggctgttgtcctaggaaaaacgtacaaggtcaagaagatggtgaaaaaatttctcaggagtctaccagacaagtttcaatcacacaagtcagcgattgatgtatctttgaactcagatcaattaaagtttgatcaggttgttgggatgatgcaggcgtatgatactgataaggaag

SEQ ID NO: 14821 - DNA, 751 bp, Arabidopsis thaliana
caggtaaagatttatcaagagatcatcaaagtagtagttatacactttggttagactcgaaaacagagtcctctgttatttatgtttcttttggaacaatggttgagttgtcgaagaaacagatagaggaactagcgagagcactcatagaagggggaagaccgttcttgtgggttataactgataaactcaacagagaagcgaaaatagaaggagaagaagagacagagattgagaagatagctggttttagacacgagcttgaagaggttgggatgattgtctcgtggtgttcgcagatagaggttttgagacaccgagccataggttgttttttgactcattgtgggtggagctcatcactggagagtttggttctcggcgttccagtggtggcgtttccgatgtggtcggatcagccagcaaatgcgaacgttttggaagaaatatggaagacaggtgtgagggtgagagagaactcggaaggtttagtagagagaggagagataatgcggtgtttggaagcagtgatggaggcgaaatcggtggagctgagggaaaacgcagagaaatggaagcgtttacgactgaagcgggtagagaaggaggatcttcggacaagaatgtggaagcttttgtgaagagtctgttttgaggttttataaaacagaggagggtaaacaaatgtaacaatcagcatgcaatgttgggtatatttcgtactacaatttaataatatgtgtttatagat

SEQ ID NO: 14822 - DNA, 578 bp, Arabidopsis thaliana
ggatccccgacactccaaaacgagggaggatgatagacttgaaaagtttcatgacaactgctgaatcattcttcgggctagcaatagcctctacccatttggagacataatcaatagctactaagatgtcgagattcttattcgatggtgggaagggtcccatgaaatcgaggccctaacaatcaaaaagttcaacttcaaggataaatttttgaggcatctcattacgcttgcttatctttcccctcctctgacaaggatcatactgcaatgtgaatttgtgagcatcctgaaacattgtaggccaccagaaacctgcttgaagaaccttagagattggcttaacggtaccaaaatgaccaccatagctggaactgtgacaatgcaatagtatatcatgaacctctgttgcagcaatgcatcgcctataaactccataaaaaaaaaattatagagataaggttcatctgaatagtatccctaatttctctcataaatctcttcttgttgtaatttgtgaaattatccagttccacatctgcagctaggtaattaacaatgtcagcataccattggta

SEQ ID NO: 14823 - DNA, 576 bp, Arabidopsis thaliana columbia
ccatgccggttgagcagctggttcaatctctttgtgacacaaaacaaggatacacacagtttggtggtcttcgcccgtttggtgtctcctttctctttgcaggatgggacaagcaccatggtttccagctttatatgagtgacccgagtgggaactatggtggttggaaagctgcagctgttggagcaaacaatcaggcggctcagtctatcctgaaacaagactacaaggacgatgcaaccagggaagaagcagtcgagcttgccttgaaggttctgaccaagacaatggacagcactagcttaacatctgagaagctagagcttgctgaagtgtatctgactccatccaagactgttaagtaccatgttcactcacctgagtcgctcaccaaactgttggtcaagcacggtgtgactcaacccgctgctgaaacatcttaagcccaaaagtatctctagtcttattcgcctggtacggtgtctcgctttatgtttgtagtctctgttttaagcttccttttggtttgactttgaagttactttggcgatgaactagatttgcaatgttatgaat

SEQ ID NO: 14824 - DNA, 567 bp, Arabidopsis thaliana
tgggagttattcatgaagaattctggtgtttcagccatgcacgcaattttgatgcctttgatcaataaagttcagttttacgacgcaaccatttggagaatttcacaaatcaaattgcctccaggcgtaccttgccatgtttttgacgccaaaaaaaataaagttgattgttgggctcactctgtcctcgtcgatattaacaccggagacatcaagcctcttgcggtaacaaaattactaattattactccctccgttccttttttatataacgttttagttaaaatcacgcagattaagaaattacaaatataattcattttacacattagtaattgttgatctgatggatttaatggaaacatgacagcttacaacagacacatggtgttcttctggaggtttaaccgtaaacggtactttggtaagtactggaggattccaaggaggagcaaacacggcaaggtacctatccacatgcgaaaactgtgtatggattgaatatccaaaggcactcgctgcaaggagatggtactcaacacaagccactcttcctgatggtacttt

SEQ ID NO: 14825 - DNA, 543 bp, Arabidopsis thaliana columbia
gatattgtgtacgtttgattgttttaaaggcattggtgatatacatttctgatttggattagggttttgatttcagtgatgtatctgtataaagcatttcgtcagaagatttatgaatagtggaatgatttgtagttttgatttcacagctgcttcaccttggtgagtgtgaggaggatgttagaggaagatattggattggagaaatgtgatttggatgtgtataagagctttgttaaagagcatttggttaaggtatctttgtgttttcatggttgaagcaagataataattcttctggtatgtttccattttgaaagcaccgttgtttcctttttgatgtcagtgtttagaagaagctgggaataatgatacttcggagaattctcaagaaactgagagggaagacgatgagatccaactaaagaagtagcagaacaatctgaagagcacgagccaatgaacgatgctggtgaagagacacatcgcaaagggaagctacagatgtgaagggcaagggaaataaagaaccctgcagaggga

SEQ ID NO: 14826 - DNA, 287 bp, Arabidopsis thaliana columbia
tcccttcttcaatcaaaacctatttgcatgctctcaaacccgaattaaatcgacacttttcagtttttgttttaacaagtagagtttcccaaaatattggatatatttctttttcaaatttcggaaaagaaatgagttgcaatggatgtagagttcttcgaaaaggttgcagtgaaacatgcatccttcgtccttgccttcaatggatcgaatccgccgagtcacaaggccacgccaccgtcttcgtcgctaaattctttggtcgtgctggtctcatgtctttcatc

SEQ ID NO: 14827 - DNA, 810 bp, Arabidopsis thaliana
tgttttaacaaactgaaaaatcaaaaactgcagagaagcgctgttggatccgcatctttctagatattcagtcattattgtcgatgaagctcatgataggagtgttcatactgatgttctgctggctttgctgaaaaaaatacagcgtactcggtcacagcctgttagtgagaaaactgagtttggtaatgtagcatcacaagtacagacaacaacaagggatgcgaatggtcctcagcagaatggtgtattaaaagggtatcaaggcagaaagttatctccgttgaagctgatcattatgtctgccagtttggatgcacgagttttctctgagtatttcggtggtgccaaagctgttcatgtgcaggggcgacaatttcctgttgacattctttacactgttcatcctgaatcagattatgtagatgccaccttggtcaccatatttcaggttattggtttggtgatctaaatattgttcctgcctctaccagtatttgtggaatggacttgcgaatgttctagtaaactaactctgtgtctgatttttcaatttaattcttttagattcattttgaggagaagccaggtgacatacttgttttcctcactgggcaagatgaaattgaatctgttgagagacttgtccaagaaagacttcagaacatacctgaagacaaacgaaagctactgccacttgctatcttttctgctcttccatcagagcagcaaatgaaagtttttgccccagctccgactgggttttcgtaaggttagagaagtttagctatcatttgcttattttggaga

SEQ ID NO: 14828 - DNA, 615 bp, Arabidopsis thaliana
tagtaacgtccgccagtgtgctttaaagtcatcaatctcagttatacattcagcaaaagattggcaggaagctatcgatttctcgatggtatcattgctggataaaaactatatcagcgagaattacattcaggcaattaaagattccaccattaacaatggcccttattatattctcgcaccaggcgtggcaatgcctcatgcgcgaccggaatgtggggcgcttaaaaccgggatgtctttgacattacttgaacaaggtgtttattttccggggaatgacgaaccaattaaattactcatcggactctctgctgccgatgccgattcgcacattggcgctattcaggcgttaagtgaattactgtgcgaagaagaaatactcgaacaactcttaacagcatcatcagaaaaacaattagcggacattatcagccgcggataattactctctcctctacaggataatattatggaaaacaagtctgctcgtgcaaaggtccaggcttttgggggctttttgactgcaatggtcatcccaatattggtgcttttattgcctggggttttattactgcgttatttattcccacggttggctgcataaggaaggtg

SEQ ID NO: 14829 - DNA, 458 bp, Arabidopsis thaliana columbia
ctactgcacttgagtagggaattgacttcatgtagtcctcgtcttgctcttgcttctcaactgtggctgctcgcatctacaagtgagctccaagtggtgtcaccacatgtattgactctgccatgttgtaagtctcaagaattttattcagatagccattctgtgacagccacagagtgttctcttctctatttctgataatctccataccgaggattcttttagcagcccccaaatccttcatgtcgaatctctgactgagttcttctttaagctgagatatatcttctttgttcttagctgccactagcatatcgtccacatacagaagcagataaacccttgaaccatcactcaattccttaatgtatgcgcaactgtcatacaaactccttataaagccaatctcagacatgtaagcattaaacttctcattccattgctttggagcttgcttg

SEQ ID NO: 14830 - DNA, 767 bp, Arabidopsis thaliana
caccgaggacataaacgtaaggaccaagagctacagctacgaaattgcagagaccgtaaacgtgaggttacaaggcataagaggaagcgatctccaagagagagtcacgggatcgaagagaaaaggaggcgaaatcgaaggatcctgaggaagatacaaaggagatgcgagagattgttggtgttgctgttgtctctgctatggcggagtgaaattagggttttggaagagaggaaagcgtaccatgatttacaggttgatttgatacgagagatgtgagggtaagggacgaaggagagaatcagtctcccgacgtcgttggataagcctggaattaaggtcaagcttggatcgattcgaagcttaggcctaaaaaacgaagatcgcgacgacgacgaagacgatgaagacgaacactgtaaccgcgacgggaatataggcagaggcatgattcaggccggcgggaagaaactccggcgagattttgattgatcgatcaatgaaacggaatcgtcatggagaagatcagagactgattctgaattctgagacagaacaatctggttttgaaatttgaagaaacgacaattttgttttggctctgtaattaatttaatcacccacgtggtagtttatgattggctgagacatggatatggttaattactagttactaggcttcgactagtcaaaatccaaatgtatgttttgagttgtgaacaggtttagatgtatcatgtgatatgatccgaatttggagtattggg

SEQ ID NO: 14831 - DNA, 975 bp, Arabidopsis thaliana columbia
ttgaattatctgtttactctactgttgtttactgcatcttgtcatttgttgcttagtttctacaattctttactgttactcgaccacttagttgtctggcaagagactgtgcagtcgagtatccctgttatactttctgtctgttactcgacctgtcactcggcctcatccagtgctctgcaaagagctgtgttggttgagtgtttgattgtatctgcatgaatttctgttgtctgcatgttcacttagaactgctagaacacaccaaaacctgttattgcttggcttgacttagtgtcttctgatcacatcttgattgttagcatccacccattctgattgaaaaccttacaatactacaacgatatgatagtgctttaggtttaattgactaaaagcctattatcactccgagtgatcaattggtcaagtagatgctacttcctctcttatctgtatgctcagatgtctggttgagtggggaatgaggaggatccgaagatgctttgatagatcaacaagtcttgtagagttggtcgcccttggtcgagtaaatgggtcgagtagaggatcgagtaggaagggcgagtagatcgatatgcttcttcttctaaggctgccttgatcgagtaagtgggtcgagtgaattgttgcctcctctgtggctacctagatcgagtgaactggtcgagtagaatgctctgctgcttccgtgctggttggatatagtagagggtcgactagaatccttgtgagctccttttgcacctgaaaacacaccgaaacatgcaatatgtatgcaagatgatcctaaatgcctaactgtgcaaagaagctaaatgtgatgcaaaatgatataaaacaatgagtgatcactaagctaaatgatgataaatacatgcctaaaatgagtaatttacagtgttatcggcagacgacgtggtgtctccttcattagagcggacaatgcgctga

SEQ ID NO: 14832 - DNA, 489 bp, Arabidopsis thaliana
  unsure (1)..(489): unsure at all n locations
gctcctcctcctcctcctcccacttctcttaaccaccgtctcctcctatccactaaacccaaaacagctcaaagctctccaatcactcaacatctctacaccaactaatgatccctgcaacaacaacaacaaccaatcctcctcctcgtccataacttgcgacgacgcttctccttaccgccacatcacctcaatctccttcacaaactgctcctccactctatctctcccctccaaaacactcaaaccactctcaaaatctctcatctccctctctttcactaactgcccttcactctctcctccataccacctcccaatctccctccactccttctccgccgtctcctccttcctccaaaacaaccgtaccaaactctccggcctcttcctcgctcgtctcaaaaacctcaaaaccctctacatttcctcaaccccaatccaaacctctcgtcgtctttatgntcatcctcggaaacatgcataaac

SEQ ID NO: 14833 - DNA, 549 bp, Arabidopsis thaliana
tgagaaaactgaaataatagatttggtgtttccaaggtttaagagaaaaaacagactctagactcaaactctaaatcccaaacaacaactagactataatttgaggtggaatatggtaaggtgccccgtttgtacgagttacaccattgatggagtcaaacgtcagagacgcaattgctaattcgtcgacatcacatatatcaacgcagttagggaacctggagctgctagcacagaaaggtttagactttgagagaaaaatgcaaagatctccaatgtcttcagtgtaaacagcgttccctttttcgtctagcttgaacaccattacaccttttgttttcatttttaccgtatctctggtcgtggcctttttgtaccgctttaccaagaaagtttcaccggtgtttcttgactccaccaagtgttcactcctgtaacacgaatccagaagctcccgcttggccctaggtagctcgggaaggtttcggaatcgcagcctctgaatcttgggattgtgatctctgtgcggggatccatgaccgatgaggt

SEQ ID NO: 14834 - DNA, 960 bp, Arabidopsis thaliana
ccttttggtgtttattgattttgggttcgaatcatttcttgctcctcagctattaaaaacatatctctaattttcactctagagaataattatgagtcagctttaccactttggccagaaggctaccccaatggccttcagatgctctttcatctatttgacctcattctcaatagatccaaacttgctttcaaactttgcatcaatcatcgcttatacttgatctccaatcacctccagactggaggacatttctttgatgcttgtatcaacaatgtcaaactttgagtttaagggagagattaatttagacaccacatccacgaaggaaacatcttcccgaacatcctcctcgtcctcgtcctcatcagattcaccatctacttttttcttcttcttcttcttcttttgtgcatctcctccaccagattgaacatcctcaccgtgagagactttctgcttctttgcgggagattcagacacagccgctgctttatcttttaagttttttttcttcttctcattcctcttcacatcccaataacctttaacaaacttatccccatgtatgtcttcgatcaagtgatcaagtgctgggtattctagctacttcatctgaccaagtatgaaacagctcgcttacatctacgacacaagagattataaaactcatcagtatgtgtaaagtcagttatcaataagtataactcagccatcgctcaacaataattcaaccatcactagaccacaactaagtcattgctaaactataacttagcaattaataaacaataacccaacaataaaataacaataactcagccatcaaagaacaataactcagctaccaataaacaataactcaaccatcacagaacataactcagccgtcacagaacataacccagccatcacgagaacatatctcagccatcactgaacatgactcagtcaataact

SEQ ID NO: 14835 - DNA, 598 bp, Arabidopsis thaliana columbia
tgttgaaagttaaaagcataagtcagtcaatagacacaaacaatctcattatcgacaactccactacactctccagcccttttgcagacttctccttcagtgctactgcttcatttgaagttcgaagcccttcaagaattgaggtaactaaacttacaaacaccagtttgagtattaaggtcactgaagcattaacagtttgtacttttgattacattccagtcaatcaaaccttaccattaaaacaaagctatgttaaaaaggtttctttgtagattgaatttgtattggtatcaccatctggttgtcttaatgtttggtaaatgtcaggtttctttcaaagaaggcacgctaaaacccccggtgatcaaatcaagtgtagatctcccagagagtgtgggcgtctttgggcagcagattagcctttcgttgttaaagcagtctttgaaccccttacaagatgtggcagcaaacatttcacgggcactctctggtcagccacctctcaagcttccgtttccaggaaaccgaggcagctcttggctcttgaccacttatctcgacaaggatctcaggatttctagaggagatggtggct

SEQ ID NO: 14836 - DNA, 528 bp, Arabidopsis thaliana
cattaggctctatagaagctcttgatgttgatccacatattgtatattgtaccatcatctgaattctcgggtttttgtaggaatactacataagacatacggatggatctcctgtcaaatccgaggcagaaagacagcgagtgatcaaatgtctaaaagcagctattcaaagaagagtctctgaggtaaaaactctctatcatttgcttgaagaagtatcataagaacttttgtgtgttgtagctttaacatatggatatcgtttccatgtgttttaggggttgaagcttgagctttgcacttcagatagagtcgggttactctcggatgtgactcgaatcttccgcgaaaacagtctcacagtaacaagagctgaagtgaaaacaaaaggagacaaagctcttaacacattctacgtgagggacgcttctggctaccaagttgataccaagaccatagaatccattagacaagtcatcggtcagacgagtcttcaagtgaaaggcggaaacacagacgcgaaaccga

SEQ ID NO: 14837 - DNA, 473 bp, Arabidopsis thaliana
caaggaaggattatgctcattcatccgtgagtatatgcttctgatgttgtctgtacgagtttagcaatcttacttcctcccgacttagtgatgacattctttttgagatgataagtgcatattcctcgatgagccattggatacacgtttgaaatggctttttgaattgatgattgtttgtctgatatcattactaatctaggattatttgatacaacaaatttcaacttgatgagaaactgatcccatgatgcatcattcaacgaatctactattccaaatgcaagaggataactatgagagtcgccatcctgagccgttgcaatcagcaaaacgccaccatattttcctttcaagaaagtccatcaactactacaattttcctcatgaattcataccctttggcataagtagctaatgatacgatcaagtacctaaatctctagtgattatcagtctcaggatatgttatg

SEQ ID NO: 14838 - DNA, 433 bp, Arabidopsis thaliana columbia
tgtttttttcctataaattaggagattgattataaagaatgtgtcgatttgtcgaaggttgttcgatgaatgagatcaaacacgtagatagatgcaaagaatgcaacatatgttataattatacgtgctaggtcaacgtagttgtattatgaaggacttaattgattaggttttaattagtatcatgctaattaatcaaaagggtacaataaaagtaagtgatttttacctagaaatgaagtagtcgagtaatgatggtaacaagcggccgtcaaacccgaacgacgacgagagagcgaccaaggaactggtggcggtggagcacgagactcagcgatctgagcaagattgttcgtaaacactagcccgaccgatggagcgaataactagagtccagagtatatccggcaatcgagtttcttccatagttgtg

SEQ ID NO: 14839 - DNA, 535 bp, Arabidopsis thaliana
tagtaacgtccgccagtgtgctctaaaggaccttacagaaagtattggtcttcggaatatcgcgcttaagcaacgaaaactcgtagtccataaagccgatatcgaacgctgcgttatggatcaccaactccgcgccgcgaatatagtccatgaactcatcggctacttcggcaaacgtgggcttatcgagcaaaaattcatcggcaataccatgtacgccaaaggcttccggatccaccagccgatcgggtttgagataaacatggaagttattgcccgtcaggtgacggttcaccacttcaacggcaccaatctcaatgatcttgtggccttcatagtgcgcaccaatctggttcataccggtggtttcggtatcgagaacgatctggcgtgtaattgcagtgctcatagcggtcatttatgtcagacttgtcgttttacagttcgattcaattacaggaagtctaccagagatgcttaaacaggtagaaattttcaccgatggttcgtgtctgggcaatccaggacctggggg

SEQ ID NO: 14840 - DNA, 501 bp, Arabidopsis thaliana
gtgaagtaccagatcgtgctttaaacttcgccggaatcttagtcttctggacttggttcccactcttagtctcatgtctaccaaactggcctgagagattcttcttcgtcttcacaagcttcaccgtcacggcgcttcaacacattcaattcacgcttaaccatttcgctgctgatgtctacgttggtccacccaccggtagcgactggttcgagaagcaagcggcgggaacaatcgatatctcttgtagatcatacatggattggttctttggtggattacagtttcagcttgagcatcatttgttccctcgcttacctcgttgccatctccggaaagtttctccggtggttcaagagctttgcaagaagcataatcttccgtataggagtatgtcgtggtttgaagcaaatgtgttgaccattaacactttgaagacagcagcttatcaagctagagacgtggctaatccggtggttaagaacttggtttgggaagctt

SEQ ID NO: 14841 - DNA, 566 bp, Arabidopsis thaliana
ccccgaagttgttctaagaaaacattttttagaaggcaggtattggggcaaaacttgaagaactctggtttcttgtaaacctgttgccactaaagttgccctgtggtagtccaacctttatgtaaccttgaccatcaatgtagaaaacaccttcttctgactctggctcaggctcaatagtctctacttcagcagcaaaatgtacatgcttcttccctgtaagcaagttatgaactaaattcaccttagtgtgtaccttagccatttgattccatgaaacagctctttctatcttcttcctctcgaagtcagcattcttggtattattgctacatgcaatgttctcaatcaaagtagtagcatatgtccggtagcgtgtgttgaagttaccattgctcgctgaaatcaagagccatctgatatctctaatcaactcatcttaagaaggtattgagaagttgtacgtcaatgaagccatgatgcgggcagtcctgttgatatccttgaagcgaacctaagctgctttgaaagcttctgtccgaccttgagtgaaggtagcagcttgt

SEQ ID NO: 14842 - DNA, 707 bp, Arabidopsis thaliana
gaccatcctccatctctgcaagaactttttcagattgttcccacattcctccacgggccaaagctgccaacacagtgttataggtggaaaggtcaggagtgaccccagcatcaagcattcgtctgtaaacagtcatagcttgttcaaacgaaccacagcggctatacgcactgattagggtgttgaaagtttccctttcgggtacgaacccagctctcttcatttccttgaatacacccgatacttctgaatccatcccgttttggccaaagactgctaatagtgtattccaagtgacaatgtcgggggagagaccacacacattgatctcgtcaaatatcttcatcatttcagtaaactttcccctgttaccatacatctttataaaggcattaaaagtacaaatatttggtttgcaccctgcatttctcatctcttcaaaaatactcatagcagattcgaccttcccagccctctcaaaccctgacaaaagtgttgtataagtaaaaacatcaggtttcgttcccttttccgccatctgatttttaagctccattgcctcatccagcataccatccctcgcatatgcagagatcaaggagttgtaagtcacaatgctcggagaaaatccattgagcaccatttcattcaaaaccttcatagcttccttaggccgatgagactttccataaacatctaataacgca

SEQ ID NO: 14843 - DNA, 975 bp, Arabidopsis thaliana
agaggattcacatagtttcaaactttaacatacttgttgcaacataaaaaggaaatacaatcacaaaatcaattcccattttacttctttccaagtgcatccataaccttgcgatctctgcatctttcttgtccaagtggtctttgaggtcctcaatttcagcacggatttggttaatctggagacgattactatcacctccatatttgaatgcgttttgaatcaatttcctgtgctcgccaaatcgtttgtcgatgcaaaagcactgctcgtgaactgcaagatcccaacacttgtctacgtggtaattatcatcatgaccactcatcggacatttgagaaatgtcttcttttgatcgccaataagacactctaaaaggtaaagctatttaccacaaaaacagattgtgggaacaccaaaatcaccatcgtacttgcaaagatcatcggatcgttcctctgatgaagaaggtgacgaataactaagcggcattatttgctacatagccaaacacatgaaaatcaaaaggggtaaattccaaaatataaatcctaacatccaaaccctagatctttaagaaaatccaaaatccaacccctagatatcaaattatcataaacggcaactctaattcctttgcaaaccataattcaatagaattgggggaaaatcaaaaccctaatttattttctatccaacccgaaacttaccaattaacttggacaaggcggctgatgcgaaagattcagcgtcggcggaggttcgtcgtgttgttcgtcggcggaggttcgttgtgttgttcgtcggcggaggttcgtcgtcagagaagagagaaggagagaagaaaacttttcgagagaagaaaggagaagaaggaaataaagaaagagagagaaaaatttgtaatttaatgagatgagaaagattttttgaattgaaattgaaatacatagtgtgaacacatagtgtgaacg

SEQ ID NO: 14844 - DNA, 578 bp, Arabidopsis thaliana columbia
ggcaaactttcgcacatcaatcccggctgctcagtcttctcagtttcaaggctcacatgttacgtcccttggaaattgtgaaggaagaacttctgatttgatggcgagatggaaccacatctatggacctgttcaaactcaatttccacctgcacctctttcgcatcatcattattcaatgcaggtttgtcaaccattaccatagagttgttttttgttcgtatgcgtaaatatctggtgaagctacattaccattaccaactctgaagttttttcttatatgtttgcagaatcagagcccgtcccctgcacagcaaagaccagtgccatcttacattgcacatcctcaaacttttcatgtcaactacggagagaacgcctgccaaagatggatgccgtcttccattgcacatcctcaaactttacctgttaactacggaggaaatactaaccaaagaccgataccatcttccattgcacatcctcatactttacctgtcaactacagggggaatactgaccatagatcgacgccatattccattacacatctccaaacattacttaactacggaggg

SEQ ID NO: 14845 - DNA, 556 bp, Arabidopsis thaliana columbia
gaaccatatccatcacgtctttggaagatgttcctggaacagactcggagaaggcgaggacgctgtttctcagaccgtccacaatggcttgtctctgacgggctatacccatacctgaaaggtatttcgattcagcttctccctcagcacgcttgatctgcagaatcttctctgcctcagctttctcactcgctgcctctctcattctagaagctgtgtttacaccagaaacagaacagaacattgtgagattctcaacaaacaaaagtcgaaaacttctatagcaagatttaaacgtaccagcattgatctcattcattgccctcttgacgtgcacatcaggctcgatatccacaatcagtgtctgaacaatctcatacccgtaatgcgacatagcctattatatacacaacagcagttagagtcttaacctatgtataataattttttgcacaaatttcaaaattattgctcaaggagatggctggaaagtagtttccttttcgagctcagtctcaacggtttttgcaatgtcattcttttgctcaaaggtaga

SEQ ID NO: 14846 - DNA, 486 bp, Arabidopsis thaliana
taaagccagccatttgtgaagtccctcacggtgttaccagtttggttgtatctttacaaccaaagtcatagtttccagaatactatgaatggaggagggaagcccccaatcttttacgcctccaatttaatgcctccttagtgattgtgagaggtggggacaggacagtggggtggcagctggccggcagagctgcgggcccctgctccctcttccgctgggggcctcacttcgtgggagtggagagggggctgggctccgaagaggctcaaagtgcaggctccacgctgagccctcccaatgaattaataatggcactggccggcctacagagatcattctgtaggagcttttcattatttgtgcctacatccaacataattggcaaaacctgcagaggaacaagcgtataattttgaataaggaggtgaaaccttagttaggtacagcaaacaaaaaaacacacacaagatcagtctagagtcg

SEQ ID NO: 14847 - DNA, 880 bp, Arabidopsis thaliana
gctatcaccatccaccaagaagatgagtctccaccaaatcatcagactcccaatacttaggacaatatgattcaagaaggggggggattcaactcaaattgctgcacctgccacccagcaattcatctggactatagagcacacacctttgctgaatactcaccattatggaaaaaaattcaaaattgaaaaactcaagaaacatgagaatcaagagatgattagcagtgccaccacccaagaaacttccaagaagaaagtcatccaagaaaagcttgatgatcccggttcattcactccgccatgctctctaggaccattgacattcaataggtgcctttattatttgggagcatctgttagccttatgcctctctctacagctaaaaagctagggatcatggaatacaagttctgcaacttagctttactcttagctgatggttctgttgcacatcctcatggtctaatagaaaatctacctgacaagattggaaatgttgagatacctgcaaactttgtagtgttagacgtggatgaagaaggcaaggatcccctgatcctagacagattattcttggcttcagctggagcagtcatagatgtcagaaatggaaaaattaatttgaaccttgaaaaaggtattaagatgaagtttgacatcagagaagcttcaaagaaatcaacaaaaggaggtcagagttttggaattcaagatatggatgttgatgaagaaacagaagctgaaacctcaccaaaagttaattatacttctcaacttagcaagctgaagagaacttttgaccatcaagaagagagcaacagaaaggctatctcagactgaagatcctacagaagatgactggtatgaaatgagaaa

SEQ ID NO: 14848 - DNA, 549 bp, Arabidopsis thaliana
gaaaaagtgagagacacacaacttcggagcgaatctattcttcttcttcttcttcttcttcttcttcttcttcctccgtttttttcatcttcttctctgtttcgagagatccactagtgaaagagtcagcaccatggccatggtcaaagagaaagaacaaaacactaaagacaaaaaactcctcgtcggcgtcatttggaacttctccgccgagctcaagctcactttcatggcgttacttgttctctgcactttagctactctcttacctttcataccttcttcattctctctctccacttccgatttccgcttctgcatctcacgcttctcctccgccgtccctctcaacaccaccaccaccgtagaagaatcatcatcctcaccgtcaccggagaagaacctagatcgagttttggataacggagttattaaacggacgtttactggctacggctcagcagcttataacttcgtctcaatgagtgcttacagaggcggcgttactcattcgccgttatcggattatcacaaaaccattacacgtgt

SEQ ID NO: 14849 - DNA, 582 bp, Arabidopsis thaliana columbia
gtcgcttatatcaaagaacccaaacttcgttagaggactatacatacactggttctctcttgtcttttctcttctcgattcttaccaattaatctctataatctctgagcaacgaaactcttccgaaactcttccaacaagaggccgtgtgtggatgacggttccaacaagaggccgtgtgtggatgacggttccagcagaaggctgcatgaaacggagagacgtttcaaaggcatcatctctctcatcagatgcaacataagggagatggaggaagaatacttaattattggatctcaaactgcatgagaaagaagcgaaacttaaactcctaaggaaaatgaagaggatgaaggacggatttaacgtggaggaagagttccagaaagtggaggagcaggtaagcaaggcttacaaggagaagaatgcattcaaggtgattagtattgattgggataagctggggtatggatcgaccgagagttcaagttttgaatcagatgaagaatgaaggtggcgatggatgtgattgtttggtcataacaaaattacatctccatgttatttgtattttattttatg

SEQ ID NO: 14850 - DNA, 738 bp, Arabidopsis thaliana
tgctaatgtttttctcaccatatttttgtgtacttcaacattcaggacaacatggaggcggctcagcatctcattcattgttagggtttgcaaagttcgcaaaaaagaaggtaaaccttatgtctatactaaattaggctcgctttaattggacaagagtttgtggatacgttataatttgcagctaatattttcttatgtttttctcaccatcttattggtacttctacatttaggtcaccttggagtcggttgcggtatctcagtcattgttacagacgcaaccagaagtcaacttcgatggtgatcctatgaaggtatacagtaacaataaaaaacagaatttggttttcggttctttttgttattggacatgattatttggttacttaataatttgcaggatatttttcttataataggtctcctcattttatatttgcaaaagatattctaatacattttcaaaccaatctcattattacaggctatggtaatatattctcatccaatttatgataaaattccaaacccgacaaacagtcagaatcttctcccacccatagtgccaatattgaactaactccaacaaaggttttttattataatataattctgtccatctctgcaaaaataatttttttagagatcagtttcaataatttttcttacaaataattacttatcctttttgacatatcctatcaggatcaaattactgattctcgagacattggt

SEQ ID NO: 14851 - DNA, 571 bp, Arabidopsis thaliana columbia
cgtcaatggaggatttgacgaaaagagactaataaacctaaatcttccccttcggcgttaaaccctaaaccctaatttcgtgctctgtatctctctgtttttgtttttttttgtttgtcaacaggtttcaatggctattgatgggagtttcaaccttaaacttgccttggagacgttctctgtacgttgtccaaaggtcgcagcttttccatgtttcacttcgattctcagcaaggtaaagttttgtacttgttacttcaaatttgacccagaattatgggcttgactttgttttgaacaattttttgtctttatggctactgggttttgtttagggaggagaagttgtggataacgaagaggtgattcatgctttaggggatgcgtttcttcacccggagtttacagttccgttggttcattgcttccgtccaataataagaaatgttgtagatagagtggtgggtcttcttcgtctagtggatgatcttaagtcgagtattgactactcagacgatgtgtcatcagtttcggataatgctatgacggaaggtattagtgtgattgattt

SEQ ID NO: 14852 - DNA, 563 bp, Arabidopsis thaliana
  unsure (1)..(563): unsure at all n locations
atccctgtttgcttgttcaacatactttttcgttttctcttcaatagttttccgagcttcctcattgatttgttgcaccatttcggctttctttttcccatctaaatttgttctgacactcaaaggtagaggcattaaatccaaaggagaggtgagattaaacccataaataatttgaaataatgaaaacttagaagcggaatgaatggcatgattttatgcaaattctatattcggaaaaaattcttccccagtcctatggttctttttaatcagagtgcgcaaaagagagcctaaggttctattaaccacttccgtttgtccatcagtttgggggtgacaagtagtagagaataagagcttagttccaagtttagaccataatgttttccaaaaataactaagaaacttgttttccttatccaaaacaatggttctaggcatgtcatgcaaacgaacaatttccttaaagaacaaattagcaacatgagatgcatcatcgggtttatgacatgcaatgaaatgagtcatcttagagaacntatcaactaccacaaagattg

SEQ ID NO: 14853 - DNA, 868 bp, Arabidopsis thaliana columbia
acgcacagttgatagagcaggggattgaacggatctccccagtgcattaatagctgtgttacactttggaaacaatcggcgactggcttatgtctatcagttatagggtttgtagcccatttgtttctaagtcttgcaaccagatacttaggtatttaaacagcatgtctggactctaaatacgtcaatggactaataatgcaaataggaaagtcttgtggggcagatttgatcttctgtaaacttgaaagcatctatggttttgataggccgaaagctggtgtcgatcgacaccaagagtgtgtcgatcgacactcattgctgattcctgaatccaaaagcgtccttagtttccttttccttagatcttgctccaaaatgtctccttatctccattgttgtcccattgcatagaatacttgaaaagacactaaaaagactcgagaaataacataaagactcaaaatcctatacctaaaacatagataaaatcggtgaaaatcgtgttatatcaactccccagacttagcttttgcttgccctcaagcaaaacacaaaagccgaacccgtggaagaggttttgaaaacaaaggaactcccaacattctctagcccatatgccgtgatcattcaaactaagtccatatgcctaataagtctaattaaatcctaaccaacatgtacttctctacaagcttacacaacattctagattccatacctaagttccacaactatacccaccaggctttcattgctgggtctcatcaaacaagccaacattcaagatccttctagactcattcctgtactataccatgataaattgaccattctttatatatatatatatatatatatatatata

SEQ ID NO: 14854 - DNA, 368 bp, Arabidopsis thaliana
tcccccaaacttaaatcacacagtccactgtgcgaataaacttggaaaagagtactcaggacaaatccaatcacataaacaaaatgaagaaacaaatcacaacagatgactatactacatcggtgcaatcacatccgcattttccaattccttcaccttgaacgatacctcaacatctgcctgctcaataccaaaaacaaaaataagcaagaaacacactttgctaaaagaaaaactaagtagttttaggtcaattcccaatactagattcggattcaccattgatatggccaagtttaaggaataaggtttgagtcatacctgcgcacagtgacaccatgaacttggagagtagatcctgctttgag

SEQ ID NO: 14855 - DNA, 639 bp, Arabidopsis thaliana columbia
cctattcctggatggattaataggatggctcgagttggtaagataactttcttattccagcttattatttctttactggttcttgttgtttggcatatctttttacatggttgcttgttcttgaattttttcaggttcgttctgtaactgtatccttcccagaaagcatacagctctcatcggttaatcatcctgaagccctcgagttctctggtaagttaatcatgttcgctcttcttcacctaaaaaaaactgcaataggcatttggatttcggataaaccagttgtgtttcatctccattgtagatgataacgatggatcagaagaatcagttgcatcttctgtgtcatacgaaacagatggagaaggatcggatcatcatctcataacagcaccaaacagcgatattgcgtatctacaggacagaccagtgagacttgcccgtgagctcctccaagaaccaacctgatgatacatctccgcagtacttgttgaagcggtcctgatcatcacaagcatcgacaacttgtgttgtctgtaaacagtgaggcaatgggtccatatattgagtatctttggatctataagtgtaaaaaagattaagatctaatcagacctctgagatgtggatgtaggt

SEQ ID NO: 14856 - DNA, 1145 bp, Arabidopsis thaliana
atcagctattaataggccatcacttgctcccggagaagaggatattgggacatcagtgctggcgtacatggaaagtgccagaaaaaaacgtgatgctgctgatgccatcgttgaaggcaatgattgtaatggaaaacaatatggaaggtttaattcacctaatgtggaagatggggtctcatcaggaaattctggtttcgcagacgttggcacagcgatgggcggaggattcactgtttcccctgcagttggtgttggaaacaaagacgctaggccatcatattcaggctttgctgcatttacatctccaaatcagcaagcaagagaaagtttctctggtttaaatgctgcataccctcgaggaccagcgccttctaatgattttactgctgcaaccccagacgcatcacaagattcctctatatttgaagctgcctaccttggactacaaactgcttcccctgcaatggttgcaccaacccaattcccagtacagactccctatgtatgtgatgctggctacactgaagcagtatctttgggagagtttggtcatgactacacacaaaggcgtgatgcataacctgtcattaacgatgtttttgaactcactaacatagatgtgtgtgcgacggtctcggctgaagaagatgcaatatacattggccgtctgtttaaagataaggaggattttcaaaacactttggctatatatgccatcaagagattgttccatttcaggatagataaattagatctgaagaggtgtcggtggagagtatttgctcatcgagtttcagaattctcagagaattttgaaatccacacagccactcttactcatagctgctcaatattggcccgttcacagtatgagaagcaagcgtcagcaaaaatgattgcagaggtattgaaagggaagtatgctaacgggttgcctggtcctcgtgctgtcgatattccagatataattctagctgagttgaaggtttctatcacatatatgaaggcatggtatgcaaaggaggctgctattatgaaaagccgcggaagtgatgaacagagctacaaattactagcagtgtacttgtatttgttgcagacagggaatccgggaacgatatacaactggaatatattggtgg

SEQ ID NO: 14857 - DNA, 468 bp, Arabidopsis thaliana columbia
  unsure (1)..(468): unsure at all n locations
tgtattgctgagtcttatctcgcagaagaatgcatgcagttatgtagtgataaaatgaaaaaaactacaagtatagaaaagaaaccagaaaggaatacagagtatgagaacaactccatactagaagggcgtccaatatccgcaggaacttcatttatgctcactgaagtagataagaacatagcccatcttgatgtcatccaaaatatggctgccttggatccttatgtggagtaagtactatcgctttcagaaatttatctaatgttcatttacgaaactgaatatagcaagctgatttttcaaattcctgtattcaactgtgaacagcatgcacttgcaatatctccaagacacaaatccaagatgtaaacgtgatgcatcattcttattgaatatgcgtgccnaaaatattgcatcttggttanaagaacaggcaaatacttttgctaactgaattttatggtt

SEQ ID NO: 14858 - DNA, 573 bp, Arabidopsis thaliana columbia
gttcttactagaatgataagtaccacaatgttgatcaccgatacttttctccaactcttcttcaaactcccaagaacaccagctttacaagaactacactgataacagagcatgctctggtcgttgctccacaccatacagtcctggttcggtcctatcatccctcctctcgtgtctcatccggtctcattcacatatgaaaaaccgcaatctgttggtggcttgcaacaaccggactgcaaattaacaacaacaattacatatcataaaccgcaatattaataactcttttatcataagcaggtaaagaagagagacactaaacagtgaacactctaagtaacaattattacaaccacaatattagattattaggctcataaatatgataatcaacaccacaatatatatagcacaagaatctttcataaagacgataaacaagacagagcatttctagattcaagatttatgacaaaacgagaacttgaacaactacacttttgaacgttccatgcatcttcatcatatttttggttctcacgtgtcagctgggaatttgacatatatatg

SEQ ID NO: 14859 - DNA, 1152 bp, Arabidopsis thaliana
gaaaattcttctgagcacacctaaatccatgactaagtccaatggattactgggtacttcaattcaattaaccaattaaggaaatgactaacctttatccacacgagaatcccccaaaaaaccctaattttcagaagaagaagaaaaactaattttgaaatctctgagaaactgaagagtaaacgacgttaaattgtttggaattttggataaacttgtacgatgccgtttttgtggtgacttgttttttgtgttgttttgttattaatagcccaaatatttttagatttacagaaaagcctcatactttttattggcccaatgtgatcccaaattgtgtgacagtagacattaatgtatttgtccttctgcattttatttcatcaacacacagtcaaaattcaacatatggttggtcttaaagaaagcttaaacatcgacaaaagttgcattataccccaatttgtttaaaataaaaagagtcttattatatatccgttaatactttttttagtttttctttcattatatgaatcaagtgatacaaaaatactcacttttagattctgttcgttttgcacaaaaaaaaaaagattctgttcgttgtttaatacaacttactttcttctgtcaaatcttaaaaggcagaatcgtctcaaaccgggttggccttaaaataagccaagagaccaacaaaaggtgcattgatgtaggtcgtcggctcagtctcacttgcatttgtccgacctccaataaatctatcatctacgtcaggcccgccaatcaccgcacctataagaatgttggggtttggattgggtgatgagaaaatattccatcctgctatgcacccaaaggcagccggatgaacggtaacagacggtatagacgagccacggtggtggatcagtcccgggtaccgctcgccgtacccaatcatgtatgacaacttcattggattatctccaaaacgtagtctacctgcaaaaagtagaacacaaatatttttttcttagactaacgagcacaagaattatggaagaaaaaaatgatcttatgattctaatatatacctgtcgtttgactatgcggcgacgagaatccggttgaaacttgaggttacgcaattgagctgttgagaagatgtagaga

SEQ ID NO: 14860 - DNA, 546 bp, Arabidopsis thaliana columbia
tgcactctagaggctagaggatcccaacttaaatatacgctatctgcctgctgtttatggcggcggtactggtgattatgctgatgaccccaggaatggcgatttcggtatacctgatcccggtatggctgatcgtgttaggtatcggctatctgtttaaagagaaaaccgccaaagccgtaaaagcgcattaatctctctacgccctcacccgtacagggtgagggcaataatctttacaccaacgccccgtaaatcgtcagtagtgcaatcaccaccacgaccacgaacgaggttttcttcgccattgaaaccgctgccttcggcgtctccaccttatcgacatgcggttcacgcgccagagagaactgcgccagacgcgttaacacctgatactgcgaagtatggaaatcacccagcgacgaaaccaggccggtaacgctttctcaccatgaccgatcaaggcatatccacacccgcaagacgaaccgggcaccaatccagtacatgaagcacggcatcaatgccggactgtaaacgatgatg

SEQ ID NO: 14861 - DNA, 564 bp, Arabidopsis thaliana columbia
gtgaaggataaacgcagaagcaacaaagtccattacgctcgataaggcttagcagtcaaaatccctaaaatcctctttgactttggttctctgcagtcgataattttattttcgccaatgtcatcgccggtgaagaagatgaagaagaagacgacgacgtcgccgatactctcaccgacgccgcattcgacccagattttatcacttcctgttgatttgctaataagtatcctcgcccgcgtctcgagattggactacccaattctctctctcgtctccaagagctttcgatctctcattgcttcaccggagctttacgagactcggtcactcttaggccgcacagagagctgtctctatctgtgcttagggatccttctgactttaaccctcgctggttcactctctgccgaaaacctaagccaagtgggcatgttatggcggcaatctcaatccccaattctcgtcctgtacattgctctggtctcgttgctgttggttctgatatatacaccattggcggatccatcatcaatgaacactcctctagtgtctcgatattgg

SEQ ID NO: 14862 - DNA, 1052 bp, Arabidopsis thaliana
cttgatttgtttaattacaaaaccataggtttgtcaacttccctcaacaagtcaaagtgggctcttcatagctgacataggtcaagccaacaatataaccaggtacagtttttgatttataatttgagtaatcatgatttaaaaacatgagcaattttactaatgaattttacatggaaaggtttccgaggctgttaatcgatggtccatatggtgcacccgcacaagattaccggaactacgatgtattgcttctagtaggtctagggatcggagcgacgccattaatcagcataatcagggacgtccttaacaacatcaagaaccagaattccatcgaacgaggcactaaccaacacataaaaaactatgttgccacaaaacgagcttatttttattgggtaacaagagagcaaggatcattggaatggttcagtgaggtcatgaacgaggtagctgagtatgatagtgaggggatgattgaactacataattactgcactagcgtgtatgaggaaggagatgcgaggtcagcactaatcaccatgttgcagtcattgcaccacgccaagagcggcattgacatcgtatcgggcactcgggtccgaacccatttcgctcgacccaattggcgtagtgtcttcaagcacgtcgcagtcaaccacgtcaatcaacgagttggtatgtcactagctattacaacaattccatagctattgtagaatctttctagtaagtaactgattttcctttttctattttgttggtaggggttttctactgtggtaatacatgcatcataggagagttaaagagactggctcaagatttctctaggaaaactacgaccaagtttgagttccacaaggaaaatttgtagtttcgattctattcatccatcagaccatcattagaaaataataagcaaaatatgtcaagctgatatctattataattataccacactttgaaggggtctagattcaaagttgagactcaacttgaagtttctataatgtaagaggagaaagagagtgtcataaagaggctta

SEQ ID NO: 14863 - DNA, 492 bp, Arabidopsis thaliana columbia
ggtagacgttcccgaatcagccacggttggctcactgaaactagcggtattggaggcggtaacgagattctcaagggtggattaaacattggagtgctctttcaaggtaaaaccatcgttgatgactccaaaacgcttcttcagattgggatcccatacgatgatgacgatgacgaaaacctcggttctttgggattcatgctagaaccgcaaaaatcagaaacaacaacaataacaacgttaaccactgtttccccgagaacacgacttaggtacacaatcaaaaccataaatccttatttttgtataaactcatttctaaaaaattatgttattagtaatttcgtattctttttaaactgccggtcataaatagacaaaatcaggtcctagggtccgtggatagcactgaggcagtagcagctaaatccgtggttccagtacgtatgaaaccggcctggcagccagagatggttcaacggagaataagac

SEQ ID NO: 14864 - DNA, 535 bp, Arabidopsis thaliana
catcgtcatctgttgttgctgttgttgttgcattgccatttgaacattagtgggaggagcaatgttgttggacattgcaaaaggatcttgttgcatttggaatgggtttggcggtgctgctgttgtgtctatgccaccatgtccatagcccgcattggttagctggatctgtctcctagctgaatcatcctcgtacagactgtcaagcaatagattgtcaaatcctcctgcctataaatacaacaagagagaacaagcccacgtgagttttgagagtagaaacagagagtttcatattcaaatatatgtggtgttagagttaattacaagtttggtgttaggcgcagggcgaggattattgttgttgttgttgttctgaggagtgaccagtgccaattcccagccggatccaccggtttctattaaacttaaaatgtttgatggtcctggagcttcatgacctgcagagaccaataacagcaaaaatttaccattagtgttagaaaatctctagttttggtcaagaatcaaattt

SEQ ID NO: 14865 - DNA, 450 bp, Arabidopsis thaliana
tcccacttgtcaaggttttggtagaggctttagacactaaatagcccacacccaaacacataacccaaatccccaaatctacggcccatcccattccttctgtctcagactccatctcagccgtccattccacctcttcccactctccctctccgtcgtcagattcgccgctacacgtgcaaaaacacacgccgccgtcagaatccctcccttcctctctctcctccggtatctcctccaaacactcaaacccaatcttttgctttctccttcttctatgtttcctcgccatcgtcgctgttgccacgtgtccctccgccgcaacaacaacttccgccgctccttcctcttccatctcacactcgcactcaagtttccacttgtctccttcgtcttttctgaaaataccttttatcaccctctcctcactcatgtacacctcgaagcgga

SEQ ID NO: 14866 - DNA, 932 bp, Arabidopsis thaliana
cccaacaatcaatgaccaaattcttattctgacaaaacaagtagtcgcaaaatagtagtaaataagtagcaacgtagacgtaaaacagtcgtaaaataggcacaaaacttatcgactattaccagactaaccaaattagtcataacctaatcgtcatagagacgtataatagtcgtataaatttatacaactatgatatgactaagagaatcatatcctttgtacagtacaatttatcgtccaatagtcgtaagattgtcgtaaaacgttttacgactattttacgacaacgtgaaacatacccagggttcagtgtatttaattgtaaagtagtcgtaatttcgtcgtaaacaattaccgactatggaacgagtacaagtttcacacgctctgtacaatactattaatcgttaaatggtcgccagataatacgattattaaacgacgaatttatactgtatgggcttatgtcgtaacatagtcgtaaatcgatgactaattgacgactacattacttagcaactatgtactaacgactttagtcattaatcgcggattagttgtattattaacattgacaactactaagcaactacttatgtagtcgtctatcgcctgatttcgtgtcgtgtggcgatttccgaagacctacgcgctcccacgattgagccgcttaactaagcagttgagacctacagtgtgagtcactcccgtgatcaaacgtgatcgaatcagaaactgttctgttttgatggaaggaaagatggaggaattgttttgttcttttgtctatgcaaggaatactgtagaggagaggaaaagtttatgggaggacttgagaagccattaagactcgccagctatgtaaaaaaaaaacttggataattatgggtgattataatgagaccttgatgggagggacattgtgaatt

SEQ ID NO: 14867 - DNA, 558 bp, Arabidopsis thaliana columbia
ctttcgagaaaatgttcaatgcttcattgtttagcaatagagactggtttggttggggattctagtttgtgcaatgcattgatgaatctatatgcaaaaggcgagaacttgagctccgcagagtgtgtgttcacgcatatggagcatcgagacattgtttcttggaacacgatcatgactaaatgtcttgcaaatggtcatcccaggaaatcgttgcaatatttcaagtcgatgactggttcaggacaagaagctgatactgtgactttttcatgcgttatctcagcttgctcttctattgaagaacttactttgggtgaatcactccacgggttggttataaaatcaggttatagtccagaagctcatgtctctgtgggcaactcgatcatttcgatgtactcaaaatgcggggacacggaggctgcggaaactgtgtttgaagaattagtgtgcagggatgttatttcttcgaacgcaatccttaatgggtttgctgcaaatggaatgtttgaagaagcatttggtattttgaacaaatgcaatcggtggataaga

SEQ ID NO: 14868 - DNA, 281 bp, Arabidopsis thaliana
tctcactcttctctacccaccacgaatcaacgaagctgctttcgagcttgatgggtccaagatccgacccgattccccagctttcgtgacgcttcacagagtcgtgaaaggaggagacgtgatttacgggtcaagagaacgtgttcgggtctgggaagggatccgcttcgaggtgtacatgagtgagaaaagggtgataaaaggaatttccgaaaaggcgaagggggccagttggaacctgagttccaattttaaatgggaagaggaaggaccgccggaat

SEQ ID NO: 14869 - DNA, 596 bp, Arabidopsis thaliana
tagtaacgtccgccagtgtgctctaaagattgaaaataagccactatttaccacggacgcacaagagaaaagttggctctatctgttatctaaatacagcgctaaccccgttcaggcgttggcgaattatacggtacagtttgccgacaaccgccagtatgttgttggcgcgacgctaccggtgctgttaaaagaaggtcagtacgacgcagcgcaaaaactgctcgccaccctccccgccaatgaaatgcttgaggagcgttatgctgtcagcgtggcgacccgtaacaaggctgaagctctgcgtctggcacgattgctgtatcagcaagaaccggcaaatcttacccgcctggatcaactaacctggcaactgatgcagaacgagcagtcacgcgaacgtgccgatttattgctgcaacgctatcctttccagggcgatgcgcgtgtcagccagactttaatggcgcgactggcgtctctgctggaaagtcatccttacctggcaacgcggcgaaggtggcgattttatcgaaacccttaccgctggcggacgaacgtcagtggcaaagtcagttgccgggtattgcagataa

SEQ ID NO: 14870 - DNA, 806 bp, Arabidopsis thaliana
tgcaaccctatcagataattttccaaacctttatctttattttgatgtattttctaaggcctcactggtttaaacgcaatgggtacggttgcggttgcgggagtttgcggaaatgggcggttgcagtttcaagcgttatcaagcgttttgaacgattggttgagcgtttgataatgggtacgtttgcgggagttttatgactggtaaaccagtgggtacgatagtaattaaataaaaaataaccaaaataaatataatatattactatccccccccctacatatccagtatatcatgataaattgataatattagaaaacttgattttctgaccaaataaaaatacaatatatcatctcgtccgaccaaatgatttctaatcgagaaaacaaatcgaaacatgtattcaatcaaaaaactaaaaagaatacaaaataaaataaaaacaacgatgctatgaaatagttaaagaattacactagctaatgaatgaataaaaggttagatgatacttatgtttgattcttgattttgattttcatcggatgccataattgagacaatagggttataatatattgattaaggttttctaataaaaataagatatataaaagattagattattttaattataatgattagagtttgggtgaaagccgcaattatttaatttaattagaaaaagttttctttttaacctaaccgctaccagccgcaaccgcaaacgcttgcgggaaggagctttatgaaacgggcgatttcgagcggcccaaagcgatgtctagcggtttttatgattggtg

SEQ ID NO: 14871 - DNA, 551 bp, Arabidopsis thaliana
aatgttatagttctcatgaatactaacataacaagtgaaagtaaatttaaaaatgttcatggacctaacctggcgtaagcgatgtctttgccttcagcagaaagtaaattactgacggctttaggaacacctaaaaaggcgggtccaatgttgacgacggatttgatgtgtttggcacaccaacctggaccacccccaccgcctccatcaggaagaggtgtttctacccatttaaggaagtgaaggaaatagatagcccccattgaatgcggaaccaccacaactttcttaaacccattggtggcatacattagctcgattttgctcttcagtctacttaacgattggtcacgtacctgctcggtttcaatccaaaaactatagattagtcccaacacaacccaatctctacaacaatctgtaattacatacactaaagtagctaagcatggatgtcttatcatcgttctctagactaccagtgttgtcactgtgatcatataggtattaatactactaatctgagcatacatcggtgttatggaaagaga

SEQ ID NO: 14872 - DNA, 1012 bp, Arabidopsis thaliana
ctaatagcaaaagtaaaaccaaaagtaaaaccaagtgtcgttagctcaattggtaaagatcctaggcgaagtttaaaggttgtcggttcgactgacgcttgggacgaaactaatattacatgctgtggtttcggttctggaggattacgggcttcagtccagaacttcatgatattcaaaaaaaaaaaaaaaaagtaaaaacaaaaataaaataaaatttcacagtaactaataagcttcttctctctgatcaatgaaatagaatgcgtaaagacaaattttgatcataagatatgaatgtatagtgggcaaagtatactctctggccactattgatgaattagtggatactaaggaaaagtggtaggtctggcaaaatccttttctacatgtttattattacattcaccacgtgatttgggaacacgacaatagttgatgagatatcagaattcggttaggtaatattatataattggactaaacaagatcattagcaaatcattgcacaacataactactctgtacttgcttatatatacctatttagtgttatttatttctaactgcatcataacacataaaacacagtggacgtaactcctctgtttcctctgttctctgtcatggctagtttagtctctggtgataaagaagctcaaatctctggcgatccaggcagcaagcgcggtggatggatcactttcccgttcatgctcggttagctagtgttttttattgttttggttttatgttttcgaaaccaaaacgttgacaaatgttgggttctatgtcgtgcagctactttgttaggcctttccgtgacttctttcggatgggtaatgaatttgatcgtcttcctaatcgaagagttcaacatcaagagcatcgctgctgctcagatttcaaatgttgccaatggatgtctcagcatgttgcctgttgttgcagccattctagctgattctttctttggaaacattccggtcatcgcggcctcttctttcatttc

SEQ ID NO: 14873 - DNA, 619 bp, Arabidopsis thaliana columbia
tagtaacgtccgccagtgtgctctaaaggcatgcgcgtgtctcgagtccatcggatagttacaaaaatttgaatggtccttgacactgtagatgatgaaattagcagagttccacgcaaatgctactgcagcaaaacctcctaaacgaccttctataaagcagagaaagcaaaggttactttcctttcttagaggtattaagcaattcggatctcagaacttatccaaaactttctgctgcgttttgcgctgcttatactggagtgttttttttcattattggcagaaaagtatgagccggtcaacgtgaaatggacaaccgagcgatgtgcagtttgcagatgggtggaagattgggactacaacaagatcattatctgcaacaggtgatgttctaaactgtgtagtttctcttaaactttttgacaaatctaagattctgattgaaaagcattatttcgtcatagagtaaacctttgtgatagcttgatttgatgtttcgattatcttcaatctttggatcaccagacagttcttattatattgaagttcttgctattattattcagaaaaaaaacgagaaatatctgcttgtgaacatatttggtacattgaattt

SEQ ID NO: 14874 - DNA, 668 bp, Arabidopsis thaliana
aacgtttcgggattcttcggcaaaccgggaatgtaactcttggaaatatctccactctgccgcatctgaaggatgattcatttctccctccttcgattggtgctcaacatcccatcgcattgtcgcagcaatcttgtggctctgatacattctcttcaatcggttcccaataggtagataccacatacgactatatggtactttggttcttcgacggttgtcattaggcttacatctttgtgtgccacaaaatcgacattcatcttcttttcgtcttctttccaaaatagcatacaattgttcttacaaacatcaatcgtatgatatggaagtcctaaattgggcatcaactttttggtctggtaatgtgaagtggtagcctggtttccgtctggtaaaaaatctgtaaacatttcgcaaacagagtccaccgacttttcactcatattatactccgccttgttgtgcatgagtcgagatgcaaaggacaactgcgactgcccttcacgataactatcgtacaatggattatttgcaccttctaacaagtcataaaatttatttgaatggttactgaccgcttcttccacattctgataactaccatcctgatgatagttatcatcaaaccccacgttaaaccgttagtatatgcggctagagtcgac

SEQ ID NO: 14875 - DNA, 696 bp, Arabidopsis thaliana
ttttttgcttataacataatttaagtaattttatcccccttttgctttgtataaccaagtcgcagcccacaaaagttcatcctatttttacccccaaaatatttgaaaacataaagtatcttgttaagtaactcatttacgtaaacatgaaaatatatctatgtgtatcagtttcattatctggtagcctgagtgtgagcagtagaaggggcaagatgcttggtaagaacctctgtacttatcagcaaattcaaatagctgccacaaatatctacacgttaccttatgattaaattgatgtaatgaaattttatggacttaacatgaatatatactcacgaatttagaatggtttagtaacgtggatgaataagtagaatccaccggtttgaaaacaagtgaggccgcggcaagagcggttgcggcttcagcagagacttcggaaccaggggaagaagaagatatattgtagagagttctaggtgtgtccatatcttttcgcctttcccaaccactatgatctgaatttccatctcccaacttttttataaaaaaaaacagtgaatttgttgaatattatagagatagtacataaaatacgagatatatactatttgggatatttaacataaaatgaaatattttggaatatttctctatacaaaagttggtttacctgtgtatatagcatgttgg

SEQ ID NO: 14876 - DNA, 404 bp, Arabidopsis thaliana
gctgaaaagatattaaagcggtttaaaaactactcaaaaggaactgcaaaaactcgtgtagattgtcaacttcacttgagaaatagttcggatgaagctgtatcacagattgagtatgcaagggttatcggaagtcttatgtacctaacaaattgtacaagacccgatttagcgcatgcagtaaatgtattaagtcgctacaccagtaatccaggtcatacatactggaaaggcataacaagagtgttaaattatttagaaataattcttaagatagaacacacttgtatgtttattcctagaatagaacagatcttttttttattactcagatgttttcagtaattgtgtaattacaattaacacccctaattagtgttaattaattattataatttaattcg

SEQ ID NO: 14877 - DNA, 575 bp, Arabidopsis thaliana columbia
atttttaagctttttgttttttcgttgggtgtgtgtatagaaaatacagacattgtaaatttgtacatctgatgaaatacttttcttttgatgtgtagatatacccattcatcctcatatgagcaggctcagagagcatttcaggctgcacaagctatccatgatttgaatggtgtagcaagtgtccttatacacaatccttaccatattgagtcgctcataactatggcggattactttaagtttgtaggtgagaatgatatggctgcagattccattggaaaatgcttgtacggtttggagcgtgcgtggcatcctatgttcactccgttccagggtaactgccggttggagtttaaccacgatgaaaacaagctgttcttcaagacgcttttcactcacatgagaaacatggacaggcgtggctgtcataggtcagcgttggaggtctgcaaactcttgctttccttggacacgagtaatcctgtgggcgctttgtattgtgtggctactttgctttgagagcagaggagtatgcgtggctggagcaattctcggaggagtactgaaatgat

SEQ ID NO: 14878 - DNA, 536 bp, Arabidopsis thaliana
aactttttgaacactgtcacaacaaaaacgcaaatagtccatccactgatagtcggacaaagttcggaaacagaatgatatccatccatgttgacaaacgacgacttcctttattagtggggtgggctcttttttttggataggatgaaatatgaatggtgtaaaatcgattgtaatcctgtcttaaataatattccaaacgacgcgacgattggtactcgcagtgccacctgtcactgctaatatttcaactgacgcgttgattgtgatgccacccgtgtatatagttgacccagatgaacctgttgtactaggtttgccaaacaacgactagttcgtagttgaacctgttgaactatgtttggcaattctgttgaactaaaaaacttaactatgcttaaaaattccgaaaacacaaatctaaacacaaaggattgttcttaattgaacctgtcgaacaatatttgacaattccgagaaacacgaatttacacacaaagactttatcgtagttgacttcttgtacctagtgacga

SEQ ID NO: 14879 - DNA, 596 bp, Arabidopsis thaliana
tagtaacggtccgccagtgtgctgtaaagctatttccgaacatctgcaaattggcattcgggcgatcgatttgctgcgcgcagaaggcgaccgactgcattcgcgtaaattacgaacctttaatgagccgccgttccgataataagttctgaaccttcttatcagaaatagatgtgaaggagtaagtaagacacctggcaaatagcctgcaataatcgtgggctgtttgcttccttgggcggatacgagttttattatcgtcttaatgatttccacatattaaaagcaagtatgctttcaaaacacaattataaaaaatcccgccaacaatataagtttttataaaattaaatataagactatggctttagaatattttcatttctaatagacgagatttttcctgttatgatataatacgctgaattaacacatgttaacgatttaccagtaatgtaaataaattttcgaggagatcattccagtgggacgtaaatgggccaatattgttgctaaaaaaacggctaaagacggtgcaacgtctaaaatttatgcaaaattcggtgtagaaatctatgctgctgctaaacaaggtg

SEQ ID NO: 14880 - DNA, 567 bp, Arabidopsis thaliana columbia
  unsure (1)..(567): unsure at all n locations
ttcgtaatcatgataggatccccgaatgaggttcttcagagactacaaaacatgcttctgtttcgtcgagatccaccattggagcaatctccataaccattgtcttgtatttctttggtggtgtcgacgatttttctcctacttgactgatatcttcatcatgaagctgagacaaaaccgaacttgagatgctttgactttgttcttcttgtgattgagaaacacttgtgggtgtactgcagttcttcttgacttcaacttgtcttacccaatcccacttatttccttcttcaaacgccacatctctagatatctcaactctctccttatcaagtaggagtactctatatcccttggatttgttgctgtagccaatgaaaattactctcatgtccttttcgtctagcttccttctcttctccttcggtatatgtatgtaacatatactcccaaaaaccttcaagtgttcaactgttggtttatgaccactccacttttcgatcggtgtgacatcatcttctattgcctttgtagggaaaggatnttgcagataatttgacatatata

SEQ ID NO: 14881 - DNA, 784 bp, Arabidopsis thaliana columbia
caacttcctttaacatggaagtcgcaaatcttcatttctttattatgagccaaaaagatgtctagttttggcttcattatttgaatcattgaagatcgtttcaatgtgtataatagatcactttggtctgtactcttccctctatatactagccacctatcatgcaagctcaccttctacaatttttatgttataagaaaaaaaagttgtggatcagattttattggatgatctatgacgatttaacatactcgaatgagtgatgatgattttgatattatttacaattagttgatagacgtattgaaaaagtgtacctccatgcaagttataagagcatgtttgtgtatatatgatttgcataatgaaattttttttttgtatcaccatgaaaaaattgtgcctctccatgcaagttataaagaattgtagttgatagacgtatacttacattttctctcaaagtcaagattggagtatcgtatgcgtccaataaaatccttttgtcgctgatgctaaacaaaggttccttgactttgaaaaggagattgccgttaacgtccgtgacggcgaagttaccatcggttaaagtcatcaccttccgtacgattcccaactcgatagggtacggtgcacagaaattagggctaacgatcgccatctttttgaagatctctctctgttttttttttctcttttacgattcttgtataaggtggagatttgtgttcgtttctcaatctttttagttatttataattaggatattccaagtattgtgtga

SEQ ID NO: 14882 - DNA, 706 bp, Arabidopsis thaliana
caataatgcttccaaggtacgatgatcatccactcactctttgctatgggaagaaaaggcaagcggcaaatattggtgtgatatttgcgaaagagaaacaaatccagagacttggtctacacttgtaacgattgcggtgtcacattgcatacattttgtgtacttggagatatcagaaatgccaaagcaggaggaagtttcagacaccatggtgaacttgaattgctacctaacaatagatctacacgaccactttgcaacagttgtcatagtcgttgcccaggttcattcattatgaagagttatgacggcggggaagtttattgttcttgttattgtgtctcatctcagcttgggtatacatacaagggtgctgatacatgccctccatgggcagtaagacgtaaagcctattacaaaatcttttttgaaaggaaaactatcttaataggttctacttcttaatgttaatgtttgagtttgaaactcattcgttttttttttttttttttgcttttagatatatgagcttgaattgattgttgttattcacgtcaattatttgtctacctatattctacactatttgacagctattgagagatcactctaacggtcatgtgcagctttgactttggcacgatttgattaccaacgtttattatttctaaattgtatttctaactgatgttgcctacaacttcat

SEQ ID NO: 14883 - DNA, 498 bp, Arabidopsis thaliana
cactccaaaaacaaagaaaagtgtctcaaccttggaaagtgcctgttttgtctaaactttttcccaaagtgccttattacgggacattcccttactataaaacctaagaaccgattgattttatagttccaaggtaaaaacgaaatttaccactaagaaaaatgtcgaaagtgaaactaaaaagtaaaaataaaaacaaaggcggtgatagtttttctagtaaacaaaaccgctataaaccgaattgaccgaaccagaattaattgaataaaaaagtaaccgagtcttaattgtcacataaaccctaaaattttaaggacttggttactttcacagcaaggaccgagagatttttcagaggaagagaaaagggtttgaaacaatgacgttgacgatctccgatcttccaagggatctgaagaagaaaatattctcaagaattccgttgagatatgtgagagcattgcgattaacctgcaaagagtgggaaactttaat

SEQ ID NO: 14884 - DNA, 623 bp, Arabidopsis thaliana columbia
ggttgatcaatggtgtttcctctttgtactcatgatctcactgattcactagacatgtcagatgacagtgcaaatcttagctctaccgaagcgactcaagtcaagagtttaaaggggccctggctttgtccatggggtaccaccgtggttgatgaggtagctccagcatttaaatcaatattggaggaaagccactcatcttcttctactactgaagaagacacaatagagagtaggggcctgtggtggaaaaagagaaagaaacttaatcatcgtctgggaatattcctaaggtatgctggctctctttctataacacgtgcacatgtctgtctatattacatttacaggactgtgttttgatccatcttctgaattgacaactgcgtacgagcctgcatgtttgtaaacaacattggataaccattcttttattctaggaatctagaagcttcctggctgggtccctggaggtgtctgcttctcggagaatggtcgaactacaaattgcctgactcagcgcagaaaaagctggtaaatgatctcaagtccaagtgcaaaatggaagtaaatgagatggttttgaaggttaattttggaggtgggcaggatactttaaagga

SEQ ID NO: 14885 - DNA, 515 bp, Arabidopsis thaliana columbia
taaagtatgattttatcatcggtcttgaagcgacatgatgctttgacaagatctctgcaatgagtagccgaccaaacatatgagagttcttgagaatgaggtttcttgtggaggagtcaacaacatatccttgaccaggcatccattgtagaagttgaagaagcaattcctttttatcgggctgcgaaatgtatcgagaaatcgcaatctcaaactgaacctgagaacaaaagtacacagtgaaggcaagaaatgagattcagtatgattaaagaacgaaattttccttatttctcaactgtaatgaaaattatttccaagtaaaacgttggcaaaatagcatcaaattgttaccggttggctatttacctgatcgattttgtggccagaaccatgcaatactttcagaacatcattcactaaattaatattacccgagatcataattgctctgccaaatttctttaaagtaggctgtgagatcatcttcgcattgtcctgaaacagaatgatga

SEQ ID NO: 14886 - DNA, 533 bp, Arabidopsis thaliana columbia
aatccgtagaatgttattaatcctggtggcaatgtccctagcttccatagtgtcctgttctcattctaaacaacacaagccaaaatgagcaaaccacaataaataaaataataaaccatcattagactatttgttgcaaagaattaaagagttatttaccatgttttgccacttgtggtatataccagtgatgtctctcttcttccattcctttaggtcgaacatgttcattccataagcccatccacaagcatttggattgaagttcctcgcaatgtgaggattcgaaaagttgagatacttgtcgaatctgtggaaactttccccacaggtttcgactgcaccgttgactttgccgttcaggttaacttcccagagtggagtcaagtctttctgaacaatgatgtcatcgtccaggaagaggattttgttcagcttgggataaacctcagggaggtagaatctcaagtgattcaacatggatagatactttgggtttctgtattttagattcgaagagcctgaagttggat

SEQ ID NO: 14887 - DNA, 788 bp, Arabidopsis thaliana
cattttgaatacccagaaaccatggcagtcgaaacaaacaagtttctcactgacatcttcctaaaaaactcccttgccatatccatacaaccagctccagcatacatagtaacaagagcagtcaacaaatgagtatccatcctaacatcattttctatcaaaaactcgtaaatagctctgttatatctcatattcccagtacgaccacatgcagagacaatgttacagagaatcatttcatctggcatcacattagaatccttcatctcctcaaaaagcttaaaggcttcatctacaagaccgaatcggcaatacctacaaaaaagttaaagttaacaacttttaaaaaagaaaacactaaacaacatttcactctgtttatgatcctaacctctcaatcatagtattccacgtaacaacatctctatgcgacatttcgtcgaacacattgcgcgcgtagttaattctaccacaagacgcgtacatatccataaaaccagtctcaacaaaagggtcgcacaaagtcgcaatcttgaacgcaacgccgtgaagctccataccctcgaacaaggccgagactttggaaactgctttaagaatcggaaggaagctgaattgatcaagacgaccaccaacatgtctaatcctctgatagaacagaatcgtcgctctaggttcactggaacgagatagatcccggagaaatggattgaagacgatggattcaggcggagagggaatagatgaaaagacattgagagcgtcgtgagattgatagaggaaggggt

SEQ ID NO: 14888 - DNA, 386 bp, Arabidopsis thaliana columbia
gacaatccccacatatcctcaaattcttaactacaactaattcttctccatctctagtcgacatcaacccaaaagccaccgctagcttctcgctgtgatgtcctaaccgcatttcttcgtccccttcgcctgcttcatcctcttttaccattgcccatttcttatccatcacatacccaactttcttcatcttcttcatcatctcctctagatattcattcacttctcgtatcatcggatgagaccaatcttctgcgacgaatacatgctttttcttcttcacttcgatgcaactacatcccggtttcttccgtatccttttccccctcattgatttcctcaccgaggcctatctcttcccatttcctggcatctgcatacatgtt

SEQ ID NO: 14889 - DNA, 596 bp, Arabidopsis thaliana columbia
tagataagcaagcacctctgcaaacttaaatgcaactaaatcaacctaaaacaatctctttctcgacgggggctcgattgaatcttaaaccctagcgagaacgtgatttaactgaagtaaacatcaactctagaagaggtcaattccggaacagaacagccacaaaaaaaacctaaatggtgttattatacacatctgcctagaacccaggtatgaataaccactcaattcaagtttcagtttagagacctcaacagaatctgagatctgggatccaagagtactagaggaaaaaggataaataaggcatacctgcatagctgttggtgacatcaacaacaccacgagagctgctccccagaagaacaccgacgacacgcttgcttgaatccttagcgacgcgattgtaatggtcgacgatactaagcaagactagtggatgaacaaccactttctcgatcgtccttgctgaaatctgttgcgtcttaatcacatccattgtttgaagaatcaagtaatctgatttctccggagaagatttgaaaaacgtgaactttccgatctggttttcctttttttccgacggagcttgagag

SEQ ID NO: 14890 - DNA, 345 bp, Arabidopsis thaliana columbia
gaggatcccagcggctgcagacgtggcaaacggatctgcgactccagtggtggcacctgaaccagcagaattctcgaacctgaactcagaaccgaaccctctagactgctgcaacgtctgagcaaaggcttggtacttcctgatgtctgcatcactcacactcctacgcgcatacttcatcgactcctcaaagtgtgcagctttgatctctgatacttcatccactccatcttcctccattgcctctgggttctcgctcctcctcttctccttttcaatgtcctgaaacaaaaccaaaacatgagcttcagttcaacgattggagagtataacatcttttgataa

SEQ ID NO: 14891 - DNA, 449 bp, Arabidopsis thaliana columbia
tccggaaatgtattgacatcggaagataacatgcagtttgatgtcaccaatgatggtttacgtgtttcttactctaataaatccatgacgcctttttgtgccgatacaatgaagagaatgaagatgaaaggtatatctagtgaagagggaagtatgaattgtgctgtagaggtatgaggaccaacctttaaggactttggtgggttaaccagtttatagacaatgcttataccaatcaataatcgatcaaccagaacctatacttgaacacagagacttgcttccctaaaactgaaaactttgcataatcacaatcaaactattccggattacatacacattatgttcagagacatcaatgatccagacacaacagagaaggactcactactgagatccaatttcatagctcccatcattctgcaaagtcatatcatacacctgagaag

SEQ ID NO: 14892 - DNA, 735 bp, Arabidopsis thaliana
ccggataggtggtaggccgttacgtgtcttcaggaaacacatccttatagtctttggtttccttggccgatagttgaatttgattctcatatacctcttgtggtgttcatggaatcagagtcgttttcttgcctatgaacaagaatgagtaccgatttgtgaagccatcatgaatcactctccgatccgacagccatggtcggcctaaaaggatatgtccagcgtccatcggcagcacatcccaaagaatttgatcatggtagcttccaattactaaaggaacaaccacttgattcttgacactcatttctccatcatcgttaagccattgtaacttgtacggcttaggatgcttttgcggcttcaaatcgagtttttggaccattgtttcactcgccacattcgtacagcttcctccatcgatgatcaagctacaaactttctcattgacaatgtatcgcgaatgaagtaggttctctctttgctcttcttcttcggttcgggtttgaatgcttaaagtcctttttgccacgtaaagttctacgagctgttcttcatactcatccgaggatgagctcacgtcttgcttctcttccggatccttagaaactttcctcgacatcaagagcttcccattagccggcttagcaatacactcatcggacgaagaatcaggttctggcacgaactcgtcttcggatttcaactcgacattttcccttatcaccatctctc

SEQ ID NO: 14893 - DNA, 759 bp, Arabidopsis thaliana columbia
gtaaagacttaaaaaggttcccaaaaccatcctagacaagaagctagcatcaaataatccataaacatcatgaaattcaaggaattagagatatttcacctttgaaaacggaaccgaaaaggggaatttcgagctcatacctttgcagatcgagaaaacagacaatagatatgaaaagaggcaaaaatccgattgaaatagataccaattttgacaaaaacgaccaagaattgagagagttagggtttagtgattttggtgttcttgataaacaaaaacgaagaagatgaagtggagctcgataataccttggttttgcaatgtcgtcatggtgtttctgcactcaaaaagcattctcacaacaccgtcaaatacagagactctatcgactcaacagccgggtcgataagtctgaactctacagtggagtgaatcaaaccaaaatcaaagaaaatgaaagaaggaaaacaaagtatctacaataccttgtgggttgcctcccacggagcgcttgcttaaggtcgttagcttgacggcagtgagctcttatgccttatttggatccgttagaggaactgcagtgccctcttcaagagtggaatgagcaaggtacggtttcagcctttgtccattggtagaaaacggttttccattgttatcccagagtattgctgaaccgttagtcgcatttccattatgacgaaagggcctgaccattttgaacgaagttttccaggaaatatcttgagctttgagttg

SEQ ID NO: 14894 - DNA, 954 bp, Arabidopsis thaliana
tcaccgtggcgaatatcgtcgtatctgcacgctgggtgagaaactgcgtggcttgctggaagaagatgcgtttatcgaacgtggcgagcgtcgtcagccggtagccagcttcgagcaggcgctggactggctggtgaaagagtcccgtcgcggcctctccatccagcgttataaaggtctgggcgagatgaacccggaacagctgtggaaaccactatggacccggaacgtcgtcgtactgtgcgcgttaccgttaaagatgcgattgctgccgaccagttgttcaccacgctgatgggcgacgccgttgaaccgcgccgtgcgtttattgaagagaacgccctgaaagcggcgaatatcgatatttaatggcgctaaccatgcgagcgtgcctgatgcgtacgcttatcaggcctacgaaaatcttgcaatgtattgaattttcatgattttgtaggccggataaggcgttcacgccgcatccggcaagaagctataagaaaagggcggagatcatctccgcctgttttatttctgcaatccgcaattatcatcccgcaaatctatactttttgggtcaacacgtaacgctttacaggtgattatcatggggctttttgatgaagttgtcggtgcctttctgaaaggcgatgcggggaaatatcaggctattttaagttgggttgaggagcagggcggcattcaggtgctgctggaaaaactgcaaagtggcggcttaggggccattctctcaacctggctgagtaatcaacagggcaatcaatcggttagtggcgagcaactggaatcggcgctcggcacaaatgcggtgtccgatctcgggcaaaaacttggcgtggataccagtacagcttccagtttactggcagaacaattgccgaagattattgatgcgctctcaccgcaaggtgaagtgtcacacaagccaataac

SEQ ID NO: 14895 - DNA, 528 bp, Arabidopsis thaliana
ccacttggtaatcggacttctcttctccatgaactcttagttgattactcagattaatcaacttggttgtaaaatcatttatggtttcaccttcctccatctttagattctcatattctcttcttaaggtctgaagattgatcatcttaacttgtgaacttccttggaactccatttccaaagcgttccacgcttctgttgcgcttgatgccggagcgattctcggaaatattgaatcagaaactgcactttgaagaatctgaagagccatcatatccttcatcacttgatcgtcacgctctctagttaacgccggtgaggtttcaggcgacgaattcgacgtaaccccattttcgataacatcccacagcttccgtgttttcaagatggttatcatcttgattttccaaaagccatacgattcaccattgaagattggaataacttgctgcattgttgtcccatagctctgataccatgtagaactttgatctctcaaagttattaaggatcggacaacacagattt

SEQ ID NO: 14896 - DNA, 578 bp, Arabidopsis thaliana columbia
aaaagaggagaataagaagaaactgagagaagctattgagctagaagagaaagaaaaaagactgatagaagcttttgagagggcagagattgagagaagactgaaagaggatcttgaacaggaagagatgaggatgaggctgcaagaagccaaggaaagagaaagactacatagagaaaatcaagagcatcaggaaaatgaaagaaaacaacatgaatattcaggagaagaaagtgacgagaaagaaagagatgcttgtgaaatggagaaaacctgtgaaaccaccaaagaggctcatggagagcaatcatcaaatgaaagtcttagcgacactctagaagagaatgagagtatagacaacgacgtatcagtgaacaaacaaaagaaagaagaagaagggacaaggcagagagaatctatgtccgcagaaacctgtccttggaaggtttttgagaagacctcaaagacgccagccaaaaggaaggaactaatgagatggatgctgacacgaggttgtttgagaggaatgaagagcaccacggcttggtgagaatggaggatgtacctacaaaatggag

SEQ ID NO: 14897 - DNA, 609 bp, Arabidopsis thaliana
tagtaacgtccgccagtgtgctctaaagaagcggcacaggattacgacatcttcctgcggatggtggtggagtacggcgaaccgtggaaagtagaagaggcgacgcagatcctgcatatcaatcacggtgaaatgcagatcacctcgtcaccgaaaaaattctccgggtacttccacttttaccgcaagcacaaagacaaattcgaccgcgccacataaaaatatcagctgtttaccctctaccagatccgcaataaacgtatgacctggcgcactttgctgacgctgctgtcggtgcgtaacggcaaacgtctggctgatggtattcgggggcgctaaagatgctggaagatctgcgcgccaacagctggagtttacgcccgtgctgcatggttcttgcctatcgtgttgctcatttttgttcggtgtggcgcaaaaagaacgtcctcaacaatctgtgggcggcccgctgctggtgctgtatcgcattatcaccgaatgctttttcggttatgaaatccaggctgccgcgaccattggccgccgctttactatccatcacggttacgccgtcgtgatcaataaaaacgtggtagcgggggatgattt

SEQ ID NO: 14898 - DNA, 579 bp, Arabidopsis thaliana
gctgagtcggattccccatttgtcgcagaagccttgaaagagcgttgatatgaattgcgagccattgtccgtgacaatctcgtaaggcatcccatggcgacacaagatgtgtttcaatacgaagctttccacctgagcatctttgatgctggcataagattcggcctctatccacttagagaaataatcggttaagatgagaaccaacttcttctgcctcgagggatgcatgggtccgattatgtccattgaccagcgcatgaatgggtacggcgagacgattgatgacaggagctcggctggttgatggattgttggcgcgtgcctttggcatttttcgcattgtttggagaaccttttgcaatatttgatcatcgtcggccagaagagcccgtggcgttttattttgatggctagggctcttcccctggaataatttccgacacgagccgtcgtgaacttctttcatgactttgcgagcgcgcttctttgtcacgcaagtctattaagggtccggataatcggcacttgtagagtttctcctcgaccagaacaaagcgcgcgacctgagctctaagt

SEQ ID NO: 14899 - DNA, 550 bp, Arabidopsis thaliana
tggtccactctatagtgtgtgttgcggtgtcagtacctgcaaagaaaagatcctgtagtatcaaacgtttcttagtcaagaaaaaccattggtgttcgctaaatttgttataagagatgaatatttaccacaaacaaggacttgatatggtctctagtgatcttatactcggaagttttgtctccataaacttctaagagcttatccattatgtcagtaccttgttgattctcctcaagtctctcttcgttttccacaagaatcttctctaacacctcgtcaaacttgagagaaatatccatgaacacctttttaaacagtgtgatcccaatcttcttaagtggtttccgcaagatggccgccagcaaaaacttcttcaacaaggcatctgacttggtcaccaagcctctaattctctctgcttcaccattttcttctgaacaggtcctccccataatcatcttgcagattatgttgttgactagcttcatagcttcatcagcaatctcaacactttctttcttcatcgccttatctaataggtttgagt

SEQ ID NO: 14900 - DNA, 541 bp, Arabidopsis thaliana columbia
cctctacaacgagcacaatggataaggtcaaaaacagaaccgggaaacggtaatcttttggttcccataacgtttaacattgcaggaataccacgttccagcgcgaattgcacttgcgcctcatgctcatctttgggagcaaatgacaaagcaagcacatctctttcgaaaaggtaaccaccaaagctagcaactccacatccgacatccaatataacacgggttctatttccccatgcaatagcaggatgtgactgcaacaatataattaattcagtacttatcattcctagtaatgaaaaaattatgtggccagtataaaattttacctgttggatgaaatcaatgtaatgaagagcaccattcttaaactgagtaccaccaccagggaacgtcagatgttcaccactcatcttcacccaattttgatgccccttgatctctgcaagcttggtgtggggaacattgttgtaccagatctgtgatcacataacagaagaatatatgtcatgacacataatacaagagagtgcaagcagtt

SEQ ID NO: 14901 - DNA, 604 bp, Arabidopsis thaliana
cattaacaacaagtgttgtcttctccggaacataaaagcctccaatcgtacacccttctttaaacgttcttaacacaagaggaaccggaggtgcaaccttagcccttctttgacggttgcttgcaagcacgggaggttcggtagatcagtttcttgaatcaaccttgtttttcctacaacagaatcaatttcttctctcaatctctcaagaatgtacgagttgttaatgatctcggccataatccattgtatagcgtgcgtccaggtgtcagtgcctgcaaagaaaagatcctgcagtatcaaacgtttcttagtcaagacaaactaatggtgttcgctaaatttctcataagagatgaatatttaccacaaacaaggacttgatatggtctctagtgatcttatactctgctttttcgtctccataaacttctaagagcttatccatcatgtcagtaccttgatgatgctcttcaactttctctttatattctacaagaatcttctccaacacctcgttgaacttgcaggaagcatccattaactcctttttgaacagtgagatccaatcttctgaagcggttccgcaagatgcctgccaaga

SEQ ID NO: 14902 - DNA, 758 bp, Arabidopsis thaliana columbia
gtcagacttttatctaaacgaactcgggatagtgtttcgacagagaaagctgcagatttcccttcatgaccagattttcatagcctcaattccttcttctgaaacgtggctaacatttagtgcgagaataggttccagaatgtgtaatcttgcaatcttcctctgttgacaacgcagacgaaaagttagagaagttacatatactttgtggaatgaatgtaaactatattgtttaaaaaaatgaaaaatttaacctgtgtgtctctaggttgtgtgatagagtgtagacatttggatgatgtactcattttgtcaatctgttgcgaataacgaaagagtaagatgtgatggagagagaagttttagtactgagcaaaacggtttacaaatgagtaataaaaacagagtaattatttggaagtttctcttaataggtcacaatcgtgagggatgaagcttaatggggagtacgggttcagttatatattaactctaaatataaaagctaccacttgaattccattaaagcaaattcatatacaaaaatgcaagtcatagtctgaaacaactctaatcatttgtataataattgtgacaccttatagttgaaaactcgaacaatatataaataaagttggctaaatatgcaaaacagactaatacataacaccaggtcatagtggcttatattcaaatattagttctgcaatcgagaagagctgtatgatgcacatatatgagattggtactactgagag

SEQ ID NO: 14903 - DNA, 565 bp, Arabidopsis thaliana
  unsure (1)..(565): unsure at all n locations
tagtaacgtccgccagtgtgctctaaagacgtgtttatcttattgccgccgtagtgagtggcgctctggcggtatctggctgcacaactaacccttacaccggcgaacgcgaacagtgtaaatctgctatcggcgcaggtctgggctctctcgtgggcgcgggtattggtgcgctctcttcttcgaagaaagatcgcggtaaaggcgcgctgattggcgcacagtcaggcgcagctctgggcggcggcgttggttattacatggatgtgcaggaagcgaactgcngcgagcaaaatgcgcggctactggtgttagcgtaacccgcagcggggataacattatcctcaatatgccgaacaatgtgaccttcgacagcagcagcgcgacctctgaaaccggcgggcgctaacaccctgaccggcgtggcaatggtactgaaagagtatccgaaaacggcggttaacgtgattggttatacgacagcacgggtggtccgacctgaacatgcgtctctcccagcaacgtgcggattccgttgccagcgcgttgatcaccagggcgtgga

SEQ ID NO: 14904 - DNA, 608 bp, Arabidopsis thaliana
caaaaggtaaaacctttattattgttattattatatctataaagaaaggttcgcaggttaacatacgctaaaatgtaaaccagaattctaccctagaaacccgaaaaagctttgatttttatgattttcccatataggtgggctctaaagatcactccggttcttcatatgtgagcataccgcttgaaaacctgcttccccgccacaactgcaccagccgcaattccgccaaaagcaccagccacagccgcagatctcactcctcgtgctgccctaaagaccgctccagttcccagaccagcgacaacactggtccaaacatcgtccttatcagttaccgccaccacaccactctcaatccctgcgtagatcaacccaacaatcccaaccctattaccccaagtacgacctgcctgaccagacgaattcaaaatcctgttgattttcagcttcgtcgtgtctccattttcgaaactcttgataccagagaagatccagctgaagcacggctacagagccggctagataacccgtcctgtgtagaaagtgagattttctcccatgatcgacgctgcttgagagctcttccgtgaatagaaatccggaga

SEQ ID NO: 14905 - DNA, 537 bp, Arabidopsis thaliana columbia
cccatgtctcattcctgaagtacaatcctcctgatgggaaagctgattgcggaagaagtagacttttacctgctcaatagaagatcacgaaagaaataacatttgagtaccaaaaagtcgtaatcaaacatccattagtatattagaggagttaggagtagataaaattagaatcttaaagtaccaaaaagttttggtctaactactaaccgaatcacaatttaaaactaacaataaatcttactaagtctagccaatgattaggtaaagaaagcttgtgaaaattttagataaagcaaatgtggaatttggaggagcaacgttacatacttgattagctgttttgtgaagtgcccgattaaaagcaggctgatcatgtggtttctttgcttgagtgttattccaaggttgagcttgaatttcctcgacccatgtcttcattagaagctttccgccatcagtggaacgcaagaaaatcatgcagctacatacataagtaactccgcttcgacttagaggtggtaatcatgggagtga

SEQ ID NO: 14906 - DNA, 544 bp, Arabidopsis thaliana columbia
atggaattagctttaaagcaaaataattcggaagaaaagtttgcgtctttgctagaaaaactagaaaccgccagacctgagggtggtgagctagacgacatatgtgaccagatccatgaagtgatgaaaacgttgcaagtgcctaaagaaacaatcaacagcataagcaaagcgtttctcaaagatgctcgtctcattgttcgttcaagtgctaacgtcgaggacttagccggaatgtcagctgcaggactctatgaatcaatccctaacgtgagtccctcggatcctttggtgttttcagattcggtttgccaagtttgggcttctctctacacaagaagagctgttctaagccgtagagctgctggtgtctctcaaagagaagcttcaatggctgttctcgttcaagaaatgctttcgccggacttatcattcgttctgcacacagtgagtccagctgatccggacagtaaccttgtggaagccgagatcgctcctggtttaggtgagactttagcttctagaacaagaggacaccatggag

SEQ ID NO: 14907 - DNA, 1015 bp, Arabidopsis thaliana
tatcatttggaaagttctttactttagggtttgtcagactattgttataattatgagaacgctaacaaaattgttatttacggaaaacctgcagataacaatggcattcgtggtgagattagttcctggggaatggaagagggatgaaaacggatatttcgaacatgtttcgcatgtggatggctttgcactgggagtgcgactgagcgagaaagacgggtttgtcaaagtggttatggcggtaaaagaaggttagctctggggcctgacgacgatatcgagctgacgtaccagtggccgcagtggatgatggggcctgattggaaacgtgcaacccaatcgacatactagacgacgaagacatgactctgttcatggctataagggcggatctagatgaagtgcatctacgcgtaaggataaatcggggtggaaatgttcgaaacgttaatagttatcggagtaactttgatctaagcggattgagttctaaggaaatagcggataaatactggaagagctgtgtgggggaccgctttaacaagaatgctgctttggaacctttcaggtgagcctgataactctaaacttaaacgattttagttatgttatcagcaaaacatatattgaatatttttcctttttccgagaatataataccttgtgttcagaaaggttagctgataccagcttattagagaatattatgtattataggtaacagagacgatatgcaaaacatggggagtgacaccgagctggatatacgcaaaggcaaggaccaacacaacacgaatgcaggggttataatacgagacaccatggatatttcagctggaacaaccgggacaccaagtacggtgatacaatcagaggcaattgcaagcttgaaaggaaaagagaaggttattgatgacggagatattgaaagagatcggttattcgagctgtggtgaaaaaatcgacaagatgagatgcggcgtgaaatgtgtgcacacaaatgaccctaggagga

SEQ ID NO: 14908 - DNA, 721 bp, Arabidopsis thaliana columbia
ctgagattactgatctatgaattctcaattgaatcattccacatgtttgatgttatcgtttctctccactgattggcatattctctatatttatcttgggttgtaagaacttcatcattattgtcattaatttcttcgacaacttcttctacactttcgtcttcttccagaaaattatccgttcgacaaaactttcgaagaaaattatgtaaaccaacacatgcaagtacaatctctgtttgcgtcttataaggaaaaggaggttgatatacctcgattttcacaacttttaactatgatttaggtatagtttttagagtccttttgttatttgtagagtcttttctactctttttcaggtctttacatgtttgggatgcatttggagattatggagcattctggagcaacacagacaacttaagctgcataagcaattcggagacggaaattgacgtaggtgtcgatcgacacaacccctggtgtcgagcgacaccaatacctgacggcaattcaattgcgcaacttattcgtgttttgaagatttccaaattcggctcagaactctctcttatatccaaaaaaggcccaaacgtttttaggacttatatattgatttttatggtcattgtttagaggcataactcttattatctcttttattcttgagagcaaaaccctgtggagactccctttagagaagattcttctaaactctttg

SEQ ID NO: 14909 - DNA, 582 bp, Arabidopsis thaliana columbia
  unsure (1)..(582): unsure at all n locations
nnnnnnnnnnnnnnnnnnnnctaaaggtgtggtcagtgcggttatcccggctgtcgcccctacgcggaaccatcagctgtaacggtgaaaaaatcaaccgttgcgccccaggtggcgaacgtgtgatgctaaaaattgccgagttgcttaatgtcgagccgcagccgctggatggcgaacggcaagagataacgcctgcgcggatggtggcggttattgatgaaaataactgtattggctgcactaaatgtattcaggcgtgtccggtagacgccatcgttggcgctacccgtgccatgcatacggtaatgagtgatctctgtacgggctgcaatttatgtgttgatccgtgcccgacgcactgcatctcgttgcaaccggtcgcagaaacacctgactcctggaaatgggatctgaacaccattcccgtgcgtatcattcccgtggaacaccatgcttaagttattctctgcattcagaaaaaataaaatctgggatttcaacggcggcatccatccaccggagatgaaacccagtccaacggtacaccctgcgccaggtaccctggcgcacgttttgtta

SEQ ID NO: 14910 - DNA, 587 bp, Arabidopsis thaliana columbia
ttgttagtcttgctgccatttcgtgattctagtatggtgtctaagatagcttaagtaacttggactcgactggttgttggcagatcattgtttggagggcagttggccttgatggtgacaatgtcgaccatcggcattattctgcttcccatatgcttagacttactggacatgagggttcaatatttcgcattgtctggtctttggatggatcaaaaatagtctccgtctctgatgatcgtaggtgaacatttgttttgtgtttaagaatttaaatacttcacatttccctgcttccttttgtcaatgtatctaattgcataatcttttgcttttgtagtgctaggatatgggaaattgattcgcaggaggtcgttggccctgtgctgtttggtcacagtgttagggtttgggactgctgcatctcagattctgtatgtacctcgaatgtctttgacttatcatataattgtttaatattttgtcttcatttgaggtttatgctaaggtataatcttattataaaatgtgaatatcagcagttctgaggtgagaaacttacagccagatctagtgaatagggatct

SEQ ID NO: 14911 - DNA, 890 bp, Arabidopsis thaliana
cacttagatccatgttactccgataactattaacgtttcgaacattcccacctcgtataatctttacttgcagatgcacttcatctagatcggccctaatcgccatgaacagggtcatgtcatcatcgtctaatatatcgattgggtttgctcgtttccaatcagggcccatcatccacagtggccactgatatgttaactcgatattgtcttcataacccagcgctaacttttcttttaccgccataattaccactttggcaaacccattttgctcacgcagtcggactcctagtgcaaacccatccatttgcgagccgttttcatagtttttccattcctagggaccaatctcaccgcgaacaccattttcacctgctggagtttcggcaataacaaatttgttagcgttcttgttattcatatctatgaaaccctaaagtaaaaatatcactcttgttatcattaacaataatatacgtaatactcataatttttacttttacttttcagcttagatttctctttgtgtttatcttcctcttgcattaaagttgtcggaggctaagctatttagtgtgatagatgtgggttattgaaggaaagaggatacaatgctaataaaccgaccaacgtatatattcgatatacctgcaaccccatacatatcagtaatcatttacaatatctttattccaattccggcgggaaatatattccaaaatatctttagcatttaatgttgttggacctatgctataaactgttatcgttatttcgattttgtggaagctttttcgtcataaattagtcgaaaaaagaaaaggttaatttctcagttttcatgcatgaatacctaatattctcatctttgggaatagatattaata

SEQ ID NO: 14912 - DNA, 491 bp, Arabidopsis thaliana columbia
  unsure (1)..(491): unsure at all n locations
nnnnnnnnnnnnnnnnnnnnnctaaagcaggataacggtggcgatccgacttgctgcgcctgaatctgtcgctcgattcacagctttatccgcaaatttccggacataagagccgttttgccattcgttttatgccgctggacactgaaaacggacaggtaccggaacgtctggatttcgaactggcctgttgctaaggagtaaaaatgtcagaaactatgacggtgaattgcccaacctgcgggaaaacggtggtgtggggtgaaatcagcccgtttcggccattttgctccaaacgttgtcagctgatcgacctcggagaatgggctgctgaagaacaacgaatccccagcagtggcgatctttccgaaagcgatgactggagcgaagaaccaaagcagtgacatttgtctgatgccgcacgtaagcctgataagacgcggacaggtcgcgatcaggcatcttgtgcaaatgtcggatgcggcgtgaac

SEQ ID NO: 14913 - DNA, 551 bp, Arabidopsis thaliana columbia
atatatagatttgaagatcaaatttgttaaatatagaatatttcctaagagaaataagatgtctttgtcgagtggtattatacttgctttttaattgccaaccatactttcatattatagtaagataacctggttggatccaatccgggggagaagggacaataataaaatacttcaattataaaggggaaattatttttaaaaatgtaacaagaaatataatatatcagaacaaagtatacgatgattaaaagcaaattaaattaagtttatgttgagtttcaagctaattaaaaacaaggaacaaaataaaatgaaatgataagccaagtcatataaataaaaaacgggtgcgacacattatgctaaggattgtaattgcctgttggtatccatgtgattgtgtatccggtatttactgcgagacggctgcagacgcaggggttgaagctgcaactgtcgtggtgacggttgtagttgcgatttcgacttccttggtgaatattgttggtaacatgtgattgatatgtaggcggcataaatattggtac

SEQ ID NO: 14914 - DNA, 540 bp, Arabidopsis thaliana columbia
tgcttggtctcaagtatattcatgaagagaagatcattcattgtgacatcaaaccaaagaatatctcacttgtgtatgagaataaccgatttggtagtgttggtgggttttctgctaagatcgctggttttggaaaagagataaagaaatggtcagttgagtatggtgaaggattaggtcacatgagaggtacgacatgacttttgtcgccagaggttatgatgggcatggttttggattatggtgctgatgtgtgggcttttggctgtaccgtgcttgagatgttgacaggagaacgagtttggagtgagtttggtaagcttgattgggaaggttggaaaactctcattggtgaaagtggtatttttccaatatccctgattatttgtctgataaggcaaaggatttctcacaaagtgtttggagagagaccctgctaagaggtggtgtgttgattgtttgccaaacatgggtccttaaatggattgcgagaggaggagaagatgctttatgatgaataggagatgtgaggtagatatg

SEQ ID NO: 14915 - DNA, 454 bp, Arabidopsis thaliana columbia
atgaaattacaagagaataacaagtaacaaacgagtcctcgctgcactccatcaggtttgatagcgatgaaagtgcgttccatctgattcgaacagagaaatccaattaaacagagaaaccagggataacacaagagaaagatatagagatatgtgtgtttggtttggtgatcagttacctctgcagcaagtgcttcctgatcttggagcatgaaggctataacagaaatgataaaaaagaaagcaaggcgaatataataaggctctgttaatcatcacatcaaagtaaaacatgaatatagataaacaaaaaagctcatcagctataagtcttgcacgtataacggatattagacatcattttggagtcaaaacgttgaaaggcttaatttacactaactgtgttacaaaagtgaagatttgaatgtgtcctgtagaatatattcataaaaca

SEQ ID NO: 14916 - DNA, 813 bp, Arabidopsis thaliana
atcaagagaccaaccagaaccaggataactgcaactttcacaactataacttagaccatgtcaaccttcttacaaaataaacaactagataacaaaggatccaagtgtcagctgaatgcctgaatgtcatcttcaattacaaatctttggagatttcagatcaagtaacaacacaagtaggaggtcaaagtacctaacaagtgattgaaacgaatgatccatgatatggttgctatcatcttcagtcatattcttatcttgctggaaacttcctgaagaacaaaatagcaagtcagctatgtccatcagaaagtaaaagaatacacattacaatccagggaaagcacttttaaaaatgcagggagatttccacgcaaacaatgcagactaaatccaccaagcaactaagatacctttccaagcctgaaaaccctcctcgctcagagcagaaccagccactttccttatcacctcctccaaaacgtcagggggagcaatcctcagctcttgaattacgttataaaccggccgtccattctccagatatatgtgattattagggtgttttgtttttccaccagcatgccgctcgaactcatatgcacctagaaccttcccacaaaacgaaatatgacaaagttaaaaatttgagaaattgcacttaagtacaaccccacaagaaaactatgaagaatgacaaacttactttcgagaaatcgcacgcagtacagccacacaaatacccacccagagtggattatcccttgaagctctctctaatgaccacaaaaagtaacataagaacatatatat

SEQ ID NO: 14917 - DNA, 324 bp, Arabidopsis thaliana columbia
  unsure (1)..(324): unsure at all n locations
aacacgtggctaaggtggcgccataatgataggaagagccgtcaacgaagtagcgtgcattactaccgaattaagtaagctccagggagggtatttcagaacagatatcttcccagcaccgatatcatcaccagaggcaagctaactcgcggtgaaagggcatctagcaagagtgctcacagtagcagaatgntcctcaaacctaggcagtccatgccgagtagggtttgaggaagcgactagaacgatgtatccaaatgtgtacgacanggtcggtaccatcacttgcgagngttgtgccagatgcggaccacctaagaccac

SEQ ID NO: 14918 - DNA, 602 bp, Arabidopsis thaliana columbia
ttgaaagaaattacttagtctagcaaaggctttgtgcaacctcgaatgttgaccggagatccgatcaatagcccacccaagaccggcagggaagaagtcaatgaatgcgaatgagccaagattggtctcagactcaagcacaagctcttcaactttatccatatcgacaaaaacgcactcatggaagttctgtccgaaagcgagtctacatacgatactagcggtataagagaaaagagcctttctcaaatccaccaaagtttgtgtttgagcagattctgtgactttcttgacgagcaattcactctcttcttctctaatataccggaaagcctttaacttttttgagctaaagagctcgagcatcgcaagctttctcatctctctccagtcttccccgtattgtgcaaagccaatgtctttgaagttatatgtaaataacccggtggcagatagctttggtcgggtgcaagtctcgagatcgtgagtctttaaaacttcttcggctgcttcttttgtggagaacactaccacagggactaaccgaaacgaagaaacacacgggccatatcttgggagagttataaaagactatgaagaga

SEQ ID NO: 14919 - DNA, 602 bp, Arabidopsis thaliana
taaaagaaccaaaggctaactctgtttgataaaccagaaaaaaagaagcaattaagcacatgtacatgaggttaccatgtattgtgcaagttcagtggcctgtgacagatcgctactcgctccagtggtaatatggtccaagccaaagatgagctcctctgcaactcttcctcccatacatacatcgagacgagctaataactgcctcttgctcactgatgtttcatcgtttgaaggtaactgtgtaaccattcccaatgcagatccacgtggcattatagtcgctttgtggatcgggtgcgcacctttcgtatttaaagcgacaatagcatgaccactctcatggtatgcagtgagctaaagaggcaaagaagtaagtgacaggtcatatcatgtttgaactccacatccaaacacttctatgttgttaagatattggaatataccttttttgagtcctctgatacgaacattgtcttcctctctgtgcccatgacaattcggtcctttgcgaatccaactgttcagaagataacttctcagcaccttcaacagctgcttttatggcagcaatatttccaggtttgcaagactggaaaaaa

SEQ ID NO: 14920 - DNA, 569 bp, Arabidopsis thaliana
ttctttccataatcagatctttgaggtacttgtgggagtgtggaatgagtgtgaaagcatccattaatggtattcttagctcaatctcctttagttgcttgtcaaatagagttttgtatttttctattaattccttcttgaatcttcctgggaaaggcatagtcggtttgaagggtggcggagaaaattctttatttttctctgaagccgctgctttcctttcctcaaaagttggctttgctcgatcgagtagagggtcgagtgagtctgagggttgatcaagcttaattggttcatcagtttgaacttcgttttgatgttggtcctctccttcttgaacttcactgtcctcagtgatcttttctgttggctggttgttgatcgatttccttccacgacggagtgttactgcgtgggaatattccttagaattttgaatggcctttcttgggtgttgccctggatacgttgatgaggtattggaaatagcttgacgttccatgtatgtcattttagatgtgagatcttcatatttgcttcttaattcattgtaggaacagtcgacttta

SEQ ID NO: 14921 - DNA, 909 bp, Arabidopsis thaliana columbia
tccctgcaaaaacaaaatagattaagagtaattaaggtttcaatattctaaaacacaaagaaaaactacagaataaaagcttgatcctttggacaaatcccaaagaacctatttatactaaaatctcgaaaaccctagattcactagaagacaagagacttgaggcggtttggatggatgctcgatcttggggatcgagtaaagagggtgttgcaaagtctgcgcctttgtttccatgctctgagtgatcaattggtcgagtagttgcttcttcctctcctattcttatgctcagctgtctagttgagtggggaatgaggaggatccaaagacgcttggaacgatcaacaagtcttgtagagtaggttgcccttgattgagtaagtggtcgagtagaggatcgagtagggggtcgagtagattctacttcctcctctgtagctgcctagatcgagtaaactggtcgagtagaatgctctgatgcttccctcttggtttgatagagtaaagggtcgagtagaatccttttaagctccttctgcacctgaaaacataccaaaacatgcaatatgtatgcaagatgatcctaaatgcctaggtgttcaaaataagctaaaatggtgcaaaatgatatgatacaatgagcagatgcaaagctaaatgatgataaacacacacctaaaatgagtaaaatacaatgttatcaactcccagaaacttatctcttgtttgtcctcaagaaaacaacaaatcttaagttgaaggagaggtttgaaggtggggattcaaaaaccgaagcatgcaatatagaacgggtagctcaatgtcgaggtagctaattctaggttgcaagatgatagacccttacttaaaaactttagccatactcgtcacaatgcaacctaacaa

SEQ ID NO: 14922 - DNA, 486 bp, Arabidopsis thaliana columbia
ttacaattgtagagttcaaaaacgactagatactgtcaattgtgtacacaaaactcactaaccttacttgtatccaatgatattcctagcacctttcgagtaccctgaaaaatatgatattagtgagatagagacaaaaccatacaattcatgattcatcaaatggcactttcttaacctcgtatactgaaagtagcacaactaaaaaaaagacttacaatgccttcactgagtacagtacgactatcgtttgaatccaccagaaattctcgttctcctgggttgtcagtggactgtgagcgtacaatatttctacccgtttcttgtagcaaacggtgcatctccacatgatcatttctgacatgaataagggacttatcaactaggttttccagtgcaatatttacatctaagccactatctgcgagcaacaattcaatgtctctgactttgacgtgattgaaaagacatgcgataagacggaat

SEQ ID NO: 14923 - DNA, 517 bp, Arabidopsis thaliana
aagcccaacagcccatgccaaagtatgtcactgcccatgccatcactattagacatgatcgagagctgccaactcgacatgtccctacttcaaacactgaggacagtgtgattctagagggggaggatttttatcaagatgatgttttggctaacaaaacaattgaagagcccatccttgacagtcaacgcactcgatcacaagctccgccagctactaccttcgttgcaaaacagacagcttcaaagaccaaagatacaatctttgtgccactgccttacaaacctccgcttccattccctagtcgatttaagaaagttctggttgcgaaatatcgagccctcctggaaaaacagataaatgatatgcctttagtggactgcctcgcgctaatacctgacgagcacaagcacgtgaaatactttattatagaaaggatcaaagaagtccaaggaatgatggtattaagtatgagtgcagtgcaatcactcagaagaagattgttcaataaaagtta

SEQ ID NO: 14924 - DNA, 561 bp, Arabidopsis thaliana
tagtaacgtccgccagtgtgctctaaagttctgggcccccatccctgcggtcatcgcggcgggtattctctctacttactattttggcattactggcaccttttgggctgtcacgggtgaatttacccgttggggcggccagctcctgcaactgttcggcgtccatgctgaagagtggggttactttaaaattatccatctggaaggatcgccattaacccgcatcgacgggatgatgatcctcggtatgtttggcggctgctttgccgcagacgctgtgggccaacaatgtcaaactgcgaatgccgcgcagccgtatccgcattatgcaggccatcattggcggcattatcgccggttttggcgcgcgtctggcaatgggctgtaacctggcggcgttctttaccggtattcctcagttctcgctgcatgcctggttctttgccatcgccactgccattggttcatggtttggcgcgcgctttaccctgctgcccatcttccgtattcccgtgaaaatgcagaaagtttctgccgcctcaccgctgacgcaaaaaccgg

SEQ ID NO: 14925 - DNA, 794 bp, Arabidopsis thaliana
gacgtggatccatctgaggacattacttctgaatttatacgaatggtataaggaaaagcctcttcagggggcaatacagcaagcaatgctttctcagcaagtgttcctacagaaaatgtaaatcacagtcaagcataaagcacaaaagcattcccttagataacaaaaaaacacttcaaagaaagttaagacaaaatagccatccttgttctattattagctagagagaaagatgatatgaacgaccagataaggaaaattgaggattaactttaccagcaatattttgtttgaaaaatgtgaataaggactttacatgcaaatagagaaaggaaaccaaagactttaccatgaccaacttcacgcctgttaaggcctcctcgttttccgacttcatttgtacaatatggaggaaagctgtagtgaagcatgaatctcttcttcggggggccaacaagagaatccaagctttgtgcttctgctggggctccaagtgttacagtacagagcaccttttaacacatacaaaacatcttaaagcaagattctcattaaatgcagtgaacagattaagcttgtctttaacacttcaggccaacaacttttgaagcgacaaaaaatgaaactaagctaggaaagcaaccctcagaagtgatacaaagtacagagtaatgtcatttcttacaatatagaaattcgggttttcttttaccttctgctacctaataccctgagattattcttttttttgtttggtcaaaaggtttaatttgataggcagtactgggaaaagt

SEQ ID NO: 14926 - DNA, 448 bp, Arabidopsis thaliana
catgacatatattatttttttatgtattgatgtgacaatcagagagagttgaccaactttcatatatatgattttctgaagtaatgttttaattatacgacgtattagtgccgacagtgtaacctttcggtttgaaacactcataatgcatgtttttaacaagaacgaaaactaataaatgggaaaatcctatcaggaagataataatttattcgatgtgttatatgggcacattgtactaggcctaattctatagtaatcggtccaagaaagaaaatgaacaattacatattttcgttccttttttatccttgggaacacagacttctaaatcaaaaacttttgatcacacgtgtggtgatttttgcacatgcagggactcaagctagtggtggtcgaagccgacggcaactacataacgccgttcacgaccgtcgatatcgacata

SEQ ID NO: 14927 - DNA, 609 bp, Arabidopsis thaliana
gaatgttcctggaaaaacaaaagataacattaaatcaagaatggatcttgcgacatggcaaagcaatttcatgggaccatggaagaactggtcaaatgttcctgaggataggcaagaaacttggtggcacacatttgtggtaatgttgttcttttttctatgctaacttacttttattacttaccttacaattactaatctctttttttttgtagcaacactactactgggaaactcgttttcatgacacaatctactctctttggaggaaggagacaatgacatcaattggtgatcgcatcagcaagaaaaagacgaagaacaaaaaaaccaagtacattggacaaaccgattgggactttctgatggagtattgggatacaacacctgctcaaaagaaaagcaagtcagctgctaatagccgcatgtctgatcctcttaataaagggattcacaagcattgtgctggccctgtgccatttgtacggattgagtatgatatggtaagtgactttcttctaattttgctttgttattgttatatactttatttggttttggactaacattcctctttctttttgtttttggttgagtctggtttggatg

SEQ ID NO: 14928 - DNA, 522 bp, Arabidopsis thaliana
ctctagaggcgatcgtctaaaaaatattgaagttgctggagctgaggaagaaaaacaagaactagttgaagttgttgagttcttaaaagatccaaaacgattcacaaaacttggagcccgtattccagcaggtgttcttttggagggacctccggggacaggtaagactttgcttgctaaggcagtcgctggagaagcaggtgttccattctttagtatctcaggttctgactttgtagaaatgtttgtcggagttggagctagtcgtgttcgctctcagcttgaggatggcggtggagctggagcactatagacatatggaggaggcttgtaaacatatggagccggcggtggagagtagctatagacatatggaggaggcttgtaaacatatggagccggcggtggagagtagctatagacatatgggggaggtttgtaaacatatggagctggcggtggagagtagttatagacatatggaggaggcttgtaaacatatggaggaggcttataaacata

SEQ ID NO: 14929 - DNA, 604 bp, Arabidopsis thaliana
agtaacgtccgccagtgtgctctaaagaaggattatagccatcgatgccttgtcaggataggaataaccgccggaagtccgtataatgcgcaccacatttgtttcaagccggagatttcaatatgcgtccagcaggccgtagcaataatcaggtgcgtcccgttaccctgactcgtaactatacaaaacatgcagaaggctcggtgctggtcgaatttggcgataccaaagtgttgtgtaccgcctctattgaagaaggcgtgccgcgcttcctgaaaggtcagggccagggctggatcaccgcagagtacggcatgctgccacgttctacccacacccgtaacgctcgtgaagcggcgaaaggtaagcagggtggacgcacaatggaaatccagcgtctgatcgcccgtgctcttcgcgcggcagtagatttgaaagcgctgggtgagttcccattacgctggactgcgacgtgcttcaggctgatggtggcacgcgtaccgcgtcgattacgggtgcctgcgtggcgctggtagatgcgctacagaagctggtggaaaacggcaagctgaaaaccaatccgatgaaagggatggtaccgcag

SEQ ID NO: 14930 - DNA, 538 bp, Arabidopsis thaliana columbia
agttagatgcggacatctattatgtttgttggccaaaactcatcacaaacttttttttaaaaacgttctcttaggtagatctgacatgagctggtcatttcatcagaggacttgaaatggtctgatctgaagcctgagagtagaatagaaacttacagggttcaggttttaagaagatagatctgatggcttgtaagactttagtgattgtaagggctggactccaactatctcttagaatgttcacacttaaatctcccgcagtatcaacattgcaatggtaaatccgagtcttgaacaccaactgcaaatcaacctcaccaacttaaccaaaaagacagatgtaataaaagtgcaagctctagattagtacctatagcttgactatcactagacccaaaacttcaagaaatttgctacaaaatgtatcctaagactatgttgaaagcaataaaactacataatatgctagacactgagagtctgagacactagatgatctctgtttcaatgtgatgcagttgaagactcattgata

SEQ ID NO: 14931 - DNA, 535 bp, Arabidopsis thaliana columbia
ctcaatgcaaatggtcttgtttatggatgttgatgcagtacaatacacatatacttcattgagtaagtagactgcatgcaatatctgggttgaatctttctcagggagactaagagaggccaaaatggaatgtctcaaggattcttgcaatgatgttaacacatccgcagtctccccaaaagatggagttttcataagggaaacaaagactgagcagataatagcaaatgcatccggaaataatcccatctcctgagaataatatctttcaagcatctttttcagaaccagagcaatttcctgaacttgagaactagaagcaatcccagggaaatcagagatacagctcgaaataagcttcagtgtctgtatttgaaaaggatggcaaggaacttcgcctacatagtgaagcactcggatgactgaaggaaacccaataacaagtctcttccgaaaggaatgctcggctagggaaaagagactacgaactctgaggcatgagttgcgacttgatctttacatctgtcatgaaaga

SEQ ID NO: 14932 - DNA, 555 bp, Arabidopsis thaliana
aacttgtgccttgatactacactcttggtactacctcagagcagtaaagtaaaacttcaagagcagaagtatgacgtgtgatcggcgccacaagcagcaacataggacaaccataattaatatacatacctttacaattttgtaaacatcagaatcaccagggccacctccacctttagcacccctaccaccagatttgccattcgcactctttttcccatcattagatttcggtttggggaaagtatcctgcatcttaacgaaactatcctcccgaaactgctcattatcatcaaccacaaggtacagtccacccccacccataggaaaagcataatgctgcagaggtgttggcctaaaatctgtgtacacaacatgacatggctgcttgtgcaaataacatatccattccgcaaattcagtagcattcgacatagtcgcagaaaggaataccatcttaatagcaggcggcaggaaaataatactctcttcccaaaggcttttcctctattccatcagcttttaaaaatctctgtgtatatatgtatatatgta

SEQ ID NO: 14933 - DNA, 590 bp, Arabidopsis thaliana
tcccaaaatatcaaaggtcatgccactaacatcaacagagacgtactcgcttgaaaatttatggagttaagtcggatttatacctggtcagaaatttgagagggagtatagagtattcaaggtgagatatcctaccgcggcttattatttggaggatacaaccgtgaaagaaaaatgggctaggtgttgtttcctgggggaacgataaaatttggacaccagcaactgtgtgaaatcgttgaattctgtttttctcaatgaaaggaagtattctttaatacccatgctagatgcaatcatggccaaaatttctgtttggcttaatgaacatcgcaaagatgccgcttcaggatctattgataataagtttgtgcctttagtggagaattacttgcatgatttatgggttcatgttgagaaactaaaagtgacagagctaaacacattccggctcgagtacaatgttcggggagtagaagggaacgaatatttggtcaacttgcacttcaaaacttgcagttgcaagttgtttgataccagaagtaccatgtatcacgcgtagcgctttcattgcaactagacgatcaaca

SEQ ID NO: 14934 - DNA, 212 bp, Arabidopsis thaliana columbia
gtggcatcactccttatggccgaagacgtttgtcacatgtaaaaaggctaagtccaaagtccaaccgaacgatgggaaaaagaaagcagaaatggtgcagcaaatccatgaggaagctaggaaaaatattgaggagaaaacaaagaagtatgtggaacaagcgaacaagggccggcgacgcatggtctttgaagaaggtgactaagtgtgga

SEQ ID NO: 14935 - DNA, 761 bp, Arabidopsis thaliana columbia
catcacataaatctttcggaagcttcactccaataactgattcactgccattggaatcatttgctgttggtgactttattcaagagacatggatctgaatcctcacccatttgtgcactatcagatatccctggtctggcatatgatacggctgtttctattggaaatgctgttccagctgccttttcgacctccacattcttgatttccttcggagaactagtcaactccgatccaccaacaacaactcttccttgttcattgcaatcagtgttttccgcttccgtttctgtagccacatgcttattctcgctctcagcatcctgagcattaactttttcaggaccatctactgcaatttttgccgcatccaaattctgtggggcctttgtttcttctggcaactgctctgcaactatttttacaatcgttccagggggagccagtgcaacctccttataggaaaacagttttccagctttgacactcacaggactcaacatcggagttggcttgttgatctgttcagtgcaagctgagcttgccagggctgatttatcgttgactggtctttctcccactacactggaattgttttgctttttgttcaatgggctctttacaaacatcttcgaggctggggaagaagtggaccagcaacagaaattgaaagctcattagaactggttcttggggatgtgaaattggtggatttcctctgcttcttgatggctgctgggtcacgttcatgaagttggtgt

SEQ ID NO: 14936 - DNA, 523 bp, Arabidopsis thaliana
tcattgctcctcctgcaagcctgttcatgccctttccggagaatggagatgacattggcgtgttgttccatgtagttggagaagtaagactttgcatctcttcagagaaatcgatttctcttgcattcaatgcagatttcaatctgctccctggaagctgcaatgcaggaggggttatgttaggccagttcatccacgtttttcctccacctattggagaggatacaccgttaggactcaaaggaggtgtggttgttgctccgataggaagcggactaatcggtcccatgtcgaaagcggtcgaggaattgcaagatgagaaggaagaccgcggggacggaacacctgatccagttgaagggtacaaaggacgcagctcctcgggtttgtgggcaaagaaacaaactcttctcgagcaattcgtctcgtccttgcagagacgagtccggtactgagccgggtgaagccagcactcaaagataccatgagcatactcgcaagtatcacctctggaacaagaccc

SEQ ID NO: 14937 - DNA, 278 bp, Arabidopsis thaliana columbia
taaaatcaactaactgaaccttgaaatattcacagttctaaggcaactactaaccgatgatatgtgcgaaaagggcacagatccacgaagaccatccgcaagagcaatcaatccacatttgggagcaataataacctacaggtcacaatcgaattcctgaaactataagcagagaaaccagaagagtagcacacaagtttcaaacataccttagctttgacgataacatcctcagcgtgaagctgcctggaaagttcacaagcaagatcgtattggat

SEQ ID NO: 14938 - DNA, 682 bp, Arabidopsis thaliana columbia
  unsure (1)..(682): unsure at all n locations
tgattggccaaccgttcctccaattccaggtttgtgcttacattaaaaatgtagttcatgacagaatgaggttactctcagcagtggtgaagatatataaaattatttccttcattcttttataatctgtgtgatcacacagttttcctcgttaaggtcgtatatgctgtagagacaaagaaaaaaagacgggtgacattagcttcgattgggttactgattgtagttggacttttaaatgtggcagataacctgaagtcagaagatcaatgtcttgaagaagagatcctgtcagtgcttgatgttccaccaggaaagatgggacgtgtgattggaaggaaaggagcatcgatcctcgccattaaggaagcttgcaagtatgaaccatttcgttctagttacagtagtgcaagcaagacatttcatatctgactgtcatataacacgagtgattttttttgtctagcagcgcgtaaattctaattggaggggcaaagggtccactgataaggttagtcttattccataggggtacacaatctgaacacaattccattatttagctttgaatgagagattggtggaacgaaagatgtnataaggtagtgttatgtggaacgggtttggtcagatattgtgattgactggtagaaagtcgtaggcgaggctatctgagagagat

SEQ ID NO: 14939 - DNA, 492 bp, Arabidopsis thaliana columbia
  unsure (1)..(492): unsure at all n locations
ataaccgcacctaattcatgaacaaaacaatagagctagattcatcatacaacaattaagtgacttttcaaacttacgtctgccaacatttcctgatgatatctgcaattccaggatccacaaattcagggatatcaagtcgtcgatgttgaaaaccaaccgcgccaaccacttgcattgggttcatttttccccatggttgctgtaacgtaaagagttcccagagaatgaccccgtagctgtacacatcacacctgttttcacattatgtacctcgttcttaaaagggaacgttacatgggaaaatataatacgataaaactatttttctttagaaaaaccatacttctcatctgcgggttcgantctaagcacttctggagccatcattcagccatgaatgagcaacacaaaatcagtctcatgcttagatcaatcactgggaagtangatatgaggtagttctgatgataatgacggtgtaatatgatg

SEQ ID NO: 14940 - DNA, 565 bp, Arabidopsis thaliana columbia
cctatgcagcaaaagaaaaagtacacgcaaccaagtttaaatgttgaaagatgatcacacttctatgttttatttgattcatcttttacagctgtaagcgtatacaattacttgtactatttaaagaaagtacaaaaaaaaagagagatttaaaaataataatactcataattcatttcgctacttgttcaaggacaccaactttcttcttccatgaatcatcttctaatccacttgccggtaacggtggcaacgagaagacgctaactgttgagctaccactgcggatttcctttaatacttttaatgccgacacagtgctcttcatatacaagctctccatgtactcaatctcagacagttcttttggtactctaagaagttcagaatcgtccgttcctgtcttgaccattccagaagttgtcggctctccttcttcatccagattccgacttttgttagacggaaagaggcggtccagcatagcctcgcactctttcacaaatgtgttgagtaggtcagttgtgaagaaaggttcttgcaaaacctctttggataaatggta

SEQ ID NO: 14941 - DNA, 429 bp, Arabidopsis thaliana columbia
tctagaggatcaggatccccataggcaaagacgtgtgttgttgactctagcttggacggagctgttactatgcctcttagaccttctactttgtgggagtgtgtaacatacgcctgtggaatttgacaagtgcgttagaaactatacatcacttaatctaactgtaaccaaaaccagggattgctcagttgtaacaaatataaggaaaatgggtttgaatgaacctgaggaatgatgggtaatgtatcagtgagagggatgattccttcttctttttcagcttgagacgggttaagtgtccggcgtggatccacaaatcgtttatcaagtgccaatatctaatcattcataaaaacagttttgagtatcagttattcaatctatataggtatctctatatgagaagatatgtacaacctgaaccccgat

SEQ ID NO: 14942 - DNA, 552 bp, Arabidopsis thaliana
tagtaacgaccgccagtgtgctttaaaggcgcctttagactcagctttcatgtcctgcatacgacgagttgctgcttcaatatcatcttcttctttcactttgctggttttcagcaaaatagcagagacaacgaaggagacagccatcgccgcacacacacccgcgatgttagcgaagtaagcaccttttggtgtcatcgccagtacagcaaggatagaacccggagatgccggagaaaccagaccaccgcccaggatagtcagcgtgaacacgccagtcataccgccgaggatgactgcgaggatcagacgcggattcatcagcacatacgggaagtagatttcgtggatacccccaggaagtggatgattgccgcaccgcccgcagactgtttagcgctaccacgaccaaagaacatgtacgccagcagcacgcccatacctggacctgggttagcttcaatcaggaagaagattgatttcccagttcatgggactgctgaatcccagcggcgagaagatccgtggttaatggcgttgttgaggacagga

SEQ ID NO: 14943 - DNA, 541 bp, Arabidopsis thaliana columbia
tgggacaaatgaaactaatataaatacacacccgataatgaaaaccttgctagtgttacgtaaactagaaatcagcatcacagtaatctctgcagcacatttaactcccatcctactagactactatgcaggacgtagagtgctactggtattaattagtggtatacaacgattcaagaaatagacatatacaaatgatctgtcacatccttcagatatgaggtctaaagggtattaactgtcttacgaaatgcaggaaaaccacttacctgctgtttcatgaaattgatatgtgcatcagatataaagcaaaagtagcgctccatttgcttccagaacgagctaggaaaattttgagctgcatcaaagaaccaaaccaattattcttgattaaaaaaattctggaaaaaataaacttaacgagaaccatgaacaattacttaccaaagttgatagccgagttaacagcagctagtagctcttcatgcccatcatctgaaccaataagaagttttcaaaaaaaacataaataaagaagagg

SEQ ID NO: 14944 - DNA, 492 bp, Arabidopsis thaliana columbia
gacctttcttcttctttgggagattagatcacaaacaaagagaagcaatgatgatgtccgatctttctttggatttggtagaggaaatactctctagggttccagccacatctctcaaacgattacgatctacttgcaaactatggaacgctttatttaaaaacccgggatttaccaagaagcaatttcttaaagcaccaaaggagtcactggttctcatgttgaaggagtatagcgtttgtccaatgatcgccaatctcagcgtttctgctccgtctatagagtttaaaggtgcacttaacctaaagaattatcctccttattcagaagaagtcgatatacatgaagcttgtcactgtgatggtttattgctatgtacaactatggactatagaatagtggtttggaaccgtgtttgggggaaacaaggtggatccgatggccaaaaacatttactctaggtttgctctaggatacgagaaaaacaaatat

SEQ ID NO: 14945 - DNA, 521 bp, Arabidopsis thaliana columbia
ttgaatctttcttcaagaagatgaagacccatcaccatcattgctgtgagtgttcagacacaggccatgttcgatctctctgatcttgccattgagaagtgagtacttgttgttatgcatccacactttaagaactcctctctcaatcccaacttcgttacaaaactctctcaccgacttttcatcacatccgttgattttccaaccagctttctctgcgaaggctctcatcttgatcttctgctccggcgtgaatttggttcttgttcgtttcctcattgctcctcttgaactgttctctgacctaaccaccgttggatcttgatctgacggtccagggaaaccggagctgagagagagaatcacgtgatgtggaggagctgaggtgtagtaagagcaaggaacaggagaagacacgtgacgagacggcggcgactcagtgccggaggaagaagaaatcggaggcgcggtgaggaagttgagattctcggaagggtcacggcggtggaagttacggtggc

SEQ ID NO: 14946 - DNA, 511 bp, Arabidopsis thaliana columbia
tgctcctcctttctagccttcacagttttttttgcattctccttttccatccacctacgttcttcacgggaatctgcttgttcaagatcatgctcctcttcatcaggaaattccctccaactcttgaaagcgtaccaaaagttgtagaacttatcaacatctttaagtggtgtgttttcatctcccaaatctggaatacgctgattcactgaccacctagcatttctcttaaacgctggaccaaacaccttgaaaaagtcttgcggcaacaatccgatgggacctcgtcatcaaactcatcagtggagtcaaaaattcttctcctagttgggtccatcaatacctcatatgcttcttgaatcgctttgaagcgagattcaatctcatctttttttgcctccttggcttcttctgtttcctctaacagaaggagactagcgagtttatcaggatgatgcttcaatgcagcttcacgataacttttcctaatctgatcttccgtcgcaagata

SEQ ID NO: 14947 - DNA, 599 bp, Arabidopsis thaliana columbia
tgttgtccaagaggtccgtaatagataatctttcctccatttttcatcagaatcagctgccattgaagggtcacatattaatgtactttaaacaagagactttaaatgagatgaaggttttacgaggttttacctcatcaaatgcctcaaagatatctatgctcggctggtgaattgtgcaaacaacagttctgccagtctcggcgatgttcttcacagctctcattacaattgctgcagctcttgcatctaatcctgtggttggttcatccataaatattattgaaggattggaaacaagctccacagctattgttagtcttttgcgttgttctgctgttacaccgctaattccaggaactcctactaaggaatctttaatctcctcaagctctatcgtctcaagaacttcattaactattgcctgaaaagcgaagatcaagaaaatactcagacaaggtagctaaaggaaggaagaaaccatttttatttttccagataatgacttacactcttagtttctgaactaatgttcaaggaagtcgaaccaagcagagtatttgagggactcttggactgttaagttgggagaatggata

SEQ ID NO: 14948 - DNA, 428 bp, Arabidopsis thaliana
aagttaagcctcaacctgctattccgttcatctcttgtccccctgaacatattgaggaagctcttctcgatatccacaaaagggcacctggtctccaactgatgattgtaatattggctgatgtgactggatcatatggtaagtctgtgctagtgataggttatatatggtgcaaagttgattccgacaatctgttcatgaagtactctttctgtctgcaggaaaaataaaaaggatctgtggaacagagtatggggattgtctcgcagtgttgccaacctagacaggttaagacactcaacaagcagtacatgtgagatgttgccttgaagatcgatgtcaagggtctagtcatctgtgcatctgattgttttttatggatggtgtaaaacgggtatttgtattcggactgggggaaggaacactgt

SEQ ID NO: 14949 - DNA, 434 bp, Arabidopsis thaliana columbia
aaataggcctattgaccttaaaccattttttaaagccgctacgatgactaggaatgttaaaaccacggacattccaacaaaaaattggtgtacacatattaatgagatgatttgaggctcttgcctctttggatcttctgctgcctcttagacagcaccctgataaatctctcctcttctgaatcagtcgacaaaacatcagacgaatcctcttcaacgtccccttctgaaagaacaggttgctcacgcccaacagccatactattatcagacaaagcactaaccagggcactattgcttgattcaccttgaaaccgatcctttcccactcctagaggcctgccaacagagagaaactcctcgacactcccagcatcaccaacagcagtaggagaagacaccatagagactctaggagggactttaacctgcca

SEQ ID NO: 14950 - DNA, 399 bp, Arabidopsis thaliana
  unsure (1)..(399): unsure at all n locations
taaatataaacagaataaagaaactagaaaaaaaaaaaaaaaaaaaaaaaaaaaaaaaaaaaaaaggaacggacctcaggaaatcattggatactagttcaacaaactgcaacagatgttgagcatagggcatcatgagctcagcctttgcatccttgaacccttgcagtatcccggagtatgcttcaaagatgcttctccggagttggtttgcataatccntcagctcctcgtcaagggtgtccatctgcgcactcacctgagcagcaccttgcattatctgaacagctggagctacatacctttcnccatgagcacctatcgccagagcaatgtcatccccagcatgagnagattggaggcttcccgatctgtggcgtgcccactttgcnggttttg

SEQ ID NO: 14951 - DNA, 544 bp, Arabidopsis thaliana
  unsure (1)..(544): unsure at all n locations
tagtaacgtccgccagtgtgctctaaaggcacaatatttcataatgacttacggcatcgtcatcgaccgctcgatgattgccaatattattgataccactccggcagaaagttatgcgctgatgacaccgcaaatgttattaacgctgggattcagcggcgtgcttgctgcgctgattgcctgctggataaaaatcaaacctgccacctcgcgtctgcgcagtgttcttttccgtggagccaatattctggtttctgtactactgattttgctggtcgccgcactgttttataaagactacgcctcgttgttccgcaataacaaagagctggtgaaatccttaagcccctctaacagcattgttgccagctggtcatggtactcccatcagcgactggcaaatctgccgctggtgcgaattggtgaagacgcgcaccgcaaccgttaatgcagaacgacaaacgtaaaaatttgaccatcctgattgtcggcgaaacatcgcgctttagagnnnnnnnnnnnnnnnnnnnnnnnnnnnnnnnnn

SEQ ID NO: 14952 - DNA, 552 bp, Arabidopsis thaliana
gtcaattctgcgatatcctctattgataataccagtctctatctctgaaatactttttgaagctattggtgcgaaagaatctatcagaaacgttttaccttctataatcggcttcttaaccaacttgttcatatcaaattgcacagtaagatcaccaacattcagccatattcttcccttgtgaatgtctatgatagctttagctgtgtgcaagaaaggtctaccaaggattaaaggatccttaagttttctttcataagataaaatcacataatatgtgggaatcatgctattctcaatcatcacaagaacatcatataggacaccatctagaatacgggttgaacaatgtgctaatacaagagtgatattagtaggcccaagattgaaatcccaatatgtgttgctacagaacgaggcataaggtttcactagaaccaagatcgcatagagctcttgggaaggtagctggtacctaaaccctaaaccctaaactcaatagttgcccgagtaaaaggtccaagacttgtagcttcttggagtcggtctgag

SEQ ID NO: 14953 - DNA, 976 bp, Arabidopsis thaliana
aagaaaggtggaagagattgcaggatctgtcatcttcctttagagactaacaaagaagctgaagatgaagatgaagaagaagaagatgattctgatgatgatgaagatgaagaagatgaagaagaagaagaagaagaagaagaagaagaatattatggtttgcctttgcaattaggttgctcttgtaaaggtgatttgggtgttgctcatagtaagtgtgctgagacttggtttaagatcaaaggaaacatgtaagtttctcttcaagactacttttgttttttttctgcaaaattctacagattctgtgagaaccaaagtagtaaagaatgaaactttataaggaaaaaatgtatttcctttttatgtactttgagtcttttttcttgtctgaattctagagatccatatcattacttcttagaaagattgtctgctgaagctggaatctacagtttttgttttgtggccatcaattgttgtctacttgtgtctcatgttcttatgttcctgcacatttttggatatttattgtttgtagtctcaattaaagccagtttctgtgatttgcctcaaaacattcagtttcaaaggcttgattttgcagctgcattgagagaatcttgcagtcccttttgctgagaaagtttgatttttaccaatcaagattgtactcatagctctgtttagcttctgtttctgtgtctttgcattttcctagcttcttatatgtttacaagatgaagcaagtcccctaagatttttactgactagcatttatcatattgttgtatgaatctgagcaggacatgtgagatatgcggcgcaatggctctaaacgtggctggtgaacaatctaatccggagagcactgcttctacacattcacaagcagctgcgggacaatctctaactcagacagagccacgaggaatctggcatggtcgccctgttatgacttcttacttgctgctat

SEQ ID NO: 14954 - DNA, 823 bp, Arabidopsis thaliana
acgtttccaagaaaaaagacgtacgtatttttataaaagaaagtgtaaaggggtccaaatctagagaagaaaagcattgacgttaacgtagagagatgatttaagtttacctgtgttcttcttctgtccatggaacacctttcttcctctcatgctccgccgttcgtgcggcagatcctctctttcctccggcggcggaaaagtagtaaccgttcatgttaaacccattgttaccgcttgctccgtcgtagccaccccaatcaagtgtgaatgaatcagaggcgtaaccagggattggtataagaccagcttcgatgtcgctaacgtcttcctcaagctctctgtattgtttgatcacatctccgactgttttaccgggaagcatggcagcgactctggaccatctgtcgggagtatctttgtcgtaaaaggctaaagcgttttcgaatttcttgttttcttcagctgtccatttggttcctctgttttcttgaaacaaccagtttgatgtctctagatatgttgctggtgacataacttcgattcctctgttcatgttttcaacgattgttgatcgaatcaagaaagaaagaaaaaaacagagttttcgataatggtggagctcaaacagagagagagagagagagagagagagagagaaaagtgggagatatttgatctgtcaaaatggcatttatcaaatggaatctgagagagagagagagataagcatctagagctttgaagaatctagagaggagatcaaaagagagctgctttttcagactctaaggacaaaagatagatcgatctgtgagttttg

SEQ ID NO: 14955 - DNA, 775 bp, Arabidopsis thaliana
aattcccgcctgagcattagaaccaacagctcataagcaggcttgaatttaccttctctgcagtgacccgttatcaaagtcttgtaagagggcggatcttgcactcctcttttcatcagctgcctgaaaactttctccgcttgttttgttttcccattggcacataagtattcaaacattgggttataagctgcagcgtgaggcttgcattcatccttacctaacaatacttccttctcaaataactcattgaacaatgtctcagctctatcaaattcgtttctcatgcacagagtacgaatcaaaacactataagaagctgaatcaggatgcaacttcatattcagcatttcttggaacaccttcatcgctgcatccaaatgaccagcatcgcagtgggctttgatcaaaatattaaaagtgcaggcatctggagcgaaagtggtaaatgcgtcgttccctccaatcaagatatctttgatctcatcatatctgtgagcctcagagagccccttgatcagagtattgtaagtaacagcattgggtttcagccctctactcagcatgtcatgaaacacaagcactgcttcatcaatttcctgcttcatacaatagcctcgcaccagagtagtgtaactaacaacgttgggatgcacatcggttgctttcttcaacattccactcaaaacattatgtgcaatcttgaccttgccggctctgcataacccatcgatgatcgtgttatatgtaacaacgtcaggattgcaatgataca

SEQ ID NO: 14956 - DNA, 594 bp, Arabidopsis thaliana columbia
actgagcaattgaatccactcaggttcgagttccatacatgatctaatcacaataacctcagagccaacgtaagccaaacccaatctacagttgtcgttcaattcaactccagttacacctgccgtgggatactccatgatcctcttagcttcaaagagacggtaaactatgttggtctcaaacgggacccatggtggaggcacgataagatcttcagcagtctttcgagggtcatgaccttgaatcatgactgatgctggcccaccgatgatgatgatggaagctgcgttgaacgtgcagaagatggctcgtctcacgccgagcttctcagcgataggcgggacccaatggtgcaagatatcatacactatccagtttggtttggaagcttctaaaaactctgtgaaagcttcagaaagcccatcaaatgctttcttcagataagctatgtgagtctccgggacatcagtggtggctcagcgttctctgggagatggtcgacggtttgacttaacggcaaagaaacgaaattcacggaaaggtcggaggatatattgggaagacgtgaaatgttacgagctgtggagatgaag

SEQ ID NO: 14957 - DNA, 959 bp, Arabidopsis thaliana
attaatcaggtcatggagcggatattgggcggaactattcgtatcatggagcggatcttggtatctatccattgggccagaattaaaccaatttcaatataaaaatcaaacaaaatcaattcttttaggaaataaagtaattacaaaattaattaacttaccatactccacatttgatggagtttagaaaataatcatttaatgtaagaaatttttaaatatttgcatgtttatcacacactaatcatctcttcttttcttttttactgctttatcgttttcaatttcaaatatggctgatgagatgtattttggttttgctatatctaaaatgaggatgggttgaacgatattttgaaagaagcttattcaagtactaacattacttacaatttaatttgcgggcaacaccctttgaccatgttttatttccatggattgtcaaagtcaaatgtggttttcacgtttttattactaaatcaagtttttgtgtactatatcgtgtacggataagcagacatatcataaaacttaaactccattcattcaaaagcgagaaacataaaaatgacatacagtttatataaacggagattcagaagataaataaacttgaacatggaacaaagttggaacgaatcataaaacttaaattgttgaacgaagcatacacatgtgttgcaaaatatgtgtgcacccgtcatatcaaaaaacttgagagtagagccgagtagcttataccttagcagcttcgcatctagtagaatatagcaatctccctggcgtaccagtagaaaaaacaaaccatgcagccatgactgaacatgcaacagcctacacaactcggcgtgtggacaaacctccaagaccgttccctagtggcgaacagccttagtgtgaagctagctgatgtgatacatcacatctctccaaccgtgtggcctgcttcaagggtgagt

SEQ ID NO: 14958 - DNA, 637 bp, Arabidopsis thaliana columbia
atgtatctttcattttgttaatcaattaagatacaactatgatctatagtttcatgattagtctaatttcaagatattatagaaattcaagaaaggcttacttacacgtcatctagtatcttggcagcaatcatgacacaagtgacgaggagtctatgaacattcaaggagacaaccaaagaaccaggatgcttatgagccaaccggtctatgtacacatacccaacaacgaaacatgccgggctacattttgtgtacttatatatcctctcaaggtatttagctatacttatgctcggcgctctcacgccgtgaaacgcctccaagctcttcccaaatcccttagtttgcttagctaaccactcgtttcgtgccacgagcttctccatcacatgggagattatagtcagcactcttggagtggctgcttccgttgccgattctggtccacgaccgggtccagttcatcgtctccggctgcggttaacatgggttctcttcagttttcgttaatgggccatgttgtatagttcgttttgggtatatatggcttgtagattgggtggttgagatacgatgagcttaagatgttacgtggggatgttacatgtttcgctgactttgacgagtgtgagat

SEQ ID NO: 14959 - DNA, 639 bp, Arabidopsis thaliana
taaatctgatcaattaggcgccttggtatcgagtgcagttaaggcttatcggctaatcgacttcaacaagatttttgctgaaattaaggctaaacatgggccgtgcactgattacttggctagttgtaacacccctattttacaattagaccatgaggcccaagtccagcccgctaatgatttgaacccaagtgaaaacctaatgatcccacatgattataaaaggagaacgcaaactccaaatcaagtcacaaaaaccctaagtcggcaacctcggtaagtctcgcctcctcttcttttgggaattgatttggctcttccctaacctaaatctcctttgtgaaccatcgtagcaccactcagaccaccggagatcgttgttgtgttgagccggagtcaccgcgtgaatcatcctaaccggagaggtaacgcacgagaatcgattctggttttgatctcttagtttctttaggattgtttttctttaggattgttgaaccaatctaactagtgaatggaaccatcgtagatttgtgccactccgccgttccaaccgccaagcaaaccgtaagggagactcgtcgagaaaagccaccgacaaaggtaatcgggaacttctcgtgttgttatgtgattgtg

SEQ ID NO: 14960 - DNA, 581 bp, Arabidopsis thaliana
cattacaatactgcatcttcttcttcttcaccctttacagagaagcactctgtggagagataccaaagggatcaatggctgtacaaagcggttgaaccaacgccaccatcgactccatctccatcgccatttgaagatgaagtctttgttagggaaaacgacattgcatcgcagctgcctgagctgaagaagcttttggcagtgctgaaagagaagagagttaaaggatgcaaaggtggtgattgtggaccaggagatgtgtatcttgttgggacagggccaggagatcctgagcttttgactcttaaagctgtcagagttattcaaagtgccgatcttttgctttacgacaggcttgtctccaatgatgtcttggagttggttgctcctgatgctagacttctttatgtcggcaaaactgctggttatcatagcagaactcaggtaatgcctaagttcttgttttgattgcttagccggatcgttttgttatggataagaccattgttttataaagtggtttcttaagccttttgatgttgttgcaggaagagattcatgactactcctaaattttgctg

SEQ ID NO: 14961 - DNA, 495 bp, Arabidopsis thaliana columbia
tactcagagaggtagagagtgttacatccagctgcattaacctcacgcttgccaatattttcctgagaatcaaaacagaaaaatcaaagtattattggttaattttccttcggaaaatactcagaggagagaatcagaagttaccggagtgaaagcgtaggattcgaaagcaaaaccagcgagaataacggcgagattgatatcgaacggagaacgttcatctttctcaggtaaacttacttccttcgtttctgattgagcgacgtaacggagcgaattaggtttagctctgagtctgaaagtgattttcccgggaaagttgaaggtgcgggtattgaagataggagagtagcggagacggtgttttggacggaggaagtgaacagagaagtgtaattgcagagatgtcatcgtttgaaatttgaattcgagaaatttggagaagaagaagaagaagaggatttgtgttcttctggagaattctgtggagctgat

SEQ ID NO: 14962 - DNA, 803 bp, Arabidopsis thaliana
gcttcttcaagtttcactagcagttcaccagctagccgatccacttccttaactaagaaggtctgttcttctattgtcggcttcttcatagcatcattgatttcaaacttcatttcaaaattcttccccacattaagatcaatatttccttgcttaacatttatgattgctccaggtgtagccaaaaagggtcttcctaatatcaagggatattttggttcttcatccatgtttagcactacgaagtctgtaggcacctccacatttccaatcttgataggcaaatcttctattaacccatgaggtagtctaacagacctatcagccaagatcaaggagatattgcagtatttatacttgttgaaacccaacctcttagctactgagagtggcatgagatttactgatgctccctaggttacaaaggcatttactgaaagtcaatgaacctagggagcatggtagagtgaatgaaccagggtctcctagattttctgggacatcgttctcctgtatgatggcatggcttagaactgttgttttttgaacctcttgcattctctccatgataaagtctttgaggaacttttgggaatccgggatacgcgttagagcatcagcaagaggtatccttaattcgatttccttgatgttcttggcaaacatagctctgtacttatcttctaactctttcttatgtcgaccaggaaatggaagtgggggcttgtaaggatgaggaatgaagactttttctttgtttttgacacaacatgtttcggagcagttggtgatgttgctgggaa

SEQ ID NO: 14963 - DNA, 506 bp, Arabidopsis thaliana columbia
tatcacagccttatcttttcaaaagcattcgctccaattaatagccatgaaattcaatcaaagggcccaaacagcaatctgtaaatacaaataattgtcaatagcatcagtcataccacttccttgaagactagagtcttcacgagagattcgctttctccatttccttttcaggcaaagggcgcgtctttttgctcttcttcccagctttacgtttctttgcttcattatccggagaattaggagtcttgtaaagctttctcagccttctaaaaggagcagtgggcggttcaagctttggcaagtcttctgcatcaagtagcttggttgtgggacgagcctttgcagccagcgacatagattggacagctctatcaataatgctggagtcctcattttcgtcgtctccttcaggtaggttgcgtgagtttgacgggtcaggttgttgaagtcggcgttcaaaaccatcgagcttgtgaaatggagttaaattccttttctcaaca

SEQ ID NO: 14964 - DNA, 551 bp, Arabidopsis thaliana
cttccttttttaatgatttgactagcatataatcgatgtagacttccattgtttttcctagatgttcgttgaacatcttgttaaccagccgttgataagttgctcctgcgttcttcaacccgaatggcataactttgtaacaataaatgcccctatccgtgataaacgaagttttctcttgatcttccggattcatcatgatttggttatatcccgataaagcatccataaaggacaacaactcatttccggcggttgattccacaagattatctatgtgtggaagtgggaaactatcttttggacaagctttgttgagatctgtaaagtcaatgcacactattctttccattcttctttttgaccacaacggtgtttgctaaccaatccggatattgcacctcccttatagacccaatctttaggagtttatccacttcgtcgtttactgcttttgctctctccaatccgagttttcttcctttttgttttaccggtttgaagctcggatccacattcaactcgtgacaaattatatttggatctatgca

SEQ ID NO: 14965 - DNA, 527 bp, Arabidopsis thaliana
tagtaacgtccgccagtgtgctctaaagactgacgggtgtaagggtggctggagacaaataccaccaccagcgtttcgtcatcgaccagcgattttggtccatgacggaatccggttggagaatcataaaaggccgccagtttacccgccgtcagttccagcactttcagcgccgactcgcgtgctgcgccctgtaagccaccgctaccgagataaacgatccgtttccacggtgcgtaaccaaacacaccttcgctgaaatcgcccagtgaggtcaggatcgcctggcaacgatccgccacgtcgcggaaggtttggctgttgatcgtctcaggtgcgaaaaccgcgaggcagctggccatcatggtggtaatgctgctggtcatcgcaaagccgcgatcgtgcgtttctgcgggcatcagcagggcaaacgcgttatcgctgttgatcgcgttttggtaaagagcgcccgcttcgttgcaggtgatcggcaggtgatagcattccggtacaaattgatttgccag

SEQ ID NO: 14966 - DNA, 631 bp, Arabidopsis thaliana
ctaaagtcgtcaccgtgtttgatctggatttgaccttcgtcgggcagatagttggcgtacagcgagcgtagatgcgttgatttgccgctgccggaatggccgtggagcaccacgcattcgcccgcgttgacggtgagcgaggcgcgattgaggacgggcaggcgcacgccgttttgctggtgcaggatgaaggttttactgacgttttgtacgttaatcatttttcgcctcgtggttcgggtgtcggatgcgacgctgacgcgtcttatccgacctacggggagcgcatttgtaggccggataaggcgtttacgccgcatccggcaccggctcaattctgcaaaaccgatgacaccagcagctgtgtatacggatgatgcgggtcgtcgagcacgcggtcggttaacccactctccaccacttgcccctgcttcatcaccagcaaacggtcgccagcaggcggcgacgcctaaatcatgggtgacaatcaccaccgcgaggttcagctccaccaccaggccgcgcagcaggtcgagcaggcgggcctgcaccgacacatccagcccgccggtcggttcatccataaacaccagcttcggatgcgtcacccaggttgcgggcaatcctttag

SEQ ID NO: 14967 - DNA, 504 bp, Arabidopsis thaliana columbia
ttgttcaacaatgtctgcagttatgatttaagaaaaatgttattaactaaacatactacaatgaattcaacacaaaccggtcagttagatccatgaccaccagaattatttctgccatgatccggttaacttctaagccagactgctttatcatcaaatgcctattttgttattgtaacgaaaacaaaaaaacataatttgtcaagattgaacacatttttgtaatgaaaaaagaagacatttggttggagagccaaaaacacaaaaacaaaaagaaacatgtcaatcttgatttggttgttagtaatattttgtagatctaaaatcataatatttcatatatgttaattatgcgcttaatttataattaattacctccaaaaaccttgtaaaagttgagatactaagttctctaatggtgtcacttgacacagtagatccaagggtatacgcataatcattcactccaatttctccaatccagaagagagaatctttaacaac

SEQ ID NO: 14968 - DNA, 613 bp, Arabidopsis thaliana columbia
ggagctcgggctggaaagcaggtggaggatccagagccttctcgacggtcattttcgggtcaggtccatacggatttgcctgcgacggagagccggtcaactgggttacctttggagaccagatctagtctattggagaagattaagatgccggtgtttacaagaccacatccttatgcttggattttgcaggtggagagtttttttcgcgtgggtcgttttagcgatgctgcgaggttggatttggtgtcattgagtttggagggtgatgtgttgaaatggtttaattgggaggtttcacgtcaggagtttcagtcttgggaagagtttaaagaccgattgttgattcattttggtggaactattgatgatgaacctggtaatcgtttgtttgcgatccgtcaacacgggacagtggcagcttatgtcactaagtttcaggatttgtcatctcaggtagcaggtttggatgattctcatttggaaaaaatattttacaattggttgaagcatgatatgaaggaagtgatcaagatgaaagaacttaaaggattaccaaatcatattgctacaatgttaaagatagagtctagtccgttttgtaggatggtga

SEQ ID NO: 14969 - DNA, 309 bp, Arabidopsis thaliana columbia
gggagattgtcgattatctgttgctgtcacatttaccgaagtttgagatggcgatggaattaggtaactccgaggcaatcaaacatgcggtgcgtcatgggttgggaattagttgcctgtcgcgacgtgtgattgaagatcaattgcaggcaggcacattaagtgaagttgcggtccctctgccgcgcctgatgcgtacgttgtggcgtatacatcatcggcaaaaacacctttccaacgcgctacggcgctgttctggactattgcgatcccgcaaatgtgccgcgttaagttgctgtacaagaacat

SEQ ID NO: 14970 - DNA, 790 bp, Arabidopsis thaliana
ggctctactcacaattttttggacgcaagaatggctaagaaactgggttatcaggtagaaactgcagggttatcgagagtttcagtggcagatggtcgaaaactgaaagttgagggcaagattcgtgactttgagtggaagctgcaatctactaaatttcagtctgatattttgttgattccattacaaggtgtggatatggttttaggggtacagtggcttgaaacgttgggtcctatttcttgggaatttaagaagctcgaaatgagattcaagtttgcaaatcaaaaggtattgttacatggcattcacagtggttctgtccgtgagatgaaggttcagaaattacagaaacttaaggaggaggaggttcagttagccatggtatgtgtgcaagagattcagtcaaatgaggaagttgatagtgaactttgtatgcttaacaccttagcagtggagacagaagtagactcaggagtggagagagttgtgaatacatatcaagatatttttgttgaacctactgagcttccaccattcagagatcaacatgatcatcgcattccactattggaggggtctaatcctgtaaaccagcgaccgtacagatatgttattcaccaaaagaatgagatagacaagattgttgaggacatgttagcagctggtacaatccaaggtagctccagttcttatgcaccccagtggttttggttaagaagaaggatggatcctggcggttgtgtgtagactatagagagctcaatggaatgacttgttaaggatagat

SEQ ID NO: 14971 - DNA, 662 bp, Arabidopsis thaliana
ttcttcttttaaaaaaacgacaaaacaacatatcaccttattacatcacacgactatactactggatatactctctttgtaagaacttcctaaacagagtcatgtacataagcacttattgcaagctcaagcgttcacgataagaccacctgcacaaaaacacgtttgtgttataatagacgaaaacagagatcaatttgttaaaccaaagaaacagaggactctgatggaatgcccaatccggtctaaccacgtcaaattagaacttaccgtttggatggaggatttggccggtgtagtaagatgagcaatggttacaagccaagaaaacgtaggaaggagccacttccacaggctgagccgctcttttcatcggtgtctctgacccaaactgtttgatcgcttcttcagagaacgatgcgggtatcagtggagtccagaccggaccaggagcgacaccgttcacacgaatgccctttggtgcaagctgaagagctaacccacgtgtgaaagaaacgatggctcctttcgtagctgtgtactctagtaagcttgagtttcctgcgtatgcaacaaccgacgtcgtattgatgatgctgctcccttccttcatgtgctttaacgcatatctacaataaattacgaccaattaactctaaccg

SEQ ID NO: 14972 - DNA, 501 bp, Arabidopsis thaliana columbia
tgttcatcagttatgttggcactgggaggtttttccaacgacttggcacgaaaccccgttcctttgcaatcgctacagctagcagaaccctaaaaccattgaaagaatcgaatttgttcatacttgggaagatatataaacaagaagacacaataatgtgtctgcactttcgtttttattagataacaaacctgtccagagcagattacacatgaagtattccttgagggaacctggcaaagcatgttatcaccaaggatgaagaatcctgtacccgcacaccatttgcattccacatgaccctttgaattgcacgatgaacatccaacaggacttggttgctgcagtgaagaccgaaacagacaaagagaatcattgaatcgaaacacaggtcaacaagtaacatctagagaattcacacgagctcaatatcaaattgccagtgctagaagaaaggcttcaaagtctgaacttttgatagattctctaagagcaatatta

SEQ ID NO: 14973 - DNA, 586 bp, Arabidopsis thaliana columbia
atgcctgggatgaaggtaattctcataagtctatctcgtcttcttttatctatgattcaatcattttcacttccttactgactaatttcatctgcagcctggtccggattccataggaatcgttgctatttctcatggatgcacgggaatcgctgctcgtgcttgcggccttgtgggtcttgatcccacaagggtaagtactattctcacttctttctaataggtacatcctcatagatcaaccaagaacataaatcacatttctgttttgtttttttcgcaggtcgcggagatcctaaaggataagccttgttggttgcgtgattgcagatctctggatatagttaacgtactatccactgcaaatggtggaaccttgaactaatctacatgcaggtattgatgatcaagaaccctaaagatgattttatcttcagcacaaaccaaataatcgaatcacacaaaactaaattttcctctctttctttctcatgaaagctttatgcgccgacaacactggcaccagctcgtgacttctggatgctacgttacacatctgtaatggaagacgggagccttgtggtaa

SEQ ID NO: 14974 - DNA, 558 bp, Arabidopsis thaliana columbia
ttgaagcatcaaaagacaggtacaatagatagattagaggatatgaataagccaaactagtttaagaacacttcttagtttttaatgtgttgttgttgcacacctcttatctctgcagagttccaaacatcaagttcaacgttgccaaacttctgcaatccctcatccccatagtcgaccaatcagtacgatcataacaaacataactcagttatatcgaaaactaatggaaattgttgaattttaatgtttttgccgtgtcaaaaatttgtaggtggtggacaaaacaatccgtcagtgtttggtggacctgagcgaagaccctgatgttgatgttcgttattttgcaaatcaagcacttaattccatcgatggttccacagcagcacaatcctgaattgtttttttttcatatgtatgatcgttaagttaagtttctattattcgtgttctctgcaatttatttggtttgtttgtgtaaacgccattttggttgctggctatgaactgcaactatttttgttagtaaaattgtataccttttttaactttctgttg

SEQ ID NO: 14975 - DNA, 459 bp, Arabidopsis thaliana columbia
aagttcattggtccagttcagttcaatggacaagatttcatcagttgctttgtggaaaatgatatcagcgtgtttgagttgagatgcaagagggaactcaaacatgaggggcagaaatatcaacccacatgaagtaggatacatgggtaaagcacccctctaagaaaatcagaaaatttaacatcggtgaacattacatatatatccatattactttcatgaatcagtaatgacctagagggtaaagcatatatacgaccagcacacagagagccaaaaactacgcaacgatcaccatctacagagtacttcagagtcagattgcaaataaggatctaaccttggcaaagtcctctacccgagatggcttcatgatgtaagcaactattgcagcaccatcacccagtggctgttttgggaggcgatatcaaaagggtggtcaaaatactaatcggcaag

SEQ ID NO: 14976 - DNA, 431 bp, Arabidopsis thaliana
tctacagaaacagtgcatacctcagccatttgtttctgtccgcacagcaccgctcccgtggccttgggagctgatagctgtttagcccttgcaaaagcagcctatacaacacattatgtatatattagtttgatccacattgagttacagcagacttgactaaggagcacgtttctcaatctcacctgcacatatccagtttcccctttccacccatcatctggctgtgataataccggcacaactttgacacccgctgattcccactctttaaacttttcctacaaaatcaagagcgtttccaagatgattcttctgtagatcaaaatgagagcgagagataggctttacgcttatcatcaaaagatttttataattcaagcacacacatttatatctactgacatcatgaattgcaaaacaactgagag

SEQ ID NO: 14977 - DNA, 563 bp, Arabidopsis thaliana
ctgtagacaaatctacatgatgacaacagtgagtgtgagatgcctgaattacccgcggtcctcggctttattactgttaatacccgctctcacttcctctgcgttcttggctacttcaacaaatattagtctaccatctacaatctgacacaaacaaaataacccaatacaacttcaatacatttctaaagaagcaaaacaacgttattagtcacaatgagaggaacaaaatcgatatagcttcagaccctaattggcatttctacaatgaatttagagccctatggaacttatggatatgttaatgattcattacagaacaaatttcttaagctaatctcttattagcgtacattaaacaagaaagctagaaacctattgaagtgttgttaatggagaaattcaattgtatttttttactcaccttcccatctaagcttttcaatgcctttcgtgcatcatcttcagaatcgaaggtgataaagccgaatcctttaggtctctgtgtttctgaatctctaataagccgagctaaacaaccccacaaacacaaatttagttca

SEQ ID NO: 14978 - DNA, 548 bp, Arabidopsis thaliana columbia
caggttcttggacatgtatgttaccacatcctcgcagctggtttgaatggttacatggcgacagtgactaacctgaagagtcctgtaaacaaatggaaatgcggggctgcgctatctcagttgagttttgtctcttatttataaggctaaagttgtttagtatatgtgttgatttctgacttcaagtttcagttttactgaccccaatctctttctctgtttaaccttaggcaatgatgacggttaagcgttggtcccaaaattctggttctactacgattggtagacctgtaattcatccagcttcagttgacttgaaaggaaaagcatacgagtaagcttttgttcctcactcattagacaaagattagaatgaacatgaaatcaagtgatataatttgtcaaatgattttgcagtctattgagacaaaacgcgcagaaattcttgatggaagatatgtccgaaacccaggaccagtccagtatgatggctcaggtgcagatgcaaaggcggtaagtctgtgtgtagaagccaggattacatgggg

SEQ ID NO: 14979 - DNA, 347 bp, Arabidopsis thaliana columbia
ctgactctcctgtctctgatcgtgtcgtcgttacgcatatgctcaatggactttctgaaaagtttgacaacatcatcaacatcatcaagcatcgccaaccgttcccatctttctctgttgcccgatccatgctcattgaggaagaacgtcgtctctccaagcaggtcaaaacaggatcctctcactcagccaactcatcgtctcccaatgtgctctatgtaacgtctaatggaaatcaaaactccatgtctcgcgacaacaatcacaacacttatcgtgacaacaacaacaccggctaccgcgacaacaaccacaacaactacaatgggcacaacaacaatggtaga

SEQ ID NO: 14980 - DNA, 555 bp, Arabidopsis thaliana columbia
tgtgttggactttgtagtaatcttctcctcccctggacagtttcttcttaaagtcccaattatttaagatgacatgcacttctttcaaggaagtgataaatttcaacccatcaggaagctcctttaatttaggatcgttgcggatagtcagcttatgaagccgtggcatggagccttcttcgactatccactcttcccactcctctagtccacacaaatcgagcttttgcaattgaggaaacccaccatccgagcaaaccattctcttcccacagaaagattgatgagataaactgacctcgtttaattgaagcagcttctctaaaatcggcattggatcctccttcaaacaacactcagctagagatatgtttcgaagatgccaaggaaaatgttgttcatcaggtaaccttggcatatatattctcaaattcagatgcttgagctgatcgcagtccaaaactaatccttctataccactcatgggagcatacatcggggaataacagatagtaagattttcaagtctcctagtttacttagagatgaagatag

SEQ ID NO: 14981 - DNA, 389 bp, Arabidopsis thaliana columbia
taacgtcgagacgaaaaaccatccttcaacttaggttgcataaagaaataaaaaattatactcacggcaataatatagagaaatttaagaaatacatatgaaaactaagaaagaggctataataaacccacccaaatgcttctcgtagaagagcacactcattttccaaaaacatgggagcctccatgcaaccggttgaccacgcatgcagacaaagtcgtacacatgcatcataggaaaccacagcatgccatggcccacgagaactgtatcagggttccataaaaaatgttggcagagtgattaaaaagaatccaacttgtatactgaacaaagtgaagataactgacgtactctatctgtctatatccagtttctgaagcagtgaa

SEQ ID NO: 14982 - DNA, 515 bp, Arabidopsis thaliana columbia
catagttcaaatataaggaagaggactttcagcaatacctgtctgtgaccgatatttctacggtacttcttcttaggcttgtacttgaagactaccactttatcattcaaaccctacaacaacaaatgacattccggttattccaagtttagaggcgactacatagtcgaaaatacaaaaccaccaatcagaaatttaagaaatcgtttgtattgacttacttgactttccacaacagcatgtacagtggcattggtcacaaccggcttgccaatgtaagtgtgtgtctttgttccaacaagcaacactttgttgagaacaatctgcacaagagaaaaaacaaaatatgaaaacttcaggaatcaccaaaaatgcaacagagaacagcttaacacaatgttaacataggcaaaagaatagaacttctacacaagccacaaagtttactcaatcttccatagttacatcatcttttcacagatataccatttcgtacacagagtttttttcaaaga

SEQ ID NO: 14983 - DNA, 628 bp, Arabidopsis thaliana
ttaagagcggtgcagagacaaacggctgcctcaacatcagcgagtccttggatgaggctgcagcatggctcgaccggtggcttgccaagggtcaagtccaggaggccgttgagcacattagcgcagacaccgagcttgagggtgtctttagggcacttgctcgagccagagctagggcttggggttggtttaggagttggctttggcttgggagaggggcaacctccgccgcacggagtacagctaccacaggcggagattgttgtgaaaaagagaagattgagagccaagaaaagagctatggaacttgaagccatttttggtatatagaaaatactgtttactagctagctaggttgtgagtgaattgggtgtggagaaaatgaaagaattgagataggttttatagtggtttcaagaaaagcccaagagcgtccgatccataagatatatgatgggatttttttataacaataagtataaatgattgactaccattatcataattttattgattacagtaatatataataaacaagattgaatgattgaaattagggaccttgaaattatgtacatggaagtttcacattgtcgatttgtttatatgaagatacgaaatgtatta

SEQ ID NO: 14984 - DNA, 1757 bp, Arabidopsis thaliana
ggttcattctacattctcctttagttttatgtatacttttgttctccttgtttgcaagatattgaggtttcttgttcgacaagtaatagagacaataaattcatatcttcatctgcttttcaggttctggcgtcttgaggagttgcttaagagatggcgtcatggacttcatcccagttcctgtatgaagaaaccaagccatggggtattcagttcttggaaaagtttaagcgttcaggaagactctccttcaagcaataccaagcccttgtcttcattttgacctttgtcgcctacatcgccttccatgctgcccgaaagcccaatagcattgtcaagggaacactttctgcatcaacaatcgaaggcggttgggctccttttgatggacctgatggaacagccttgcttgggcagatcgacttggctttcctctctgtctatgcggttgggatgtttgtggcaggtcacttgggcgatcgtttggatctcaggacgtttctgaccatcggtatgatcgggaccggccttttcacagctctcttcggggtcgcattctgggcgaatttccacagcttctactatttcttggcggttcaggttatggcggggttgtttcagtcgataggttggccttgtatcgtggctgtgctcgggaattggttcgacaagaagagaagaggaatgattatgggtgtttggagcgctcacacttccctcggtaacattgcagggtctctgatcgcgtctgggctgcttagatatgggtggggttggtcatttcttggcccggcttttctcatgacttttcttgggatcgttgtttaccttttcttgccggtgaatcctccaaccgttgaggcagagagagatggaactgaaattgactctaccatgaggctcggtgacaccattacagagagcttattggaatctagaatgagtactggattcgatagaaaggcagtcgggttcatggccgcttggaaaatccccggtgttgctcctttcgccttctgcctcttcttcacaaagttggtctcatacactttcctctactggcttcctttctacgtcagccacaacagtaatgtttctcatcatctctccttccttttacctctagtgttgtagcctgactatatatgcattgtctgaattatatgtgatgcagtgatcggaggagagtacctgtcagaggagacatcaggaaacttgtcgacaatcttcgatgttggaggcgttgttggtggagtcttagccggatacatatctgatcaactcaacggcagagccatcacagcagcaggattcatgtacttggccatcccagctcttttcctctacagagtctttggacacatctcattgaccatcaatgtcatcctcatgttcacatcaggagtcttcatcattggaccatttgctctcatcacaacagctgtctcagctgatctcggaacccacaaatctctcaaaggcaatgcaagggctttggctacagtctcagctatcatagacggcacaggatccgtcggtgctgcgattggaccagtcctcactggttacatctctgccataagctgggacgcagtgtctttacatgttgatgactgcagcattgatctctggattgttgctcactaaactaatcatagcagaagtcaaagcgttattgtttggatcagaagatgaagtagctgcatcatcatcatcaccaccagcatccagacctcccattgatgtcctcgtttgag

SEQ ID NO: 14985 - DNA, 524 bp, Arabidopsis thaliana columbia
ctcaaagttttcacgggatactgaatcagtcaaagcctggtatgctttagatatgaactccacaaaatatttattggcttctgtagagatcaacaaatgcgcatagaagaaaaaactatcaggatcaaaagctgcaaccataattccgtaatgatcaaaagggaaaaaaaaaataacaaggggaaaaacttgacctggatctggatttttatcaggatggtattgaatcgacagccttctatatgctttctttatttctgaatctgtaactccaggttccagtccaagtatactgaatgggtcaaaaacttgagcctgtaacacaaaagaaggtaaataagcaagtagaattagttgatatcagtcagcggtgcattcaagttcaacagcaagcaatgggattacctcacggctcatgttcttagtgtaataaatcaagaaaatcatcacgacccagagtagcacaagtgtcaagttgctccacgtagagcagttagagatctgcagatagataagtgaagaag

SEQ ID NO: 14986 - DNA, 742 bp, Arabidopsis thaliana
tggtgtgttcaatctttgctccaacaagtacttcaagcttctctgatccgttttaatcacaaagtgatttggtaacattaatgtctccacttgttaacagcaaaaattacagccaacaactccttctcatttattgataaatgtaactgcttacccttcagctgcctcctaagataggccaatggatgaccctcttacatcaacaccgctccaattccttgcccacaagcgtctgtctccactacaaacggtttgtcaaacaagggtaatgctaacaccggagcattacacaaagctttcttaagcaacacaaaagcttcttgtcattcctgtgaccaaacaaaagaatttgttttggttattgcatgcgaaggtcttgctattacaccaaaacccttaacaaatcttctgtaatacccagctaagccaaggaacccactgaattgtttaacattcactattacaggtcattcttgcaccgcttttatcttagccggacttgtttctataccgttcccactgatgaagtgacccaagtactccacctaaggcactgcaaacgcacagttactcatctttgcatacagcttctgcttcctcatcacttcaaaaaccatacgcaaacgcttcttatgttcctcgacagacgagctatacacaaatatgtcatcaaaaaaaactagcacaaacttccttaagaaatctttaaaggctgaattcatgggactctgaaaagttgcag

SEQ ID NO: 14987 - DNA, 548 bp, Arabidopsis thaliana
taggtccgctaatggttttagatttcgttgtgtagaagaaaatggattggcaaggacagaaactggtggagcagctgatgcagatcttactggtgatctccggcgttgtagcggtggttgttggctacacaacggaatcgttcaggacgatgatgctgatctatgccggtggtgttgttctcacgactttggttactgtacctaattggcctttctacaatcttcatcctctcaaatggttagatccgagcgaacgcgagaagcatcccaaaccagaagttgtcagtgttgcttcgaagaagaaattctctaagaaataggtctgattctgaatctctctctctctctctctctctctctctctcagaattgtttgtatgagatatttgtggatcggaatcttaattatgaattgaatattctgggttgattcttataattatctgtttttgccaaaggaatttgcttttgaatcaatggctatggctgtaatctggcaatttcactgaattgtgtagattatctacatcagagagttttagatgaaa

SEQ ID NO: 14988 - DNA, 879 bp, Arabidopsis thaliana
  unsure (1)..(879): unsure at all n locations
ccaagaaaaaaagtttgtcaaaattgaaaaaaactagacacgtggtacatgggattgtccgaaaaacgttgtccacatgtgcatcgaaccagctaagattgacaacaacacttcgtcggctcgtatttctctttttgtcttgtgaccaaatccgatggtccagattgggtttatatgttttaaagttcctagaactcatggtgggtgggtcccaatcagattcgcctagaccaaaccgatctcaacgaaccctccgcacatcattgattatgacattaatatagatattgtcgttgctgacgtgtcgtaatttgatgttattgtcagatgggacgagaggagctcagccgtgacgccggatgaggaagttttctatctggtggctctattgagatcagctttaacggacggtgaagagacacagaagctagagtatctgaaagatcagaaccgtcggatcttggagttctgtgaacaagccaagatcaatgtgaagcagtatcttcctcaccacgcaacacaggaagagtgggtggctcattttggggacaagtgggatcggttcagaagcttaaaggctgagtttgatccgcgacacatactcgctactggtcagagaatctttcaaaacccatctttgtctttgtttctccgtcgtcgtcttcttcgtcagcggcttcatggtgacacaggacaaaaccaagaggaaagtagtagttgagaaatattcttcctgatgtatatatatgacctaatagagaagcatcagagagattaggttgggtcttttgttagtaggggttttaaaattagagtagaagattcaaaattagtcaaatttattgtgttgtntttatcatcacggattttggaaatggg

SEQ ID NO: 14989 - DNA, 553 bp, Arabidopsis thaliana
agtaccgcctttgctcaccccaccgaatacatacacatggttttcatccgaagccatcgaatggaaagtacgagcctcgggtcctcccacctcatcaagcttcgtcaggaatgtccactcggatgtcaccgtatcgtaggagcgaaagttttcgaagttgcggttctcatcgcggcctccaaagatatagatcttagttcccacggccaccatgcgcacgcctaagcaggatacagttggggcgtctcctttgggttgagcgattgaccaagtttgagtgttgaagtcaaagacgtagaggtctttgtcgatgtgtttgtttggtgttaactcgccgccgaaactgtagagcttgtctccgaccgcggctatgccgtgtgaacttctaggtcctggtcccgttcctcctttctgccccacctatttatcaccaacataaatcatacgatgataatgcatgtgtttctttaatttcctttgataattatgtaacactagattttaatccgcggtacaccgcgagacaattcattttttaaaattaatatatata

SEQ ID NO: 14990 - DNA, 603 bp, Arabidopsis thaliana
tagtaacgtccgccagtgtgctttaaagaatttcccgctcatagccactttcggcagcaatcacctcaccgagtactgcattaagatccgccatttccatcggcatctcctgcccggtgcgcaggtagtcgataaactgctcaatgatggcgttgcactcttcgatatctttattgatcgattctgccagatagccatcctgctcgctcatcatctcagtcgccaggcgaatacgcgtcaggccgtgcgcaagtcgtgacttacccccgccatcagcagcgtgcggtcatccgccagttgcttaacaccagccgccatatggttaaaggcacgggtaacggaacgcacctccgaagcgccatactcacgcagcggcggcggaataatccctttaccaacctgcaaggctgcgtgttcgagatcgaccaacggtcgtgttctggatacgaataaacagccacgccccgcctatcgccaatagcataatcgccagcgtatagcggaacagcggagagaaatcgcctgatgaatttcggtcagcggcaccgtacccagatattgggcgacacatggttttcagcagacgacagcgaacttttgttg

SEQ ID NO: 14991 - DNA, 537 bp, Arabidopsis thaliana
agtaacgtccgccagtgtgctctaaagaaatcttaatcgccttggtttatggaagacgaattagcgtgttttgtaaatcagatgattaataacccgctttatcaatcacaaaggttttgccacagttacctgggtgaggttgtggcaagaatgagtttgcagaaagcggagtgttgattggcgtcacgtttgatcgagatctgaatttcagtcaaatacgcagggttaccctggcacgttagcttaactgctttcacgttctcttttccccagcttttggcaaaggcggcgtcaaagtcacggcggctcactgttttaccgtaattatccgcaaggaattttccggcttcgctctctttaatttcttgattcaggcgtaccatcgtaccgaagtatgcgtccggatcaaaaccaaagcaggcaccgtgtttggcatattcgtagcgttccaggcaggaacgtccgccagctcctggcatgacttcacttagtttagcggccgttccagtgataaccggttccggcgatgacacattc

SEQ ID NO: 14992 - DNA, 409 bp, Arabidopsis thaliana columbia
aggatgcagtatcgaaccttcctccctcagtggtcgtgagattaacggtgaaagtctcaaccgcgaaatctccagttgtgtgcgacctgtctccataccagtagaaataagggcacgattggttatctgattcgcactgtactggaggatcgggtgatgagataaggctgcatccagggtcattgcatgtcactgtctcgactgaatcggacgtagctggcccatcaggcattccgtatcgacgggttcagtcgtagccgctcactgcattggagccagtgtaagtcactccctgtgtctcagagtcaatgagaagctgtaatggtggcgtcccacaagcacgtgcatgaagtattcccagaaccgagcgtcataccggactcaagtggtgctatcagcttccccggtg

SEQ ID NO: 14993 - DNA, 515 bp, Arabidopsis thaliana columbia
tttcctcttcttcttcttcttcttcttcttccctctctctaagctttcttaattctcctctattccttcagaaatcaaaatcttaacagtcgaaactaattaaatctttccgaagtaaagacaacttctgcttctgattctgtcacttttagttaacttttctttcccggcgactcaaagcttaattgtcgccggcgattttttgttctcaagcattgatcctaatgttttccaagtacagtttcattctttgtcttattttcttcttcgtcacagcattttccggcgactccagagctcttgctggaaacaatgagcagaagaacatctctggcttttctgggattgactttccaaatccaatgcgtttcggttctgcttcttcttccacaagcaacgattgcggcttctcttcccctgagaaagaaccaccaaggaacggaccggagaaaacaagacggtgaagtttcacttaaagcgccgggagactacgactacagagaaggcaacaacaa

SEQ ID NO: 14994 - DNA, 501 bp, Arabidopsis thaliana columbia
ggtggtggatacttcaccggtggatgctcgtatggtggcggtggatacttcttgatcggtggtggatactgcaccggtggaggatatttctcgattggcggcggtttaggtggagaatatggaaattttggtccccatttaaacggcggccaatgatgaaaccaattaggaacagagtttgtagaagcagaggaggccaaacacaaactaaaaatgcttccttgtgttactaacactgcgagacaaaagtagctagacaagacttcatttttcttgttgtgaatagcagcaagttaaaatacgggttttaaagtaaacagaggacttaagactctatacaacacattgcagtgacattgccacattgcagcaaacctcacagctggttttaaaacctaaatccaggaaagtaaactgacagaagcttttgtatccatgcacgtccaaagtttgacagtttcatatggaaccagggatttgacgttttttggtcacttgtat

SEQ ID NO: 14995 - DNA, 301 bp, Arabidopsis thaliana columbia
ttttacttgttcctagcctggtttgatgactacgtatatggtttcttagtgcgaatcttgactcttttaatctataaatagggaaaaaatatgtgactttggtacataaaaggaaaaaaattgagactttggttgtaatgattttgttatagatctgcgtatgagagttctctattctgtgaacaatttcataaggaccaatctggttggagggaatgcaatttgtgtagcaaggagcgtctttgaaacctgttgtaaaatcttaagtctttccaaaaggcaaggttaaatggagatgtgt

SEQ ID NO: 14996 - DNA, 450 bp, Arabidopsis thaliana columbia
atcagaaatttgatggaatacccgaagggtgatcaaaagagactgcggattaagccaattgtgtaactctcttcacaaaccaatcaatacaatgttggagtatcaaatcaccaaaacggacttacagggttcatcagaagctcctctttgaattgcttgtactgagaccttttcttagctaactcagaagaccacagagagcgatccggtgacaaataatccaacaaaagctgtcaaattcaagaaaacagcatgaagcataaactgacagaattagtaatcggagaagaaactgtatcttcttcatcttgcttaaattgcattctttttttgtttttttttttgaacaccaattagtaatcggagaagaaactgtatcgtcttcatcttgcttaaattgtaccatttccatacactcttaaggatttcatgaaaaccacaagcaagttc

SEQ ID NO: 14997 - DNA, 552 bp, Arabidopsis thaliana columbia
aatgtgattttaatagctctttgcctatgcagattccacgccacccatgagaggtagaggttggaacagagctctcaaggaaaggcgtggtatggtagtatttacccaagagtgttctagcaagaaggcttgttgggtttgagagtattctccaactgacctttgcaagcagcgcatcattaaaagcactgtaggtctcgaaaccccaatcctcccacacctttaggttgtgtaagtttttgccacgaaacccaacacattttgtttttgtccatgcttaaatcccactagaaacgtgtttaagcggactgaatacgtttgtacaaagagtttgggagtttgaagcatgacatagtataggttggcatggctgctaaacctgactttaacatgatcattttgcctgcagtagagaggaatttggaagaccagctacaagctcgctatcggatcctatcaacaactagagcaaagaggtctttcttcttccttcccaacaatttaggcagcccaaatattttccaaacctccttccttttatattccaattgg

SEQ ID NO: 14998 - DNA, 575 bp, Arabidopsis thaliana columbia
tctagtaacgaccgctagattctttgatttgtgggtctatgtcgaatctaggttgtgatgtgtaaagatgataattttcagggagaaattgttacaatggagggatcttaaggagatttggaacctcttctgctgctgctgaggaaatcataaacccatctgttcaagtttctcacacacagctcctcatcaatgggaactttgttgactctgcttctggtgattaaagttttcatttttatttgtctcccacgtagaggaattggtagaaaaaagcaaagttttttgagtattgatatttggatttggggatttaggtaagacgtttccgactcttgatccgaggacaggcgaagtcattgctcatgtagctgaaggcgatgctgaagatatcaatcgagctgtgaaagctgcaaggacggcctttgatgaaggaccttggcctaaaatgagctcttatgtatgtatattactactcttcgtgagtcttcagttttatgaacttcaatgtgatatggatggcacatatggttattgttttggggttcaggaaaggtcaagagttttgttgaggt

SEQ ID NO: 14999 - DNA, 600 bp, Arabidopsis thaliana columbia
aaacagtgagcatgaagttctcgtaattgaaaatagctgagcctgataacgccgtatccttctccttgaactgtctcggtgagcccctgcgattattttttatcaaaacataacatacattagacacattgtaaaggaacaatcttgaataattcaaatggtagaattgcatgagaatgtgacgacccaagccatgaaaatagcatacctttacagtcaaacaacacctacatcaatggaaaataaaccagaatcagtgatgaattatacttgttacagagtaagaaaaggtaagggggttgaaacgaatgaacatactcgatgaaattgtcatattcgatagccctgttcctgcctccgcttttgtcaaactttgaaaccagcagatccaaaatcacaggagaaacagaaaacccaaggctcatgagtgcatctctcagctcgtttgtatctattctaccgcttctgtccttatcaaacctctcaaagatagactgaaaccaattccaaagaagcaacaccaaacaaaacccacatgagctaacaactcccaacattcttgaccaacaattatcatcaaaccattagaaaaacctttga

SEQ ID NO: 15000 - DNA, 502 bp, Arabidopsis thaliana columbia
taacatcccaaatcttagccttaagctgtttagtttcttgttctcgttgggatagctgaggaggtgcgtgtttcagctgagatagcagccaattaccgcttttaaccgtgtaacacccatcccgattgtaagcccaaatgtagctgtcccgtgacaaaacgttaggagggtatgacattattctaaccacatccagagggagaaacagctccgatagtagaccatggttccaagagccttggggggtaataaggtttgaaaccatgagatctaaatcaaaaagagactgcttattaaaaggccgacgaggtactttatcaaaaatccacttctcgagccaaacattcgtcgaaaggccatctccaatatttttcataagccctttagccagcaaatcactggcatggatgatactacgccatgcataagatggacgtgatccaataagagcatccaaaaaccccttttggttataatacgttgccttgtaaacacgagctag

SEQ ID NO: 15001 - DNA, 652 bp, Arabidopsis thaliana columbia
tggggcacaaaacggataatgagaaatacagcagccccaattaccagactcgcatagaacatgaatgctgcaacaaactagacgaagttagaaaattgaatggaaggcgaaatagaatcatgagtcatgagatggctcaaatcacagccccatcaagcaacgcacctggttcagttgcaagattccaaacttcaatcacagagtcaatttcacgttcttgaggggcatgtaagacaattgttgtggaacccacaacacataaggcacagccaagaattccaaagatatgtagtttttcccgtaatataatatgagctaagacagcactgagattcagataacaaagtgtaagagaaaagaaagaaaaatcacacattcaatcgtatatagaaaacctgatggaagagtcagacatgagtaatctcttacctgataatgatactgacagcacctagaggagtgacaagtatagcaggcgcaaatgcataagcagcgaaattggcaatttcaccaagtaacactggaagtagcagaaactaatgagcaacaaaacaaacgaacaacatagtaatcacaaaaacccctaaccacaaggatcttgagagccttctcaaccctttgatgagatggtttcagcataatgtatgtgact

SEQ ID NO: 15002 - DNA, 614 bp, Arabidopsis thaliana columbia
caatctcataaggtctatgcactccaaaccgaggctttattgcatcttcagcgacacgaggaagcatacagcgtgtatcagaaaggaacaaaacgcttcgacatcgatagtttcataaagatttttggtctttccctcacttcttacctcttgatggtcggagctcaggtctacatagcagtaggaaggtttgaagatgcagtaacggcgtcaaggcaagcggctcgacttgatccaagcagcgaagaagtaaacgcggtggctagaaaagcgagacggtatgcttctgcaagactgagtggaaatttgcttttcaacgcatcaaaatttgaaggggctagcgtggtttacacggaaggacttgagaacgatccatataatgctctcttgctctgtaacagagctgcttcaagattcaagcttgatctgttcgagaaagctattgaagattgcacattggctctcagtctccagccatcgtaccggacagcgaggcggcgcagggcagattcttatgccaaggtattcaaaagcttaatttaaccggtccgacgatttcgaaatgctattagtgtggttcactaagtgtggtgtaatttgtgatgaatgttttg

SEQ ID NO: 15003 - DNA, 589 bp, Arabidopsis thaliana columbia
cgtcacttcaagattctgccattcatcccatctctctgcaagcccttctccttctagcatccttactatacttccgacatcgctggtcggtgtaataagcctataacttcacattttattttatttggttaatattatgttagacaagaggtcctaataagaaattcatagtttgagagatgttcatatcttgttttgaatgctagctcgaatatctgctcatattcatccacaaagtgaaaacatggatcccttctttcccattgttgggcagctcatcaacgtctctccggtcagcttccgggaatattatagtcttcactagacttccgagaatctttccagttagagtgagtctccagtcattgcaagatccttcctcacaggtttcttcatggcaagtgataaaaaggatgtgatcatatatggttgcagcctgcgcttgtaccgttagctctaggcaaatcatggaattcgcaaagaaggtgttctcaggttgtctccatgtatgatgtatgttgatgtccagatcgagccatacaatttcccgttagaaagtgaccgtactgtttatttttgactgcataca

SEQ ID NO: 15004 - DNA, 526 bp, Arabidopsis thaliana columbia
tgatcacaatgttcactacgccaagacaaatcctcagggcgatgatatcataacttggttacttgacgactattctttaatagataagagctttgggttccccagatctattggggcacacaatcttgatataaggatggctgttctgagagccattcacttcacgcgtaggactttggcaaccagatatgcaaagaagtggcagatcctatgttatgacgaatgtcttaatgacgccaggaacttatgtatacaagaagatgaaagtagaatgaatgttccggaagatcaaaggaacatatatgcatctcttctatgcgacagttgtgaagagcagttaacgatagacactgaagatcctctttttacagaattatacttgtgtgcagtacgagatgttctcgaaggaatatcacatccgacatttgatttcactaatgcagaagattgcctggaacttatacatgggcttaaaaatatcagtgatgatatagtgttaaagtccattgaccttctgaaatcagtg

SEQ ID NO: 15005 - DNA, 593 bp, Arabidopsis thaliana columbia
gcgagactcagcatcttccatgtcgagaatcactttcgagactcagcattaacatctccccttagcatgtcaataacatccatgactgtcattacacacttctccccaaatagacgattccaaacagacagatatgcaggatcttggtgatcttccttctcaaaattccttggaaacttatcacaattcaggccagttgtgatttggaattcccggagagagaagcggagtggaaaccctcaatatacaatccacaattcatgcttccgttgtgtcaaaaattgtgtagcaagcatcgcgtgaatcaactttgcagaatgagaacaccttgcaacaggcagttcaaacaattttttgaactaggaactaagcagcacatcccaagtcttgaagccctccaatagttccaccagcgtgccaagatattccggcttcgagtatatgttgaggcgagctttatctagaaatctatcgggttcgaggattcatcgaccaggagttataatcgtcgacggggtccgagaattcgtcgaccagtgcgaggattggtcgaggattcgtcgactaggtgttggaatcatcgacggtacgag

SEQ ID NO: 15006 - DNA, 407 bp, Arabidopsis thaliana columbia
tgtcaaggctgatgtcaggggtcttttcggctctgtcttttgtgattttgggcctgaatttgcggttcttgatgttgatggagaggaaccccatacaggcatcattgcgtctatctctaatgagaaccaggcatttatttcctgtgtcgacgatgagaggcttgagtttgaagatggtgacctagttgttttctcagaagttgagggtatgacagaattgaatgatgggaaaccaaggaagataaaaagtacacggccatattcattcacccttgatgaggacactactaactatggaacatatgtgaagggtggtattgtcactcaagtgaaacagccaaagttactgaatttcaagccattgagggaagcgcttaaggatccaggggattttctatttagtgaat

SEQ ID NO: 15007 - DNA, 561 bp, Arabidopsis thaliana
cacattgaagcacatcagcttcagacaaatctgtaaagaactgtggaagggttttcggtttcctgtgaacatcttctttttgtccgcaatgcacattaaagtttttgtagtcaagagactcgtcgttgtaaatgtcccaccatttctctacaagcatcttgatgtcttccctctccatatttccttcttggcctgtgaacctattcacaaaacagagaagcaatttcagatctttcacctttttttttttaaattaacaagaagataattagatcatacctccaaggcttagcaccggctgcacagtaatgaacaaccttagcttcgttaagctctatgttctctggatgcctccagagcatggccaagacaagattgtaaactggtggaataggcttgtatatgtctttgaagtacatgttcaagaaatcctataaaacacacacaaatcaacttagcctcataatattagagtaaggtacaagacctctaatatgtatagtggtagctgccccatgtatgtatataacatatatatatatatatatatatatatatata

SEQ ID NO: 15008 - DNA, 614 bp, Arabidopsis thaliana columbia
gggccatcgcacctcaatggttctaggaacttccagaggcaacaaaaattcaaaacagcagggaactcccaaggatcacagcaggttcacaagggcattgacacagcaaagtttgaagcgtggaaacgaagaagaagaacagaaaacgatgttcagactgagcgaccaacgataacaaactctaactcgctgggaatactcggccctggaccattggatagaagccatagggcacgtcaaaccggatttcccccaagataagttttctctgttctggtaccatacattatgctctgcatttgccggttgaactctggtttgatcatcgattcagaagctcaacaacatagatacccggaaaactcattttttttaaaaagtcggaaacacggcagcagtgttcggttttggttgctcatattggagattggcatacccgactagctgatgctgacgctggcttacccgagaaagccataactttgttattggcaaagagatagcacttaccagttaccaggtggtttgcttaggtataaatagttgtggatgtagcaaagctgctggaatccatttcgttatatatttatatatatatatatatatatatatat

SEQ ID NO: 15009 - DNA, 406 bp, Arabidopsis thaliana
  unsure (1)..(406): unsure at all n locations
nnnnnnnnnnnnnnnnnnnnnnctaaaggttgatcaagcaaggttcgcctcgacagttaagggataagtggtgagtgaactcagcaacgactattaagtgacgcgggacacaggtagaagttgaaggtcaagatatgtcacacacgaagaaacggtctattctgtggttaagaacngacgaggtgtcatttccagtgtaacagatgacaagggttgnaagaaggtctgtcanatcttggagaatgtcaaagagtgcatccacgatgtgggtcctttggagtggcgcatagatcaggagtgttgattttgactaatgacggggacttctacagatgagatgattgacgttggctaatgagattgacaaggtttacgcagacagtgctaaaggtgtggacaataagga

SEQ ID NO: 15010 - DNA, 567 bp, Arabidopsis thaliana
  unsure (1)..(567): unsure at all n locations
tnnnnnnnnnnnnnnnnnnnnnnnctaaaggaccacccagtaccagatgctccgtcacgccattattaaagttaagcgagacaggccttttgaaatcaacgcctgggtcgttttgccagagcatatgcactgtatctggacattacctgaaggcgatgatgatttttcctcgcgctggcgggaaattaaaaagcaatttacccatgcttgtggattgaaaaatatctggcaaccacgtttttgggagcacgccatccgcaataccaaagattataggcatcatgttgattatatttatataaatccagtaaagcatggttgggtaaagcaagtgagtgattggccattctcaacgttccatcgcgatgtcgcgcgagggttatatcccatcgattgggcgggggacgtaacggattttagtgccggggagcgtatcatttcataattgtgcgcagatgcctgatgcgacgctagcgcgtcttatcatgcctacaaacttgtgccggatcggtaggccggataaggcgtttatgcgcatccggcagttatgcgcagatgcctgatgcg

SEQ ID NO: 15011 - DNA, 598 bp, Arabidopsis thaliana columbia
ttttattgctttgaagttgccttgatgacttactgtttgacttgcacttctctagccactggagtcgtcatacacctgaaggagctactcttgaatctgactggagtgcaaagtttgcagcatatgaaaagaagtacccagaggaagcttctgagttgaaatctattatcactggtgaattacctgctggctgggagaaggctctacctgtaagtagaactctctttgcattctgtacaattcaattggtattctagatatgagttatagaacatctttctttttccttttttagacatacacaccagagtctccaggtgatgccaccagaaacctgtcacagcaatgtcttaacgcccttgctaaagttgttcccggtttccttggtggaagtgctgaccttgcatcatccaacatgacattgctgaaacactttggcgacttccaaaaggccacacctgaagaaagaaatcttaggtttggtgttagggagcacggaatgggagccatctgcaatggcattgcccttcacagccccggtcttacccttactgtgcgacgttctttgtcttcacgactacatgagaggtgcatgaga

SEQ ID NO: 15012 - DNA, 477 bp, Arabidopsis thaliana columbia
tgaaaccctaattagactcttgttattggtaaacaggttggcgagagagagggcatgagttcttttgtcgattcaaccgctccattacacatccttcatgaaacatatgccaacaattatacatacggtagatttgtttagcatcgaatcccgactccaacatgtcctccaaacaaatcgcacaagtctcgatttcatcttcttctgtctctttgtccaccaaatctgttgtcgatggagcacagttgcaagacacgactttgtagaccttgcgtgtaatatgacagagactcccaggaataagggcaagtgatcagaactttgatgacttcttagctgttgtgctttaacaacaatccggtcagatatttgtttggacaagacataatcatggagatgaggatggaaaaggtcatagatttagtttgctttgaagtgttggaatttgagaaaaatagatgggttggaaggaggagt

SEQ ID NO: 15013 - DNA, 575 bp, Arabidopsis thaliana columbia
atttgtactcagatcagataacgagtcttaaatattgcaacacagcaagtaattactgtttaacttttactatccgatctatttaaccggttttagacatcctagatacctaaatacatgactttaaacactccaacacctaagctaatctgtcctgaaatctcaaccacccaagtactcagacctaaaataccacatggtagatctaaacctccagtaatcacaatcaccacagtaataagttcacgatcaaaagggtttctatatgcatcggtactaggaagtgtaagaagcttaccaatctgcggtcattccatcttggcttgtaactgcacgaagagcaacaacatgagaatgtgttctcttgtcaccttggactccaactgatcttacaggcaagaacactgcgaaacttgccagatcgaatcatagagacccgcatctctgattgattgaatgaatatctcatcaacctgagaagatgggaaaataaagatgagtttggtaaatgggtaagggccaaccaaaaaaattatacagccagtttgagattttagagcactagcctgacgaag

SEQ ID NO: 15014 - DNA, 573 bp, Arabidopsis thaliana columbia
ttgacagtgaagagacaactttagaagaaggcatctgagggtagtttcgtcattccgtctagttaatgacgaaatataaccaataggcttcttcgaaactggcatggtgacgtatatcttctgatgatattaccgttataccctcttttataaacgaaattggcccaatgggtctgttcgggccagtagtcatccgttttagtctataacgtggcacgatgtaattggttaaagattagaagaccgccggactaagatttaaccagcggtgacttcgacacttattagccggtatatttcttcgccggagcttcctcaacgattatggccaccgatggcgagagtatctcgatgtcgttggcggtggctacctgcgtcgcgatggcactattctacgttttgatcctttacgttcccaccgtgatactccgtctcccgtcggcttcttcttacaccgaattcatgattcggcgattcatctgcgcggccatttgtactgtagcatctctcgtcttcacagcttttatacttccggtaagcttctttgagtacgccatttctcgatttgaagtc

SEQ ID NO: 15015 - DNA, 595 bp, Arabidopsis thaliana columbia
gatagcaggtcgacatctcgacacaagcctctgtttcttcttctgcggcctctttctccaccaagtctggtgtcgacggagcacagttgcaaggcaagactttgtagaccttgcgtgtaaatatgacggagactcccatgaataagggcaagtgatcagaacttcgatcacttcttagctgttgggctttaacaacaatccgatcagatatttgtttggacaagacatgatcgtggagatgcggatggacaaggtcatagatgtagtttgcttcgaagtgttggaatttgagaaagataaatgggttggaaggaggagaatccgggtaagatccaagacttgttacattatgaccgttctcgtctgtgataattttctcgacttctctaggtcgaatgattaacaactcgtttaagaagcctgaagatggaggaagagacatagcagttacactaacatcggcgttgactgattctttggtatccattatctgagagtgaatcaagacaacaaattcagagacagagagatgacccagcagtcgtaagaaagttagagattgttgaaaataggacattgtggagatgtccaagtg

SEQ ID NO: 15016 - DNA, 593 bp, Arabidopsis thaliana columbia
gtctcttctttgagctctatgtgctttttgctcttcttgtcttcgtttttgttctttacttcccaataaactacgtagtgtcccgggatagtggagatatcagcatagctagtgaagtctattagcatgagatgtgatgagtcaagagtgagttttgcgttattcaccgccttaaacagatcatcttcgttagttttgtccaagtcaatgcttaaaaccacgttgtctcttcttataaacctaaactgaggtgctttgttatggaaaccagtcaccactagaatgtctccaactcttattctatacaagcctgaagcaagaaagagcatgaaaaaacattcacatccacaacaacaaagaaaaggattaattaatttcatggtttttaatattcataatgttttattatttagctcacctgaaaaatttgtgacgacagcctcataacaacatccaagtttgacatcagcaaggtcaacaacatcgttcttgtctccatccactggtatgaactcgaagtaggacacgttgggcatgaatgtgtacgatacatcttcaggcttgcacataggattgagatttacccgaattga

SEQ ID NO: 15017 - DNA, 705 bp, Arabidopsis thaliana
ccaaagtgtaaccggagacagttctcagcaaccaccaactgctcaaatacctaccacttctgtaggcttcaatgcttctataacccattatagcaaacactaatagataactttgaagaaaatcaatatgatcccaaaagaacaaactatcctggtttttctattcttcaatcctaatttcccaagttcaacaccattttagatcacattgttcacatcataaataactttgaaagaaaccaacaagttacattctaaacatttcgtcctttgaaaactcttaaaaacacattattaattaagcatcaaagattaatcatacagtcactttacctcacaattttagcaacaaactcatcaatattcttatcagaatttcctccatcagacaaagcttcccttgcaaactccatcaacctccgagcattttttctaatctccttccctttctccgacatatcttccataacttctccaacacatctcacaatctcttcttcggaacaaacccattttgatctgccttaaccctaaccccaaccttccacacatcttcaataaacttagcattagtcggctggtcgctataagccggcattcctatcaaagcaactcctaagctcaatgcctctaaagtcgaattccacccgcaatgagtcatgaaacaaccgattgatttatgtgcaagaacttgtaattgagggg

SEQ ID NO: 15018 - DNA, 577 bp, Arabidopsis thaliana
actaaggtgctgcagaacggttcaatgatgtatcttctcatctatgtggatgatatgcttgtagcagcaaaggataaagaagcaatagcctcttaaaagtctgagttgagcaagcgttttgagatgaaagatttgggggctgctaagaagatacttggtatggagatcaacagaaacagatcagagggtgctctatggctgtctcaggaaggttacttgaataagattcttgaaacttacaatatgtcagaaccaaagcctgcaatgactccacttggagctcattttaagtttcaagctgcaacagaacagaaactggtcagagatgaagactttatgaagtttgtccctactcaagcgctgtgggaagcatcatgtatgccatgattgggacacgtcctgaccttgcttatccagtgggtatcgtcagccgcttcatgagtaaaccgagtaaagatcattgggttggagtgaaatgggtgttgagatacattaaagatactttgaaaacaagactgtgttacaagaatagctcaagtttcaagattgtgggctattgtgatgcaattatgttgat

SEQ ID NO: 15019 - DNA, 2021 bp, Arabidopsis thaliana
tataaggttgggttagaggacgactttgattttacgacttttcttgtgactactatccaaaaaggtcaaacgtggctaccaagatgtgtggggatagacatcgatgataattcaacctaccatatgacctttgactgcataaggccgtcacatttaaagtagctttaggtgtgtagtgtatatttcatttttaaaaaaaaatgagatgaatttttatagagttatgcaaaattttatccggcttggatattttattaaaccctggatttttaactcacatgttatcatttggaacttggaattaatagagagctgaagacaaatgagaaactatattattagttattactacaacaacaacaagaattacaattggacttgcaaaagacgatgtacttttgaacatatcaatttaaatcattcaacaaaacatagaaacaaactcattgatgctcttatcagagctacctccttcagaaactgcctcttgagccaacactttccatttctcagcattctttctaatctctttccctttctctccctccataacttcttccacacttctcataatctcttctcttctcacaaacccatcaccttctgccttaacccttaccccaaccttccacacatcctgcatgaacttagcattcgtgggctgatcagtccagtgtggcataccaatcattggaactcccaaactcaatccctctaacgtcgagttccatccacagtgtgtcaagaaacaaccgattgatttatgtgcaagtacgtcaagctgaggactccagcttacaataagtcctttttcaccgatttcctcgacatagtttcttggaagtttgtgtgtctctgtctctctcacaacccacagaaagaaacgtccgctctgtttcagacccgcagcgagttccaacatttgatcttcttttagaatcaccaaacttccgaatgataaatagacaacagaattaggctcctttgagtttagccactccatgcattcagcgactttcgcattgaagaggctaaaaccgtagttcttgtcttcagacagtcgtttgtctaaatacatcgatggaaccgttggtccaatattcaagactggccacaagctttggacccatttcaacaactacaagcagagaaaataaaacttaaaacacttcctacaaaagacagagacatgttcctctatatggatttatattctgtaccttttcctccaatttatcgaaagtgttgcacaacactatgtcgactcgatcaatgtttgagagctgatccaccacaatcctcagtatattcgggtatgaggacgattcgcagaggaaagacggcaaatcatttgcagtcagcatcgggaacgaagggaaagatgctaatgtcgagtgaccgtactttgtagacggtacagagaacgaacccttgaaaacatggtagtaaatagctgtgacaagccaaggttgcgtgaaaaacacggcaccgctcaatccataactatgagctacatcaagaagccatggcatggtggagtcgtacacgatagccctaggtggatttccgacagtttcatgtcttcaaccaacttcggtaaggtgtttttgatgctggtttctactctttccatgtaatcatcgaggtcttgtaatggttcctcgccttcttggaagccgttggagatggggaagacagtgattgagtcgtgctctgttttgtatggaggagagggtttgtcggagacgaggaccagagtgagcttaagaccttttgaggctaagcgtttgcagaactgggacattggagttatgtggccttgtcctgggaaaggcaagacgataagatgagatccttctctcattttctccttctttttaatcttgtgttgttactgactctagtttttgttgtgtgggtgttgttggtgtgtgttatggatatatatatgattggattagagaacgacttcgattttactacggctttggtgggggactcattaattggactacaatcca

SEQ ID NO: 15020 - DNA, 586 bp, Arabidopsis thaliana columbia
taacggccgccagtgtgctctaaagatcgacattgccggaattggcgagaaaccagcaacacggtccgggccgtagtttttgatggtgtaaacgttagatgcggcgatcagttcgttcacctcctgccaggaagaacgaacaaatccaccgcgtccacgcgcctgcttaaagcttttcgctttatcggcgtcttcaatgatagaagcccatgcctcaaccggatcgctatgcagcgccttcgcttcacgccacattttcatcaggcgtttgcgcatcatcgggtatttcaggcggttggcactgtaaagataccaggagtagctggcaccgcgcgggcagccgcgaggttcatggtttggcagatccggacgggtacgcggatagtcagtctgctgggtttccaggtgaccagaccgtttttgacgtagattttccagctgcaggagctggtgcagtttaccccgtggtagagcggacgattttgtcatgctgccaacgctggcgatatccatcctcccagtcacggttggtattgagaagcatggccatgccatctggcaaaggtttcacccttctgtttgaagt

SEQ ID NO: 15021 - DNA, 622 bp, Arabidopsis thaliana columbia
aactgtttcaaattggaccaagaagcaagaagagcaattatccaacggccattttttcacgggacaacgctcttacctggaagagaagtgccagcagagttcgatcaccgaggaagaggaaataccttgaccattcctctcgaaaggaaaaggtcttaccgtggcgttgggttttgcgtcgtgatttcccctaaccaccaaatcacagaaaaatttcattccggactacttatcaaatctcgaacaaaacatttactgataattcactatcactttgaaagattagaccaccaatctccagcgttgagcagagagttgtttttcgaattacgcagcgtaaacgataacttcagattattgaatgtggtgccagattgattgaagaagagagcattgaagataactatgagtctggatcagaccaagcctccgaagaagatagcatcgaagagaactatggatctggatcagaccaccaagcttccgaagaagatagcatcgaagggagctatgaatctggatcagaacaagcgtccgaagaagacagcatccaagaagagaactatgaagagagcaccaagaaagctatgaagctggatcagaccaagtgtctgaagaagag

SEQ ID NO: 15022 - DNA, 633 bp, Arabidopsis thaliana columbia
ctctttgggaccaaagccttattgtttttgtgatatgtgaacaggtggattacattctcggagacaacccgatgggactgtcttacatggttggatacggtcaaaagtttccacgtaggattcatcaccgtggtagctcggttccttcggtttcagcccatccaagccacatagggtgcaaagaaggctctcgctatttcctaagcccaaatcctaacccaaaccttttggttggtgctgtagtcggtggacctaatgtcactgatgcttttccggattcaagaccttactttcagcagtctgagcccacgacttatatcaatgcaccactagtgggccttctcggttacttctccgcccattctacttggcgatgagggagggccttattacttattactctctatcctattagaggtgtgctggaaactttaggccaccctaaaacccttttttttcttttttaatgttattgcactctttattttctactacttaaccaattgtattgtaacccgtaattagtgaagaagagaaagagttatgtcggtgtctaacttattatatttgcagtcaattaattgaattatttgtttcaagacgactagttaatctcgctagacaagttgatat

SEQ ID NO: 15023 - DNA, 570 bp, Arabidopsis thaliana columbia
tatctggttccggacgaaccggtgtaccacgatttggttcgtcactgtctggcctacccaaaagcggatggaatcttggtgaatacatgggaagagatggagcccaaatcattaaagtcccttcaagacccgaaacttttgggccgggtcgctcgtgtaccggtttatccggttggtccgttatgcagaccgatacaatcatccacgaccgatcacccggtttttgattggttaaacaaacaaccaaacgagtcggttctctacatttccttcgggagtggtggttctctaacggctcaacagttaaccgaattggcgtgggggctcgaggagaccagcaacggtttatatgggtggttcgacgcccgttgacggctcgtcttgcagtgattatttctcggctaaaggcggtgtaacaaagacaacacgccagagtatctaccagaagggttcgtgactcgtacttgcgatagaggtttcatgatcccatcatgggcaccgcaagctgaaatcctagcccatcaggccgttggtgggtttttacacattgtggttggagctcgcgttgga

SEQ ID NO: 15024 - DNA, 834 bp, Arabidopsis thaliana
aaaacaaaaatgtacataatcattctaagtgacaaactcagtgaatgaaattattactatggctacaaattatgaaatcaaaccttatcacaggcgaaacaagctatgctgcaaattgctttgcagccattgcagtttctcttggcagtttctttgacagttgtggctggctcagaagcagcatctccggcggattttccggcctctttttcttcccacttgagcggcttagcagaggcggacgtattatagttgataagtccccatgaatcgaggaaatcaaagacgcgacgaatagagacaacatcactgacgagagttctccgaacgtcagtgaaactaatcttccgaggatggtcgtctctgtactgcttaataatcgagttcctcaagtagagataaaacttagggtttttggatgaagatctcgaatcgaaaaattccggcagtgaccggacctcgcaatcgttaatgtcggtccatgaaaaccaacctaattggttaaatagacggtacaagtacaaaatccgtaagaaacagtgaagaaagtagaataaatcaaagttttctcggcgttgcagacttactggagtagctaggtacgtgaatattatcgatatcggaagaagaagacggcaattgagccgacttagaagctgctgcggcgcctccagacgtagtttcggaaagagagggagtgctcgggagaatttccccagatccgccgggatcgggagctttcatggccatgactctctgtttaactaacgcaacttcgccggagaaggaagagggaaaagagaatctagctatcgagatgggcaaagttaaaaa

SEQ ID NO: 15025 - DNA, 632 bp, Arabidopsis thaliana columbia
tggcaatcggatacgtcacttgacaaatgctctttagtggaacgcattttgcaactcgaccctttagaagtacgtacggacggtgttcttctttatcacatttctttctgcttctggcaactgaatctctttttctctgtgcttctttcttctagttgaatatcttcagggggatcacactacctgatgctcctatatttggaaaggtttttggaggacaatttgtcggacaggtatcgcattttctctaggaaggttacattattatgtctctgtaaaccttgctgatctgattcatgtgcatatatatattgcttgttaacagtgataaccgtaaccactactaagtcacttttaccaacattttacaggctcttgctgcggcgtcaaaaactgttgattttctcaaggtcgtccacagtttacactcctattttcttctcgttggagatattgacagtatgtacataatctcactggggcactttctagccaccaatgatgcctttcttccctattgaaaccaccctgctgttggattcactgattacatagtttgttgtcttgcttgcagtcccattatttacaagttcacgcatacgtgatgggacaactttgccaccgaagagttg

SEQ ID NO: 15026 - DNA, 562 bp, Arabidopsis thaliana columbia
tttttctagggtttctctctttgtttcttacaatgcgactcttcttcacaccgtcaatgtccaatctctccatattcttctcgattcttctcctttctcttcctcttccgtcaatcggagatctcgccgccgacaaatccgctcttctctcttttcgttccgccgtcggtggtcgtacattactctgggacgtcaagcaaacctcaccatgcaactggaccggcgtcttatgcgacggtggtcgtgttactgctcttcgtcttcccggtgaaacgctctccggtcatataccggagggtatttttggtaatttaactcagctccggacgcttagtctccgtctcaatggtcttactggttctcttcctttggatctcggaagctgctccgatcttcggcgtttgtacctgcagggtaacagattctctggtgagattccggaggttttgtttagtcttagtaaccttgttaggttgaatctagctgagaatgaatttagtggagagatctcgtcagggtttaaaaaccttactaggcttaagactctgtacctggagaatac

SEQ ID NO: 15027 - DNA, 564 bp, Arabidopsis thaliana columbia
caaaaggcagaatcaaagggaaaggtgatctgactgaaacagaaaaaccacatctcactaatgtctattttgtggaaggacttacagctaatctgattagtgtaagtcaactttgtgatgaaggtctgactgtgagtttcaacaaagtaaaatgttgggcgaccaatgagagaaaccaaaatactctcacaggagttagaactgggaacaactgttatatgtgggaagaacctaaaatctgtcttagagctgagaaagaggatccggtgctgtggcatcaacgtctgggtcacatgaatgcaaggagcatgtcaaagctagtgaacaaggaaatggttagaggagtgcctgagttgaagcacattgagaaaattgtgtgtggtgcctgtaaccaaggaaaacagattagagttcaacacaagagggttgaaggaattcagacaactcaagttcttgacctgattcacatggaccttatgggaccaatgcagacagaaagcattgctggcaaaaggtatgtttttgttttggttgatgattctcacgatatgcttggggtcgttt

SEQ ID NO: 15028 - DNA, 438 bp, Arabidopsis thaliana columbia
cgccagtgtgctctaaagatgatgctgcacgtcgcggggatgtctttccttggcctcggtgtgaccgcgccgaccgccgaatggggcgtgatgattaacgacgcgcgccagtatatctggacccagccgctgcaaatgttctggccggggctggcgctgtttatcagcgtgatggcctttaacctggtgggtgacgcaatgcgcgatcatctggaccctcatctggtgacggagcacgcacactaatgccgcaacagattgaactacgtaatatcgcgctacaggccgcgcacgcgctggtacacggtgtatcgttaaccctgcaacgcgggcgcatgctggcgttagtcggcggtacggcacgcgcaaatcattaacctgcgccgcaacgatgggcattttgcctgctggcgttcgcagacgcctgggggaaatttt

SEQ ID NO: 15029 - DNA, 705 bp, Arabidopsis thaliana
gtatggcctaatggtttgtgttacattgtggcaacaccaaatgttttgggaccaaaaaaagtatataagttacctttaaagatctcttccatggtcatggaagcagcgagaacacgagtctctccctcgataacaccttcaacaagctcattcacatgatttgactgtttgtcatgaggcgaaataagcctagcgtacagaatcagcgcttcagtgtcatcgacacgagggccgatagtgaagacagcagggagaacgaaagggagcttctctgcactcatggcttggactttgaaagtgtagttcacgggagatacgtcgaaaacggtgcacctttgccatggaaacacccatgatttcttcgagagcttgatatcttcgatcccaccaccggtgatggctaagtactgtgatgctcttgcaaccttgaacatgtctaggatctaaggatttgattgcttttcgccaaaatgattttggagacgaagaatgagtagctgtacttgtttttttgtttcgtgagaagtgtttatatattacatatagtcgttgacatgttacaagactttgtctgtcactgttagagaaatgttaaagaaatttcacaaacttgtatatatcacaaaaaaaaaggatgattgtgaagaatgtttcattcttgactttctatttagattttgtcaagctgaattgtattgcaaaaaa

SEQ ID NO: 15030 - DNA, 720 bp, Arabidopsis thaliana
tgtttaggttagaatctcataataaacaaccaaaagggtaatccaaaagctgaatctttctttcgactcagctctcagatgcatacaccaaaaaaggctctctcttttttttcttctgtttcttactttcatctacttagaatgttttttctttaaagagacgattttgtataaatcaatatagacagataaaacatttaaagcttcaaggacaaatcaatggtattaggactgcaatcacctacgagtgacgacgttttagccaccactgaaactctttcaccatatttccccggaaaaaactcgtactccttcacacctcctgatccatttctagggtttccttccatgtagctcccaaattcctccattggtccctaaacccaccagttaaatcaaataagatcaacagttatatacatatatacctatatatgagtattaataaatggactatacttagtaccgtatgatttgttgcctcgttgaaataaggattaatagtagtactagaagcagaaactgaagctgctctagcgattctatgatcataaaggaaaccttggctcctctgatgatgatctgattgaagaagatactgatcgtagccgttcatcggaggaggaatcattgtgtatttcgaaaatccaccaccgttggatcgaactacattattctgatcaccatccaaacgtttcttctgcagttttttacataaat

SEQ ID NO: 15031 - DNA, 296 bp, Arabidopsis thaliana columbia
tttgagtctttcaacatcgccctagcaattgcaattctctgcttctgtccacctgagagttgaacaccacgttctccaacctaattgtattgacattcaacaaaaaattaagcaaaaggccatgacattaactagacatataatcaaatatttgatttatacctgtgtgtcgtagcctttaggaagtaatgtaatgaaactatgcgcattcgcagcggaacgagcagcttcaacttcaaccattgttgcatcaggctttccatagagtatgttctctagtatagtagtggcaaaga

SEQ ID NO: 15032 - DNA, 561 bp, Arabidopsis thaliana columbia
aatgacctgatattagcatgaaaagcaaattagcttacagaaaataagaagttgaaggaccaacaaagttgattcggaagctcacatggaaccggttaaaaccgcgaagatgatgatgagaacttgtcctccagtgtatcctttctccaatatcatcttcccagcataccaaaccgctaaagcataagtgcaaaagatgactatgttgagtgtaccaagtccaagtcctgtggaagctccttcaaacacccctgctctataagcagagacaagatgcttattgtaattgcttatcgcttgtttctctccagtaaacgatgcaaccgttcttattgacccaactgtttgctcaactacaaccgcagctttcgcataagaagtttgtccacgggaagccattttggaaatgacgatagctagagctgcaccagacattactagaagtggaattgaagataccatgactaatgtaagaagccatccttcagtgaaagctatcacaaatccaccaataaacgttgataccaattgaatagccttccaacctacaaaagaggtttg

SEQ ID NO: 15033 - DNA, 434 bp, Arabidopsis thaliana columbia
gaaaccgagaatctggttgaccaaatcaacacataacactcttgaatcatgaatattgatatatctcgaaacacatcaatcaatctcgaatcttttttttcttgtatcaacatgtctcattgtaaactttagtggcactgcatagttcattgatattgaaaggtggaagactttttctggtagtcctttctacaataagtttagagtatgtgatcattcttttatctcagattcttcactgtgactttctctcagtgtagaagatggaagccttcgggaaaaaactcaaggaacggagcattcaagaatggcaagggtaatttctcgataaacttttcgaaaaactcgtaaaaatgttagtcctaaagttaaacatgatcgcatgtagacattataccaattacaaagtgatgaagaagaaagtgaagcaatat

SEQ ID NO: 15034 - DNA, 509 bp, Arabidopsis thaliana columbia
tcatgggaaacttatatctatcagtgaagttgagggtaaaaagcctaaaagtttcttcttttctcacttttttggttttctcctttccaaagattctaataaaatgaacatgacatgatttgcaggtattctcgttgcttatatcgcgtttggagaaaacgatatcaaactgagagctgaaaggtttctaagcagtatcacaaactcgattgaaatggtactaaggcgaacggtagaggtcaggataattctcttgcctgaaaccgagttactcgttgtccctcaccaaacccggaaaccagaaatgaccaacaaaagtgggcatctaaataacatcgctggtttaaatgccgaaacagatgttgaagttggtagcagcgtggaaagcagatcaaaactcccgatgcaaaggatagaatcaatcatcagagaacaaagattagaaaccgcttggttacaaaccgctgataaagacacacctggatcgataatacgggtaaaaccgaaag

SEQ ID NO: 15035 - DNA, 472 bp, Arabidopsis thaliana columbia
tcactctcactctctctctctccttctctcgcttgaagaacaagcttggtatatttgttacaacgggctaattaaccaatctcttttttcacaaataaaaagaagaaagagaggagtcattttttggggttgatatcttcgaaatgggaaagaaagagcagaaggatcatcattcagtagtagagagcgacgacaaagtcgaagctgttcttcatctccttcgtaaacattctcctctaactcttaaacaggttgggtggcatattcattattatatatccgttacttgaacatgttttattttttaatagaaaattttgattcattatattgttattgggttaatgaatgttgcaggagaagttctgtaacagagcttgtgtcggtagattcttgagaataaaaggagacaatgtgaagaaagcagctaaacagttaaggtcttgcctttcatggagatcttctcttggca

SEQ ID NO: 15036 - DNA, 531 bp, Arabidopsis thaliana columbia
cgtgttatcttttgaggtaaaataccaaagcgaaataaaacatgcatcactgttagtaatactggtagccaacgttgtaaatgttgtttgaagaatcatagggatgagagccacatcgcgaagttcctaagatgatcgtctgcagcgtgttgttccaatctggagtagtatgcattcaaagaagaggagtgcatagatctgaccaaatgtagaatgtatacggacaagcaaagaaaatgtggtctctagtctcatcacgttcaccacaaaatgattgctcttgtccccaacgtcacattcactgacctgtagagagcctatctttaatggccagccaaatgactgctcttgtccccaacgtcgcatttgctgacctgtagagagcctatctataatagccagccaagctatataaatgacactttaggggaagaggtacgtatgatgtccaagtgcattttgaggagaaaagtggctgaaactctccttctttatgcttcaaagaattttatcttgtcaagcaactgacat

SEQ ID NO: 15037 - DNA, 632 bp, Arabidopsis thaliana
gtactagtaacgggttcaccatatgactatctccaactgtggatccagggaaatctacaagatgggaaagaaatagccataaaacgcctttcgagcacctctggacagggtctagaggagttcatgaatgaaataatactcatctcgaaactccaacacagaaacttggtccgccttttgggatgttgcattgaaggagaagaaaagctattgatttatgagtttatggcgaacaaaagcctcaatacctttatctttggtcagtcccttattgtgcatatctctgcatctttccaattatattcatcatgtggaactcttgtacccttgtttatgtgtgaagctgaccaatctgtttttaatttggctagattcgacgaaaaagcttgagcttgattggcccaagcggtttgaaatcattcaaggtattgcttgcggacttctttatcttcaccgcgactcatgtcttagggttgtacacgagatatgaaggtcagcaacatccttttagacgaggaaatgacccaaaaatatcagattttggattggctcggatgttcaaggaaccaacatcaagcaacactcgcagggttgttggacgctgtatgtactctgcgcgtctatagatagat

SEQ ID NO: 15038 - DNA, 584 bp, Arabidopsis thaliana
ctcaaaactacaacataaaaacttagttcggattttgggatgttgcattgaaggagaagagaagctattgatttatgagttcatgttgaacaatagccttgatacctttctcttcggtgggttccttcttgcttcattcctttactatcagcaactttttctctacatggaactgtcttatctgattgttcatactctatattgtcgcttagattcaagaaaaaggcttgagattgactggccaaagagattggatatcattcaaggtattgcgcgtggaattcactatctccatcgtgactcacacctcaaggttattcaccgagatctgaaggttagcaatattcttcttgacgagaagatgaatccaaagatatcagattttggattggctcggatgtatcagggaaccgaatatcaggacaatactcgcagggttgtaggaactctgtaagactgtattttccataacattgttaacaagattcatagtcataaactcataatcgtttattaaacattgggtgaactattcgatgtcgcacagatgatatatgcgtcttgagtatgcatggactgggatg

SEQ ID NO: 15039 - DNA, 663 bp, Arabidopsis thaliana
gtcatagtattatcaaaaagccacccatgcatcaaagcattcaaaaacttctgctgctttggaagccgactatgagtctccaagaggctcccgagaagaggttttctacttctataccacttcttaaaaccgctgcggtgagaggaagaattaaaaccgcggacgttccaacaaaagatgtctatcgacataaaaatcagtgtgatttggggcctttgcccctcgcacttcgctgctgtcgcttagacaacacctctgtgaattgctcctcattttccagatcactatccacatcgtcagaaggtacatcagaagaatcatagtccgcctctgagactgtggtactcttagccacgacaatacttttccctttgcctttaaaggaagcagctttacccgtgataggattgggcctctgggcttccttactagagccagccatagcagcggcattggcgtctgggaccgaaagaggcgggccaatggtcaggacaacgctactcctagttgagcgcctgttacggggggcaacagtattccaatcgccttcctcgacaactggcttaggggtcttggagcgcctgcgctatgcctctttttgacccttgggctggtcacggggacaagcatcactaggtcatagtggagttcaaccttcaggtg

SEQ ID NO: 15040 - DNA, 1761 bp, Arabidopsis thaliana
caaggagtataatggacagaacattcgaagatttcccttggcaagttcgagttgaggtggatggtgttgacatcgaggttcctgaggtgagtcacagataccttacagatacgacccgcatgataattaatgctctaacttctctatgctaaatctctgaaggatgcggaaggaatactggttgcaaacattggaagttacatgggaggggtggatttatggcagaatgaagatgaaacatatgaaaactttgatccgcaatcgatgcacgacaagatagttgaagttgtgagtatatctgggacatggcaccttgggaaacttcaggttatatttgtactcttatgtcttatttgtatacatttgactggtaacctaaaaactaacataaattgatttttgttttgttttcacatcttcaggtcgggttgtctcgtgcgagaaggctagctcaagggtcagcagtcaagatacaactttgtgcgcctttaccagtgcaaattgatggagagccttggaatcagcaaccatgtaccttaaccatatcgcaccatggccaggttcttctctccatttccctaacttagattctggattcaaatcaagttttctactgagaaaaagttgcactagattgtaacagttcgtggtcttctgttttttcttaactcctctaaaagctcgaaccattttttgtgaaactgtttctagttttctcacttaccttcacttgcaccaggctttcatgctaaagagagccgcggaagagccactgggtcacgcagcagctataatcacagatgttctagagaatgcagaaaccaatcaagtgataaacgcttctcagaaacgaacgctgcttcaagaaatggctctacggctaacttaaaacaggggaaaaaaaaagaaaagacagaagacaaaaccttccctcttcaacaaccaatcaatcatcactggttagttacaaatatttacaaatgcgtgtattttacatatcttgtacctctgcctaatgaagggaatgttaaaaagtcttgaagatcgaaatccgctgattgacaaagcgggttctgtgtggaagtaggaaaaaggaaccaaaaattggaatctggttcctagatttttggctgttctcatagtgaatgaaagcaaaacgtgtttaattatctctgtctttctcatattttattattatgggttccttttctatatcaaatagaattttgagaagaatcatgtatgtacatatagatgaaccatgttcttaatttgtgattattttctagaaatagtattattaggcttcttacttcctgttctttttgctgcgtgtttgttcctaatgtttaccattcataaaacttttgaaattatgggctgagttctttgatattcagtatataatacaaacgatatcaagtcaaaagacttcacattttggcttttcacatcaacttcataacttggttgactggtcggtttcgaatttgagttattagtgtttttggtttgaaatttaacgagatgggtatgagaataaaataaatggaaaagaaaaaaaaaaattagtccgaccatgctgttgcttgaggaaggggctatatatcaaaagaaacctcgttttcttgtaataaaacaagccatttttctggttaatatcatatatacgttggtttaacaacactatcattagttagaagtttagaaccaagaaaaagacgtttaacaacgaaagttttaaaaatagaaccactaaaa

SEQ ID NO: 15041 - DNA, 568 bp, Arabidopsis thaliana columbia
ttcgacgtaaaaaagaataatattgtagatagaaaacattttgaaaagtttttaattatgaatatatttaattaaatccataatttatatattttaaatgggcccattttgactttaagaaaatataaggcccaaatagaaagcctatagctcaaagcaagcctgcttttagaccgctttccagatctagaagaaacaatgcaatcttctccgatcttattagacttctcttccgcctttcaccacccacgcgccgccgcgttagccaccacttccggcctaacgaattcacactctccgactaaaaaatatcgcctgataacctctttttcgccttcctcgacactgctagcttcttctcgtagatgtttcacctgccgatttggcgacagttctccgcgattcaattcgaacgaggatgaaactgaaactgaaactgatgatgaagatgattattgtttgacagatgggaaaacagaggaattggtagtaggagacgatggtgttcttatagagttgaagaagctcgagaagagctcgcgtcgaatttcgtcgaagattggaatgg

SEQ ID NO: 15042 - DNA, 557 bp, Arabidopsis thaliana columbia
tgttactaaactaggaaactacgaggaggctcatgtgttcactgctggcaaaggaagttgtgtagctttcttaacgaactatcacatgaatgcacctgcaaaagtagtgttcaataaccgacactatactctacctgcttggtccatcagcattcttccagattgtagaaaccgttgttttcaacactgcgacggtaagtaatggactagtagttgctgttttggtgggaaagcctttagttgcatcatgttgaagctaatatgaagttgttggacaggttgctgcaaagacatcacatgtgcaaatggtgccatctggttccatattgtactcggttgctagatacgatgaagatattgctacttatggaaaccgtgggacaatcacagctcgtggattgttggagcaggttaatgttacacgagatacaactgattacgtgtggtacacaaccaggtacattttgaataccaatagtaacattatctttgcttctcaaacatgatttgttcttggaaaatgaatcggtgtttccggggattgcagtgtggatatt

SEQ ID NO: 15043 - DNA, 558 bp, Arabidopsis thaliana columbia
ctagtaacggtgctctaaaggaatgttccgtcgttattccagacgactggcaactaacatcgcagcagcaagcctttatagaactgtttgctgaagatgatcagccgaaacaataattatcatcattcttattacccatttttaatgaattaaagggcttttaatacaccgcagcaataacagcttgagttatctcaacacaaaataataaccgttaagggtgtagcctatgatcaacacaaatatgaaatattggtcctggatgggcgcgttttctctgtcgatgctcttctgggccgaactcctctggatcattactcactgatccttgaccccgctgcggcggtaatgtcatttgctttgccacaaggtttctcctcttttatcaatttgggttgttatcaaatcgttacgcgatgtttgtgttatctttaatattcaccctgaagagaatcagggcttcgcaaccctgtcattaaggaggagctatgtcgtcaaccctacgagaagccagtaaggacacgttgcaggccaaagataaaacttaccactactaca

SEQ ID NO: 15044 - DNA, 551 bp, Arabidopsis thaliana
tattcggttccctgatacatccgagccaatccaaaatctgatatctttggattcatcttctcgtcaagaagaatattgctgaccttcagatcacggtgaattaccttgaggcatgagtcacgatggagatagtgaattccacgcgcaataccttgaatgatatcaaatctctttggccagtcaatctcaagcctttttcttgaatctaagcaacaatacagcgtgaaaacaatcagaaaagacaattccatatagagaaaaaaagctgccgatagtaaaggaatgaggcaagaaagaacccaccgaagagaaaagtatcaaggcttttgttcaacataaactcataaatcaacagcctctcttctccttcaatgcaacatcctaaaatccgaactaagtttttgtgttgtagttttgagatgagtactatttcattcatgaactcctctttgccctgccctgagctgctagaaagccgttttacagcaatttctttcccatcttgcagcttccctaatacagattgcagaaagtcatttcgagaacagggt

SEQ ID NO: 15045 - DNA, 466 bp, Arabidopsis thaliana columbia
taaatgtcaattacagttacatcatatagaacggctacaattagagaggctagagagaaaagaaaaaaagactagggagaccaatcgaacatacctctttaaaaccttgtcactaaagttgaacatccttaccatctccacaggataaggagaacttcccttatatgtattgcaaacataaccagtgcctgttaaaaggaatatatacatataagacacacagataaatatgcagtggtcttattaatgtgatgtaggattgcaaaaagctatatacctcctaatctttcagccactgcaccagtgacaaggccaccaaccatatccaccacaagcacatccgagtatgcagtgacattagccatcgttaacagaagagataacgcatctactcgtaagaatctacaacacacaataaaaaaagatatacagaaccatcaatacataattcaatctcaacagagaa

SEQ ID NO: 15046 - DNA, 505 bp, Arabidopsis thaliana columbia
caggatctcccgccactgatactcccgaaatgttcacaccataagcggtactagtttattcattttggatcaaaattgtcaaaaagaaaacaatgggagaaagaaatggaatcggtgtagaaactatgttgactttgtaccttggtgcaacagaaatgaatggagtctcctcctggtctgtgtagcctctgtctccaaaactgattcttccgacattgccaatgacacgcccgaagcacattgagaaggagtttgcagtgatattggcttttgccagaaggcttggaacagagtaacctttaataccaagcccaagaacaccattcacagaattgtttctctggaacagacctgtctgcttctgaccgcaactgcacgacaaacacggattcagttatttggcctttgaggtcatttctcaaacagaggacagttgatggagccatacatgagtgctaagagaggcaaaagacctacacattttacatctccagatttcacacta

SEQ ID NO: 15047 - DNA, 739 bp, Arabidopsis thaliana columbia
actatgaataagttagttaggatgactttcagtttcagttcaaatatagatacatgtcacatgaaatttatctaacaacaaaaatcaattaatctttttaccctaattgattcctgcgccatagaaacatctctttaaagtgttataatgttaactgtctggtacggaagcagaggtgtggttcaacgccatcctttacttttgtccaaaatccacaaagaatgattctaaaattagcaatcaacattacagagcaacaacaactaatctcacgttgttcttgtcctaatcctcgccatcatcaatgcgtgttcggaagaggtagtcttcgccttcaagttcatcttgatatagggatattgatggatcattacatttctcatcttctttctcatcattacatctctttccctgaccaaacatgtcgagttttcaatactctcagaatatcatcactagttaaaatatatgagaaggttcactttcagaaaatatggaggcttaaatcgttcacagactgcaacctctatagaaatgcctaactttgaatatagcaggatcagatttcagatcttaagattcatttttcatacatgtggttgtgattctctccattcagctattagtattccataaaccaagatcaatttgttttggcaataagcaatacttgttactaagaacttgtggggatttgctgaagagctactataaggtaattgaacagagaacaaatgtt

SEQ ID NO: 15048 - DNA, 287 bp, Arabidopsis thaliana columbia
aaggtggctcggttagttgtcttcttacctgcttctgttattcccatttctttggactgtttatggatggtctgttttcgttcttaaatctgtctttatttcttggcttgtttgcttcgttgcggactattagaaacgaagaaatcggagtggtgaggctgcaggcccatgggaccggtttttagctcattggtgtacgaagaggaatctgacaatgagttgtaaggttcctaagcaattagttacagattcatctatgaacttttggttttcttttctcagtttct

SEQ ID NO: 15049 - DNA, 942 bp, Arabidopsis thaliana
caactcgccgcaccgatgtagccaacgacgccggagtttcgtcggatatcaccacgaagaaacctgattccgataaatctggattcccgtctctatcttcctcatctcaaacctggctccgaagtgttcgcggtccgaatcgtaaccctaacagctccggtgatgtagcaatgggtccgccaccgccaccgtcatctaaacggacgcaagaggaagaggaggaggatgaagaagttatgatgggaccaccgccaccgcctaagggactcgggaacattaatgattctgatgatgagggggatatgatcggtcctccgccgccgcctcctgctgctcgagattcagatgaagattcagatgacgatgatgataatgacaacgaggagaatcgttaccagattccattgagcaacgagattcagcttaagggacatacaaaggtatatactaaactcttgtttgaagtagtttcaatggagattttgaattcgaaattgaacaaaggtttttgtttcctggaatcagattgtttcatctctcgctgttgatagtgctggagctagagttctttcaggaagctatgactacactgtgagaatgtacgatttccaagggatgaattcgagactacagtcttttagacagatagagccatctgagggacaccaagttcgcagcgtgacgtggagtcccacttctggtcaatttctatgcgttactggctctgcacaagctaaggtagaacgttcgtgaacaacactaacgttactgactctcttctacgattctttatcatctatgaattgttacactcgtttctttcttttgaatttcagatttttgatcgagatggtcttactcttggtgagtttatgaaaggagatatgtatattcgtgatctgaagacactaagggacatatttgtgggttgcctgtggagat

SEQ ID NO: 15050 - DNA, 543 bp, Arabidopsis thaliana columbia
gtgcaacttcttttttgtaatttatgttcatgttcggattgcttaggagtttgtgttaaatgtactttctactgcagagatggtggatcttgttagcagtctaccagatgatctccttggtcatatattgtccttacttaccacaaaggaggctgctttgacttctattctctccaagaggtggcgctatctcattgcttttgtcccttatctcgagtttgatgactctgcctttctgaacccagaagaaggtaaacagacaagggaaggaactcgacagagctttatagattttgtggatagagtattggctttgcatggagattctcccatcagaaaattctcactcaagtgtaaaaccggtgttgatttagatcttctgaatcagtggatatgtaatgtgctgcagcgcggtgttttgctcattgatctgtccatggatttgggacatagatgtatgttcatcgaaattttcatgagcagaacactagttgaactgaaattaggaagtggatgtcgtattgcttttgggcctgaacacat

SEQ ID NO: 15051 - DNA, 391 bp, Arabidopsis thaliana columbia
ccgttattggtgttatgttcagccatcatgtgagggtgttcattgataagattctactaaggatgggatttgtgaatctattataaggtggagtatttggctagcatgtttgattttagtgatcaggtacctccagctaggtggagcaagagtttgagtgaagcgcacatgttcaacaggaagttgtagaagttgtgcaataaagaatatatgttagtcagcaagtgcttcaacactattaagtttctcactgacaatcttagctgtgcctctctgcagtacagcttattccacatggatagacctcctcaggatatgcgatcgaggagatttgattagcgtaagccaagtcagcactatgcttatcctagtgtacagtgagtctcacatg

SEQ ID NO: 15052 - DNA, 578 bp, Arabidopsis thaliana columbia
ttgcctcattttgtgaataaggtagttgaggcaaaccctggaagtatggtgaatctggtggttggtgaggacagaagatttcagcggctttttctgtctttccaatcttgtatacatggctttcaaactggttgccggccgcttcttttccttgatgccattccatttaagtctaggtatcatgagattttgttaacagcttctgccttggatggagatgattgcgtgcttccagtggcattagcccttgtcgatgtggaaactgatgaaacgtggcgttggtttctggaacaattaaaggtagctttgtccagtttacggcctcttacctttgtctccgaccgagagaaaggactagtgacttctgtgttggagattttcgagaatgcccatcatggttattctattcattacttgatggaggattttatgagaagcctgagaggtccgtttctttggagatgggaaccatcgttaacatactatttactggctgcagcacgtgctgatcgacttgatgggtttaaggtttacactgagcaaataagacgagtgtccctagagcttatgattgggta

SEQ ID NO: 15053 - DNA, 603 bp, Arabidopsis thaliana columbia
  unsure (1)..(603): unsure at all n locations
tgaacagctcgacacatttcactggaatccttaagtatatccgtagcagtaacatccttggatttgatatatacagatcctatggtacataaaagatacctgaaactcaattgatgagtatctacaaagttaaaatcagagtgtgcaaatgacaacgtattctgaacaacaagaacaaaagaaacttacaatcttggcaaaatgttaccggcatgctgaactaactcgtagagctctgcgatggagcaaccacgtcccgtctcttccttgaagaatatctccaaagtccccaattcattaaaaactcgcatatctgaacaaatcagatcgcagtaaggaaatgaaaatcacacacaagagctacgaatagaggaagagcgggtaacgaacgagtcgactcacagagttcatagtatttatgaggagaaagcttggaagtacgaagctcgctgagcatttgagcagaaaactttagagcgtctttgagattgttggagtcctgcgaggataaattggagattcgttagaaaacaatgcaggatttagggtctaagatcagaatggaaaattgattgatganganngagagagaggggaagagtg

SEQ ID NO: 15054 - DNA, 523 bp, Arabidopsis thaliana
ctaaaggtaatccgcgcgagacaggccaccgggcatgtcggcttcaccgtcgtaatattgcagcaggctgttgaaggtgtgcacctcatccggcgcatatttgcttttcagcatcaggtcgtcgatgcgggtggcgctgtgctcgcgccagtcactgccgcgcgtgccggagtagagcagcgcgttgccaaaaccgttgtccgctgtgccgcccaccatcaggttgtgcgtctctttcgggttgttttgtgaagaggttgggctgagctgaccttccacgcccgcctcgataccaaagtcctgcggaatggcacgggtaacaaagttcaccacgccgcccacgctctgcggtccgtaacgcaccgcaccaccaccgcgtaccacgtcaatggcatccatgttgccgagcgaaacgggagccagtgaaagctgcggctgaccgtaagggcgaaggggacggggatgccgtccatcaggacgctcgagcggctggcgaggcgcgggttcaggcccggatgcaaag

SEQ ID NO: 15055 - DNA, 700 bp, Arabidopsis thaliana
atccttccatttattgaaaactacttagctcgatctacgatacaagattttttactcgttctcttaactctcaaagatacgcacaaggtccaaaaagataaagttgtaaacatttaggcaaaaaggttaacacacaaaaacttcgggttaaaaagtaaaaacataactaaagttacggtctcttttcctaattttttaaaacatttattgtttttcccggtttcaggcgagtcatctctaccgccgcgactcaggcgagtttccacgccgaggttgtgatgagtggtcgcgtctgccaccctatcattaaacatccgtcattttcttcaactctgtatccatctccggtagcgtaaagcgataaaagcatactcgcttgtttaaacgcgctagatccgagatgaatcgggtcaaacccagcggatttcatccgaatcctccactgtgcagccgtctcgtgccgctcgacccgatcggacccttccgccgcaacaacgttgagtatctgtctccctaagtacacttctgacataactcggtcttgactcggtaaactataactgtcttcgagcgagtcaaacaagctcgagtagtaatgaagcgcttcgttgaacctatcgaggaagacgattccgttgtggttcgcttcttgctcaaccaccgttacgatactcggtttaatagctttaaccgtattgag

SEQ ID NO: 15056 - DNA, 537 bp, Arabidopsis thaliana columbia
cccctatcaagatcacgcagtaataaccttgatcttatattcctcttgagcaatgaagctaccacaagttgacctgataccaaaaaggataagactttaaaacaaccatcattcagcagacccaatagtgagaaattcatagtcctaatttcaaaattgaacatttaagtacctaccaccaccagtgccgccaacgacaagtacaagctttgaagaagaagaagctaaatccgaagtatcgacggcttcttctgtaaaagcttggactggcgtgattgacgaagataaagatgcttcatttctaaccaggaagaaagaagatgggagtggcaggggggacgtaaacagagggtttctgatttgggattttgtagcggcaaaacgggagtaagagggaggagcgacgtgagcattggtggtggtagccatgattggtcaagcgagcttagataattttaaggagaagccattatttaatttgttcattcaaaaatcaaataaatttgtcattcaattggtgcgtttttccttgtattg

SEQ ID NO: 15057 - DNA, 538 bp, Arabidopsis thaliana columbia
ctacttcttcactgcctcctagcccaagaccttcccacattaactgaatcacaaaacacaaatgctccttactaaatggaagcaaacttagagatatagactaaaagttactggccagtcatgagcctcaaaagttgttgttaagcatgatgattattagaaccaaactttcaaccctagagaagtctttaaatccacaggaaacaacaagatacaagaacaacgacctttttctacctcctgaaaccatttcaattaactaacttttttacacttacaagagccatgacttgagctgcgtcttgcctcttccagtattcctcggtactacctacacacacgttattcattctcagactatagattcaattcctcaaaaactacactggagatgaactaagaaactcggatacacaacgaaatggcaatttcaagagagcgagcagagagctaatcaattcagataaaaggaacaaagaaagaaactcaccaatctccaaaaacatcgttggcttgttagttattggtccatgatgag

SEQ ID NO: 15058 - DNA, 813 bp, Arabidopsis thaliana
gccgaagtgcatgctcgatttgagatggtgccgcggagtctacacaactccggttagtgatcactggaacatttggtttaaaccggtacgagaaagacaaagaacctgaccgtttacccgacgaagttctcacctgatacgacatcagtttcatctcatgatcgttaccatcaccgttaaatgatggtgtggttgcattcaagagctcaagtaacgggatgttaactcttccgatttctttgttgcctaggactcgacgagagattactctcatgacaagtgacgaatgaccaccacgggctgacctctcgtccacggaaaatttgatggtttgattccaagtcgggttagatccaccataacgatcaaccgtggttttcgccttttgtttctttcgagtattctcgccgttgatggtgatggcagtgaaaacgttcattttagtgatgagattgacatttaaaaggtttcttgcggagttgatgtttagctctagagttagattcgccataactgtgatgagagcttgacataaactatgcgagtctagcttataacgtttttttaaaatagtcaaataagctaaatgtaggaaaatgtagtaaatgttttcttgagtaaatggaaacaaaagaataagaaattttagctgtcaaaaaaaaaaaagaataagaaattttaacaggtaatctttatgaaatacagttcatcaaaatgaaatattaagagttgagaccaattttagtctcatttacaattttcattactacatgtaagatacatccctatattggatataacaaaaatatgatg

SEQ ID NO: 15059 - DNA, 995 bp, Arabidopsis thaliana
ctttattccacacattgttaattgtttattcatatcgttttttagtcattcttttcttctcttcttctttcgggttaaaaacacttatgttattttttgagtttttctaatgatagtaatatgtttctggagattctcttgatggtcttgtgaaaaaattgaagaacacatactatctctctatttactatatactgtaagtcaaaataataatccaattttttgttgatgtgtcattaataaataaataactatcattaataattggattggttacacattttaaattttatttatgtttggatatccaatttttttttttccattgctaatttaattgttatcattatgatgttcatattcttttcttgtattggatcatattgtatatctttattttccaattgtaaatattcaaaataatatattttcttggaaaaaaatctattgtggtttctctttttttatataagcaactatttaatggtaatatgacatataataataatttaaaaaattagatagtatttagattttagactattagtggaaaattttacaaaataaataaatcccaactatgatagaaacccaaattgagtgaaaatagaagatgggctttaaatcggaccgacgcttattgcttactaatacaaatcgcccttccttaaggtctgaagacgaaacgaagaacaaacactgaaacaaaagagaaaaatcccaaagctagaaaccctaatcccaaacgaatcaatggagcgagacgaagaagcgagtggaccgatgatggagatgtgcactaacggcggcgaagagacgtctaatcgaagacctatcataagtggcgaaccgctcgacatcgaggcctacgcggctctctacaaaggtcgcacgaagatcatgcggcttctcttcatcgctaaccactgcggaggaaccacgcgcttcagtttgacgcgttgaggatggcttacgatgagatcaaaagggtgaga

SEQ ID NO: 15060 - DNA, 537 bp, Arabidopsis thaliana columbia
aggcaatgtttgataaaatggtagataaattcagttttctgcggcaacgattatttgatagatacatacaaaagttctatgttactgtaactatatggatcaaacatttccttggtttgttcctgtaagtgtgcagcaagtggtatggaaaagaacgtccccgttggtttggtccaatcccatatgattatcctccataccttacaggagaacttccaggggattatggtttcgacattgcaggacttggcaaagatcgtttgacctttgataagtatttcaagtgagtcttctcctttctatttctaaccttagcttgttctgtaattagaggctgtcctgattcttctaactaactgttgactgttgttgtttctcatgattgtttgtttgttctttctaccaattcatgtgagtggacattatgaaattcactcaagtcgatcatgtttctggtaaatagtagtttagtcctattgcttgttttgcagctttgaaatacttcatgctcgttgggccatgcttgcagcattgggt

SEQ ID NO: 15061 - DNA, 553 bp, Arabidopsis thaliana columbia
catcttccaattgttttccggcgaagatcaaccgttgctgatccggtgggattccttccttgtcttggatcttcgctttcacattgtcgattgtgtctgatgattctacctctaaggttattgtcttccccgttaggtgtttcacgaagatctgcattttcttgtttgagaaaaaacgcagagagtgaaaacaatagcttttatatcaaggaaattagggttacaagtccatagattatgggcctggccttagggccagatttaataagtaaagcccgtaatgattaaacgatgtcgtctacaggataaagtttgaaaactactaaaactctcatcttcttcttctctgagtatcaatggcgattgtagcatcactaagagatattaatctcttctcttcacttccttcaacgcctccaatggcggattcatcatcaggaacattccggccagctcctgcgataccgattcccaaatacgcaccatccaatagaaatcgtaatcagaaaactaatcatcaaacctgatacaaacccgaagaaaccacaatcaa

SEQ ID NO: 15062 - DNA, 561 bp, Arabidopsis thaliana columbia
tctctttctctctagctatttatatggtcatgtagctgatctagtggaattactaagaatattagtaatgtttgaataggttttggaggcaatggagcaacaccgttcttcttgacgttttcgatattggcggctgtggtaggagtagcgtcgaagttggccggagcaaatcatattaggttttggaggaatgatagtttagccgctgctggagcttcttccatcgttgcatgggctatcacagctcttgccatggggtaattactttatttatgatgtcctattaaatctcatgaagtgctaatttttgacgactatttttctttaaaacttggttttggatattttgtgaacttctttatatagatgcatggaagtgtcagtgtttggtaaatggtataataaacttaattttgatgaaaggttggcatgcaaacaaataaacataggaggatggagaggatggagactgaagatgattgaagccttcattatcattttgacgtcacgcagcttctctaccgcatgttgaccatgccggtcactcagcagcaaatatgg

SEQ ID NO: 15063 - DNA, 841 bp, Arabidopsis thaliana
tcaatcaatggttatagatatgggtatgaggttcagtcttatctcgttgacttcaaattttctatgcacttcatacttgttcattacatgtaggcacacatttcatgagtcacggattccaatttactggattagttgtaattatttccatgccaaaagagtcaaatcaacatgataagactgcatgtgttgagaatgaacgaagaatttatgtagagaatgtatccactgaataatatgctgctctatgtgcattctggtttgtgtatattaaccttctgacacttgttttgtgagacattatccatactgatttgtttttgtaactataatagtatgaacaacgtacttaacagttcagactcaggtcacaactaatttctcatgattattctgggtagtgctacaatgatctgatggttcttgcctttacctcttatatactttcaggttataacactcgacatgggtcttctagttgctggaacaaaatatcgtggagagtttgaagagagattgaaaaagcttatggaggaaattagacagagcgatgagataatcttatttatcgacgaagtgcatactttgattggggctggagcagcagaaggtgcaattgacgcagctaacattttaaaaccagctctcgctagaggtgaattgcaggtaattgttctttttgatccgttttacatgacaatgctctgcacctttgtgtaatttattctcgataatttaactattttgttaataatcctgacagtgcattggagcgacatcattagctgaatatcgaaagcacattgagaaagacctgccttggaaagaagatccagccagt

SEQ ID NO: 15064 - DNA, 603 bp, Arabidopsis thaliana columbia
ttaccacattattccagagtatcagacggaggaaagcatgtataattctgttaggagatttgggaaggtgaagtatgaaacgctgcgttttcctcacaaggttggggctaaagaagctgatggctcggttaaattcggttctggtgaccggtcggcttatttgtttgatccggatatttacaccgatggtcgcatttcggttcaggggattgatggtgttttgttcccagaggagaaggaagaagagacggttaagaaaccgaccggtccggttaagaaagttgttcagccgagaagaggtacgtttgattcatcttttgtttgattcaattgtgttgtgtgtttattgttaattgattcggtgacattagttataggtgaaatgatctaatgtagattcatcgaattttcttataacatgaccattgtgacttgtgagggactaattatgcttataattgtgtcatgttacacggatacaagttatagcttttgggtttgtggttgcttgaattgtgatttttagtacatgattaaggctattaagattcaagacattggattatcctataatcccggcgaaatgggatatttcggtgagaa

SEQ ID NO: 15065 - DNA, 563 bp, Arabidopsis thaliana
cctgtgattgtgaaggtattagtattaacgaatagttcttggtgtgcattgtgctagtatgtaacgtatttgtatatgggttaggcattgaacttacttgtcgaggggaattatgcacaatatcaacagcttcctggttgctaagatgctcccaaagcccatctgaagcaagaattataaactcatcttgtgggctaagccgcgtaatggtgactgatggatccgcactaaggattggcttagtgaaatgttctggtagtctgaatttgggcagcaaaggttctctgttgaactctgctcttttgaggtatgcatcacctatggatcttgtgacctggttaaaggtcataacacatttgctagtcagttttacatccttacacaagataggcttcaatatatgattttcttaagcttttgtatttcatagaaactgatgaagcaaaactctgtgcaggttatcagatgcgttatcatgtatgaatgtttacctggataacgcctttccacgccacaagcggtgcttcatcacaagaatggtggggtcataggatcaatgacat

SEQ ID NO: 15066 - DNA, 549 bp, Arabidopsis thaliana columbia
ctcattagaccttattattttccccagttcctgtctccgcacagatttatcaacatgagctattgtcgcatgaaatttgcagcgacgggtttgtgatcgctctcagtaacatccatgcaagcttcatacctgttgaaacacgcaggtgggaagttagaatggagaaaacacattgaagagaccggaaaaagcgagaaacatcagaaaggtcgtcatgaaaccatacattatgactgatgaaactacagggcattgcaaattgctctcagagaatgggctagattgagtgtctctatatataactcggtcacaccacgcaggaattcgctttttctcccctgaatcatatcctggagagtacacagcacagaaagattcagtttttttggagccaccatctcttacaaaacagaggaaaaaatgcagagaacagagcagacaaaactgcttcaatgtttcaaattcatatcgtatgtatcaaatccacttttacctccaaggcctgagcgatcctctcaaatttgtaagtgggagggaaagtgattaatg

SEQ ID NO: 15067 - DNA, 555 bp, Arabidopsis thaliana columbia
tgacgtagtcagctgagaaataataaaacaagaggttaacaactccaaactgatatacttttatggcaacttaaattttgagactaagaagaaagttacttactgatatatcgccgcaaaattccttcaaaattcttaggtgcaaacttcccttaacaaccaacctttgctgcccatcaagcgaaccactagtacccaactcagcaagcaagtattgcataacatgatctggttgacgatgcatcctgattttttatatgcagataagacatgtcatcgaaaagtcatcaaaattaaatggtaatattacttatggttacacagaaaaagtttgaagaggaagataaagagttagctcatacgtcttgcaaaggtccatgaagttgacaaagacagtcttctttgtcccctcacgaagaacttgaggaggcctcataactgtacgacgcctatctccagcaagctccggattattttcacggagaatgttaaagactctaccaagaagctgcatatataactcccgtcagcaaaaaaacaagggagcaagatatt

SEQ ID NO: 15068 - DNA, 530 bp, Arabidopsis thaliana columbia
ggatatcttacattcgctgcggtctcaaccgtcgtggttcctctgatatttcctcagctcaaatggtattacgttattgtagcttacattttcgcgccttctctggccttctgtaacgcttatggagctggacttacagacattaacatggcttataactacggcaaaattggtctttttgtcatcgcggctgtgacgggaagagagaacggagttgtagccggactcgccggttgtggactgatcaaatccgttgtttcggtttcttgtattttgatgcaagatttcaagacggctcattacacgatgacgtcacctaaggctatgtttgctagccaaatgattggaacggtcgttggatgcatcgtgacgccgttaagtttctttttgttctacaaagcgttcgacattggaaaccctaacggagaattcaaggctccttacgctttgatttacagaaatatggcgattcttggggtgcaaggcttctctgctctgcctcttcactgtctccaaatgtgttacgggtt

SEQ ID NO: 15069 - DNA, 583 bp, Arabidopsis thaliana columbia
cactcattggtcccattaatgattgctaataagttattgaaagaattattaccagtcccatcattagcgatattaactccatcaaaactaaggataatatcagacggcttcaaaacttgtgattctggggcggttggctcaattcttctaatccgcactcccttttgatgagattccatacccattgacttccgcaaatcaggattttccatcttttgccactcaattccgagaacaggaaaccctaaaacagttcaagtatgagaaaaaagcacatgtagagatagataacaaacaacattaatcatcggtgaaacttacctgtgtatttatcatgcttctcataatcttgaatgaaatgtacaatcaccggtgtgggaatgacataaccaatattctcagcatcttcgtgtttcaaagactgaaatgcaataccaacacattttcctttatcattaaatgcaggaccaccagaattcccagaattaatagctgcatcaatctgaaaagacaaaaacagaaaacatttttataagtgccttaactcctagtcagataaggaaaaatatcatgcaaatgtgtt

SEQ ID NO: 15070 - DNA, 551 bp, Arabidopsis thaliana columbia
cgcaatcttctccaacaacgatgagtgtttacatgtataagtttgatatgattctttcttttttcactttcttgacatctttttcttcttcttattgtatctgtattccatggatgcaggatccttgctttggtgcctattcgagtatcacagatctaatgtttggttttgatgagacaattctccagtcagcttttggggtatgtcttaatctgccgatgaataagttacgaattgtctatatcttacttgggaagcaagataggaattgtgtatatcttacttcccaacttactctagtagaggatattttgggttgtattaagtgatatattaaattcaatggttttaattaggttcctgaggggattatagagctgatgaggaaccgtacgaagccaccattgatcgtgagtgagacgctttgcacaccaggtgtggccaacacttggcagctccaaccgcgattactaaagctctttgctggaagtgcagacttggtggatacaagaagaagaaagagaagaaagagaagaaggagaaggtgaaga

SEQ ID NO: 15071 - DNA, 542 bp, Arabidopsis thaliana columbia
taatgatgtcggaagaaaaacacacaaaaaaaaccacccgacccggtcctagtttagtgaaaaccctactcaaattgtgtttcgaatgtgagcaataaatgcaaatgaaccattaacatttatattttcatcgaaaaggatacaaaaacgtggtactagtttttggttagaaatagaaatccggtaatgacagttaggactaagaattaggtcaataaattcgtatgtgtactaatttggtgtgttgaattttaattgtattaacaggacaacgacttcttctccgatgatgggataccaaaaaacccgtttccaaacggatggaaaggagaggcgggattgtatgcggtagggttcacgagaaaaggattgtttggtgcgtcgcttgatgctatgagtgtggctcatgatattgctaataggtggaaagaagagtctaagcaacagaagaaaactgctgctgctcgtcatcgtcgttgtattcacatttctaatcatcattatcaaatttagggaaaaaaatattcaaaaaaagaagaaga

SEQ ID NO: 15072 - DNA, 540 bp, Arabidopsis thaliana columbia
  unsure (1)..(540): unsure at all n locations
ctaacactagaaaatggtagagttgattctacagtgtcaaaatgatattctacaaaaacaacaagaatgaaaatctactgaaacagactgtacatataagaagttcaaataccttatgggtacagtagtcttcaagtaagtccagcatatgctgaaactgtgtgtatattaggactctgtgtccttgctctttcagtttgaccatcattttatctagaagttgcagctttccacaagactccaaaagttgtctttgatacatataagaaaacgttcaacgcaaaagttagcagacgactttaataagtagtaataaacagataaccatttttgggaaatgagatattacttgaaagcttcatttgcgtcgtgaataactggctcaacaccctctagcatataaggatggcagcatacttttcgtaattccatcataatgttattaagggaaatctgaaacagaaatagaccaatacattcactagacgattacagttgacctggtttctccccacctatgaggtntaatgatcgaaaagt

SEQ ID NO: 15073 - DNA, 688 bp, Arabidopsis thaliana
gaagaaccagaactaccacaaatgcaagggttataaggctaggaacaaggcagaaacaacataagaacaagggacaagcaaaagctacaaaaggatagctagaagaaatcgagaaaggatccatgaaagcttggaagccaactctaagaagctaattggcacaagtgataacacggtttgtcgacacatcatccacgggtaaagcggtagacgatacaatagtcatagtcaatagattaagtgacgttgatgaggttccatggccgagatactcgctggcacgagaagagctacttgaatttgctcatcaacaaggagaagggtgactacggaactatagtcggatgtggttggagagaatgaaagagaaagtttcggtaaccactgctctttgaagacgggtcataatgccgttattcctcaatcgaagagtttcatgaatatccttaaagatgtaggttaccacataatggagcttcgtaatgatgggaagggtgatcaaacctgcgtgggtaacaaggttgattgcacggtctccaccttatgtgggctggactaaacttaatacggacagtgtttctaagggtaatccatgacttgcatcggcgggaggagtgctacgagatggggacgggaatttgcgaggaggctttgcatttaacatagagtttgttttgccgattttatt

SEQ ID NO: 15074 - DNA, 540 bp, Arabidopsis thaliana columbia
tagtaacggccgacaatctgcagaagtgacagcaatatttctagcggtgagattgatatgcagcataaacatggaaggtgatatccatacagttctcgatttcgccaccttggtttcgactctatgggtcatttatatgattcgatacaagctgaaacatcttatataaagtctctcgacacttgctacaattactatgtggtaatgctttgatttaaagagtgtaaatatgttgtttgccttttcattctctcgaaatgatttaagtaaaatgtttctcgctttttcgccaaccagcttgtaccatctgctatccttgcgttgattattaacccgagtacgagttattcttacttccaccgtatattgtgggcgttttgcgtctacacagaatctgtctctgttctacctcaacttcgattaatgcaaaatgctcaggtcagacacttttgacatatctatgtatctttagatttattttatgtcaatgtagagactagagttagcactttaacaaactatgatatgatctagtggttg

SEQ ID NO: 15075 - DNA, 812 bp, Arabidopsis thaliana columbia
ttttggtgacccctaaaaaccacacaactttcagaagaagaacgacgaaaaattaataatagaggaggagaggaggagcaacatcactactatttctattttttcagccaatcagagtgctccggaattcgcccactcgcaccaacttcacctcacgcgctccatttcataaccagatgcaccgacctcgcgtttcggcgtgtcatcaatttctgtaggggtaaaccacaaaatcatgtttatttctaatctactcgctttgtttccaaaataccaacgcgtgatctcgaaagcattttttttttttttttttctcaaaaccgtattaattatataatgcaaaccgaacccaaattaattttgattttaaaaccatgtaaaccgaaccaaagattggaatagttgggatgataaagaagcttggaaactaaagattctcactttcactagtgaataatacattcattttttaaaaagtttttttttctgttgttttatttctttctaaaaaccaaaataaatttggaattttattttcatttctagttaataaaaaataatttatattgtaattttaacttaaattgtaattaaatagacatgactaaacaaaataaaatttagttcttatttgattgtaagaactacaaaaaagaatcatcatcgtcacttgctttcagaatcttgatgaccgtcgccacatgcggcaaggaagagagctccggcagcagatccaccgtgagaatgctcaatgacgacgtgatctgataactcatcaccaagcatttcccaaacgctgctatgaagatagt

SEQ ID NO: 15076 - DNA, 994 bp, Arabidopsis thaliana
taaaaatataaagatagtagggaagctcctcctctcatatattgaaaccaataataaacacttacgaattttctgcgttttcagagtgaatttttattgatgtgcatagattttgtttcatattttgtgtacttgtagtttatcaacacttatggatcattcgaaatgtataccaaccagaccagtcaggggaaaccttcaagaagaagaccagttaggcttgtgtccgtttcacaaggaggcttatatgaggttgacactggattatgatactttgaatgctgcaagcaagactggaatcatctaaaaatatgaatcttgagcttctttaaccagtaatatgtagattaacaatatgaatcctttattgaataaaggaaacaattaaacgtttgattatagataagactttacataatccaacttttatatgaagctactacaaacaagatttaaaacatcaaagaatccatctaatcttcaatcttcatcttcaacatccttcaatatctctccacttaagatacactagcccagctctatagtgcgtgaacgcaccagcaactaccagaacatgaaacaactgatggctatgtcctgctatatcgaatttacccggcatccatctctctgggatcctagttgcataaaccagagctcctaacccataaagcaaacccatcaaaatctcataacctgtcgtgtgaagggcttcaggttggtcccaaaagattatcagcttgtgaagaatcggagctaagccagagaatcccattccaaaaggaacatgtcataatggtataagcatgcatcccctcctagtccttattttacttcacttttcaagtttcaaacactcttttgcaaaatactcactccccctccctttctactatttacatatcttacagaccaaaaatgtcaaaagcctctctctctctctctataattttgttgataattgcgaaattgtagactctctcttttgtagcaa

SEQ ID NO: 15077 - DNA, 824 bp, Arabidopsis thaliana
ctttaaaggtaaaagaataagatgaagcttccttggaaatctcagcattgcactacctttgcttgcaaatctagaatctggattttaagatacttactccaacacatattattattacaggccggtgctcttgttcatgtttgcaccaatgggactgttttggtgacacatggaggtgttgaaatgggtcaaggatttgcatacaaaggttgtgtcattccccttagttcagtttttgtgtcagaaacaagcacatacaaggtacatctaactcggttacatgcactcagtggactttttggccaagacaaaactgatattgttctctcttatcatttttgtggtctcttaataggttccaaatgcctcacagtttttgctctcttgtcgttttgattgccttgtaacaggttcctaatgcgtcacctactgctgcttctgcgagttctgatatgtatggtgctgcagttttagacgcttgtgagcagattatagcaagaatggagcctgttgcatctaaacacaatttcaacacattctctgaggtattctttctttcttctagcaatttgatataaactcagaagattttgatgaacaaaactctctttgtctctgagtgtatgtagctagcaagtgcctgctactttcaacgtatagacctatcagctcacggttttcacattgttccagaacttgaatttgattgggtatctggaaaagggaacgcatatagatattacacatatggagctgcctttgctgaagttgagatagatacattgactggtgatttcgcacaagaaaagcagacataatgttgg

SEQ ID NO: 15078 - DNA, 555 bp, Arabidopsis thaliana
gtctctgttctttggaatgggattctctggcttagctccgattcttcacaagctgatcatcttttgggaccaacctgaagcccttcacatgacaggttatgagattttgatgggtttgctttatgggttaggagctgtggtttatgcaactaggatcccagagagatggatgccgggtaaattcgatatagcaggacatagccatcagttgtttcatgttctggttgttgctggtgcgttaacgcactatagagctgggctatgagagatattgaaggatgttgaagatgaagattgaagattagatggaatctttgatgttttaaatcttgtttgtagtagcttcatataaaagttggattatgtaaagtcttatctgtaatcaaacgtttaattgtttcttttattcaacaaaggattcatattgttaatctgcatattactggttaaagaagctgaaggattcatatttttagatgattccagtcttgattgcagcattcaaagtatcataatctagtgtaacctcatataagctccttgtgaacctgcaca

SEQ ID NO: 15079 - DNA, 1031 bp, Arabidopsis thaliana
agggtggttcttctcatagcaacatccttatggtaaagctgtggggttactcgatttgaagttcggttctattgaggtaacgtttgcaactttgatcttgtaatcaaccattttgttatttctgacttggggtttgtttcaatatgtaggcaaatgagaaatggctggttttgcctggaatggtatcttctttcatactcagtgatcttcttaagaaggaaggctttagtgcagccgcaaaagacacggtgaaagctaatggaataacagaggaaagtacggagattgatgttttgagtcaagaaaagctagaagaagaaacaatgatggatgtggatacgactacaccagttgctgtagcggccgagaagatcaacggtggtgctaggtgcttttcgaaggagctaagtgggaacatgattgaagaagaaggtggtcactgtggtggttgtggaggttgtggtggatgtggaggtggaggtggatgtggtggtggtggtaggtgcggtgggatgacaaagatagaaggctgcggcggcggatcctgcactggcggttccactggctgcggtaattgcggtggaggatgtggtaatatgatgaagaacaatgctaatggaaatgctccatcagtagaaaacgacgcagttacagcttgattattctaatcaacaaaagtgatatatattatatggttatgtaatgttaatatagtcaacaaaataatgaaactgatggagatgttgttaaaaacgtgcttatcataattcataagttgtaataaataacagatagcttcatataaaatttggattatgtaaagtcttatctgtaaacaaacgtttaattgtttcctttattcaacaaaggattcatattgttaatctacatattactggttaaagaagctgaaggattcatatttttagatgattccagtcttgattgcagcattcaaagtatcataatccagtgtcaacctcacataagccttcttgtgaacctcacgcaagccttactggttccagtct

SEQ ID NO: 15080 - DNA, 748 bp, Arabidopsis thaliana
ggatccctcaataaaaattcactctgaaaacacagaaaattcataagtgtttataattcttttcaatatatgaaaggaggagctcccctactatattaatattaaaagccaatgagagtgctccacttcataccccacttttaccaatcgtgccatttcacggtttatcacaagagacttgctagttgctactgtcatcgaataacgatcgacccaaagatgttgagacgaagaagatattaattcctttttttttttaacaatagatgatacatataggcttgcttataacaaagagaaaataaaagttgcacaacaaagtgggaagaagcattaagagagttcctgagatccttcactcaaggaccttcacaccagaaacataaactcggctttgaatgacactgccaccaatccaaaacccaggcataaccataagaccaactcttgggttctcttctttttcatccacaactatgttcttcacaacactttccatgtatgaatcagagaactcactaccctttttcacttggaagatctttgcagctggatcaaaagagtaagcaagcctgtgcaagatccatatcgactttgcaagttttaagaaggcctggtaaaacgcagtcctcgggtgccacctcctgtcacgtagtcacgctgatctagattccaaagagagaagctccatctttgggtggacaagaggagatcttgccctgcagaatatccaaagttggaacagggt

SEQ ID NO: 15081 - DNA, 555 bp, Arabidopsis thaliana columbia
tgattcagacctcgctgtcttgaagtagaacttcttcatagctgctgactcgagctgactcaaaactggagagtaagatgagttgagccaagtaaaatcttcaaacctttggacatggatggtcgcttctccaggagggttcaacagaaaccacatactcattgctccaaagttgagcttatcagtcacaaggtggaaaacatgccttgaaggatcctgccaaataaacccagtaggccttgtaagtttaaagcacttattcttgcaacaattactagggattgatcattacctgtgcattcatgactgtggagttgacaacaactgatgcagccagtacattatcagagaagagagcgtagtggtaaagttttggattctccaaattctccctccttggaaaatttctcatcggtaaaggcaggagatgatactctagattcaagcgcatggtcaagcagtggatagcatctggtagtgccttggaagctagctgagtcaagaacgttatataagtctgctcgtttttgagttcatcttcaactgtttgtagca

SEQ ID NO: 15082 - DNA, 1119 bp, Arabidopsis thaliana
tgtggttcctccttaacacttattttcaggcgagaaaacgagcagtgacaattcacgtgtcaaaagaaaacggagagagcgttgaaggagcagaggtgacagtagagcagatctctaaagacttctccattggatctgccatctccaaaactatccttggaaacattccttaccaagtaaaagacactcgctaaagtctacactaaaacaacaatgtctttgcttcttcaaacggattctgttttgataggaatggttcgtcaagagattcgacgccacggtattcgagaacgagctgaaatggtacgcgacggagcccgatcaaggcaaactcaactacacattggctgataagatgatgaatttcgtcagagccaacagaatcatcgctcgcggtcacaacatattctgggaggatccaaatacaatcccgattgggttcgtaatctaaccggcgaagatctccggtcggcggttaaccggcgaatcaagagtctgatgactcggtacagaggagagttcgtgcattgggacgtgagcaacgagatgcttcactttgacttctacgagactcgactggggaagaacgcgtcgtacggattcttcgccgcggctcgtgagattgactcattggcgactctgttcttcaatgatttcaacgtggtggagacttgcagcgacgagaagtcaacggttgacgaatacatcgcgagggtgagggaactccaacggtacgacggcgtaaggatggacggaataggtctcgagggtcacttcacgacgccaaacgtagcgctgatgagagccatcctcgataaactcgctacgctccagctcccaatctggctcaccgagattgatatcagcagcagcctcgaccaccgctctcaggttcacaagtctctgttttccggtttagttcagtttgcaatttgaatctggttttggttacaatttttagccggtttattaacggtttttcgaattgattttggctgaaatacggtatgtctgttaggatgataaaatctggttggagtacacattgattatacttgggtgcaagtaaccggaaatttgttacgttttcaggcgatttatttggagcaagtgttacgt

SEQ ID NO: 15083 - DNA, 1220 bp, Arabidopsis thaliana
gacacggtgtagaagaagaccagacatgaaaacaggaaggaagagaagactggcatggaacattttccttgctttatgcatggtccggtctcggtagaatgaaaatgctgttgcagcgattgctagtgtgagaagtgttgattcgaggcaaaaccaacttgaggttaacccccctgtcacaaaaattggaaggaacagcaaaaatcagatacagcaatgcagtcaataaactacaaaaaaaagatgaatctacaagactcacagtcataggcgatgaaaccgagagggatcatgtaaaagcagttccttagagccactgctgctattctcttccctgacggatcaaagagtgacaacatcttgtaactgaaaacaaggtaccaagaaacaaaatcagaagttgggtcgcggaacgtggaaacaatgttcgcgaatgtttatctctaacggaaagaactcattatctagccactaaaatgtcgactgctgtgacactatctaggacactctgatcattccacgaaattgaactagttcaagatcaacactacatggaaggagacattctaatctcatatgacaccatatggtcttaccctccagctgcataatcattgcggcagagatgtgcaagggccataaaatgaggtatctgccaaaagtaaagagcagctggaagaatcatcgaattgtatgaaatctgaccagacgctgccgcccacctgacaacacacaaaatagataagcatagaattggtgaaccatgactacattttgaattaaaagcagtatccaacaaaacagaatctgctaaaataaagaagaaaaggaacaaaaatttacccaagcaagggtgggatagcaccaacaacagcgccaacccatgtattgatagggtgaagttgcttcaacggagtataaacaaacgcataaagtacaagattggcagatgcaagtccagcagccaacatattagtctgcaataaccttgtcgtggaagcaaaagtttagatccataatctctcaatcacccattcataaaacaaagaaatcacatataaaaaaacaaacattcaccttgctggccaacaaacaagcaccagaagcaccagcaatagtagcccatgcaacagcgtgtggaacactaatacgtcctgaaggcaatggccttagcatcgttcttttcaacttagaatcattgcttatctcaaaaatctaga

SEQ ID NO: 15084 - DNA, 514 bp, Arabidopsis thaliana columbia
tgcagattctcttcccgagacaagcgagataaagacttcacatgttgtgaagaatgctcatcaatctggagttaattgccttcatgtttctcgctcaaacagttctccgagttatggcaatggtttgatgttcaatgtgattagcgggggtgatgatcaagcccttcattgtcttagcttcaacatcctcagtagtagtaataatcgagccacaatatctgaaatcatggatctaaaccaaaccccaagttacagaatcatgctcacagaccgtggaggtattgcatcagctcatagctctgccatcaaaggtactttaccccgaaagctctatgtggaattctcaaatcatataagtctctactaggctggctaatcttctctttcaccatttccctaatgaaaatactaaagtcttggttttgatgcgatgaaggcgtttggatggacacgaactgggtgttctcgacaggtcttgatcaacgtgttcgatgttggtttctcgaaaaagatg

SEQ ID NO: 15085 - DNA, 768 bp, Arabidopsis thaliana
tggtgtagccgtccaagcttggaaggtacaagaaagctttcttacaactatctagacattgctttctctagatttgatgattattggaaagaattaaggaagctttgtgttgaagaactcttttgtaataaacgaattaactcgattcaaccaatcaaggaggcggagatggagaaactgattgactcaattgctgaatctgcttctcagaaaactctggttaacttgagtgatacgtttctttctttaaacgttaacgtaatttgcaaggcagtatttggtgtgaatttccaaggaactgtgcttaacaatgataagttccaagatttagtccacgaggcacttgagatgttggggagcttctctgcttcggatttcttcccgtatgtcggttggattgtcgattggttcacgggtttacacgctcggagggagagaagcgtacgagatcttgatgctttctatgaacaaatgattgatttacatctacagaaaaacagagaagaaagtgaagatgattttgtggacttgctcttgaggttggaaaaggaagaagctgttcttggatatggcaaactcacaagaaaccacatcaaagcaatcttgatggtaagacatatctcattaaaacctttaagattagtatattgtaaaacatattatctatcttttgtatgtagaacattcttttggggggaacaatacttctgcaataaccatgacatgggcaatggcggaactcataagaacccacgagtgatgaagaag

SEQ ID NO: 15086 - DNA, 531 bp, Arabidopsis thaliana columbia
tcgagtaccttgagtcctacgcaaacaaattcgaaattactcctcagttcaacgagtgtgtccagtctgctcgatacgacgagacaagtggtctctggcgcatcaagacaacatcttcctcttcctcggggtcggagatggaatatatctgccggtggttagtggtggcgacgggagaaaacgcggagaaagttgttccagagatcgatgggctcacaacggagtttgaaggcgaggtgatccactcgtgtgagtacaaatccggcgagaaatacagaggaaagagtgttcttgtcgtcggatgtggaaactccggcatggaagtctctcttgatctcgcaaatcacaatgctaatgcatccatggttgttcgtagctcggttcatgtgttaccaagagagattttaggcaaatctagttttgaaatctccatgatgttgatgaagtggttcctctgtggctagtagacaagattctactgattcttgcatggctgattttaggaaatttgacaaagtatggcctaaagag

SEQ ID NO: 15087 - DNA, 1188 bp, Arabidopsis thaliana columbia
tgatgacacgcgctcaacggaagttggtgcgaatgggtatagaattgagcgcgtgacgtgaagtaggtgcgagtgggcgtacagaggagcgctgtgattggctgaaaaaatgaaaatagtagtgatgctcctcctctataatttatgtttcgttattcttcttctgaaagttgtgtgattttagaagtcaccaaaaaaaactattttgagatactatgaatatttcgttttgcattttgttgtggagccatttattacataggttaaagcttataactgaaaactggattcaaagaatagcagccgaagtgagttgaatattttctgaacatatgaaaattggaacaagttttttctcattttgctagtttcctgtttttatgttttcttgactttaggagatgacatatggaggtgaactatacaaaggttgttgcaacgataacattctccttaattcagtttttgcaactcggttacaagcactcagtggacttttggccaagacaatttttttttttttttctctctctctaaaatgttatagatacgaatcctttgttgaataaaggaaaaagttgaacatttgattacacataagactttaacataatccaacttttttttatatgaagctacaaacaagatttaaaacatcaaagattccatctaaacttcattcatcttcaatcttcaacatccttcaatgactagtatgtatgtacataagtaaaattgttgataagaaaacaaaacaatgatgggctaaaatagcccataaaaggcccattaaacttgggtttagactttagattcaacgacgccagattagtgagtcacataaccctcttggaaagagtctcaacacttgcagagaaaaagaacaaggaagatcccggaaaatggcaacggcgattgtacgttcagctctttcccgagcagtgactcgcgcagtccgaagacatccgtcgctcctaagcgaaacttttcctcttccgccggccatgacgatgcttgtaatttctctcctctctatttttaccattttccattgacgacgatctaggttttctgatttgattttggagacgcctcgatgagtttatagattcgtagattggttttgagattcagtataatttcacccggattccaatttttgacccgatacctaattttgaattgatt

SEQ ID NO: 15088 - DNA, 316 bp, Arabidopsis thaliana columbia
agaggatcccgttatctttattgcttggcttattcacaacttggtttcatgttgattccaatttctaggtacgtagttgatgctgcagatactgaaaacttgagtgtctcgagaagtgaactccatgatttgttgagcaatgcttcgcttattggtattcctcttttggttcttgggaacaagattgacatacatggagctctttccaaagaagccttgacagaagaaattgtatagctctttattcatctgaacactccaaaaacagcactaaaggcatctcatttagctcgatctgattatgcttcttgccttg

SEQ ID NO: 15089 - DNA, 471 bp, Arabidopsis thaliana columbia
gatttcagcaaaaattgaaaattttccagtttctttgttgtatagattggtttagtttccaaagaagaagctgttcgaagagctgaagatgctgagcttgatctggtttgtgtttctttggataatttacaacttggaagtacctttcttgtaagctgagcttgatctcatatggttttcaggtgattctttcgccggatgcagatcctccggttgttagaatgatggattacaggtaaattatctcaaggatgataatttgtatcatatacattgtgtagaggaagtttctaaggagaatgattcttattcctttttgcttcattatcggtaaataccgatatgcgcagctatagaggaaaaaggtacagcagaagaaaagtgttgatcattcgtctctgcttaacatggagataatgtttgaactataagtgtgtatactgtgtcggagtttacatgaatggattgtgt

SEQ ID NO: 15090 - DNA, 599 bp, Arabidopsis thaliana columbia
gtacaaattgcgagatgcagctggtgctcaaggcgagcatgcgctttggcgaagcaagcgggaaagagcagagagtttgaggtacaaagcagatctagcgatccagaaagctgcagctgctctcatgtgtgcagaggcagttaaagcttcttccgaggacctaggcaacaacaatggggtagaaagctcaagcgaaggatgagtcaatagataccactcttgttaagtctgggtattgtcacctcttgagcaaaagaagagatagtgattcgacatgtcctgttcaacacacgagctggtcttgacacgaattaaaaaacgacccagatgagctccactgtacagaaatttgcctccctctgctttaagtaagctatattttgatgcagcaataacaccgaactgggactctgaaacttgatctcatgtacccatcggctgggaatgttcttagtaggttaagaagagagacaaaaattgaggagatggtaaaaaaaaaaaaaaaaaaaaagagagaaaagagaaaagaggagattgtaagtaatttggtttattaggcttcttttggtagagagatttagtttgagcaaaaaaaagat

SEQ ID NO: 15091 - DNA, 560 bp, Arabidopsis thaliana columbia
cacattgattggtatcttaaaccatgaatgtgcagttctgccacctggtaggagtagagctgcaatagccgatgatgcgacaggcatgacattttttccatttgatctcagagcagaaataatagtcttgtacaaaaatgttttgcctgtgcctccatctccatatagaaagaataacttgccttctttatttgtcactgatttgagaacatcatcgtaaattatccgttgctgctcgttaagcttgctgaataaatttgcatgtgtttctctttccttgtcaatgttgatctgaaactcttgccgaagtaaggagttgtttacttcttccaatattgacttttctggctgaggcatttctggataatctgacaatgacttttcatgctggcgtaagagtgtttcaatctcgatcaatgtgtatttctctagttcttttgctttcagttctaattgagggaaattcagaactctttgctgcttacggaggacatcatctgccatgctctcccaacagtgactccacagttttagtggttcagagacctcacagtatatca

SEQ ID NO: 15092 - DNA, 748 bp, Arabidopsis thaliana
ctagaggatcacgatccccgggtttatctagaccctcggtgattacaatctctacaagagaaaatcagatggcaggaatgggagaagtgattacaggctaagaccaggagtacaaggctatgtttccccaaatagcagagcatcctctcctagacacactccttccctcagaagagaaccatcaagaagttacagtagggaccattataacaggcccaacccaaactttcaatggcgagaaaaacaagttccacgagaacttacctggcaggagatgtctgaaacttcgagaacaagacgcccttcactggagagagaagtggttactgaatcctcaaaccccctgccagtacctatccctacaaaagaagcaatcatgggtgaactgcgggaagtaactgttcagtacataagctgcgcagaccccactgaaagtatggccaggaaacagagagtgttacaaggtgaagccagaggtttgatgttggagactgcctatcagatactcaccgcggctacttctgctaatcaactactcctccaaaacaccactgcaaatgatcctgaaccacccttaagcccttcccaggacttaccaatccatccagctgagctcccacctgcgcctgagccaagccagaaaaagaaaagaggaagaccccaattaacaaaccatcaaacaaaccagggaataaaagtcctttaagactggcaggtgcgaaatctagcaagagaaacatgttgggag

SEQ ID NO: 15093 - DNA, 493 bp, Arabidopsis thaliana columbia
atgatttgctttaaaacatcagtactcactatattacaaaacaaatacaccgtaaaaaatcgaaaataaatgctgaatgaatcattttgttgtttgttcccaaaagtcttcaataaataactttctttctataaatttttcaaaaacaaacaatgtctgtctctgctgttggttttcaccaaaatgtgttcttcttctaccttccacgaggatgaacaagctgcgaaaacaccgcactagtagtcgcgtcttccgcatcatcatcagtcccggtccccgaatttactcctcctctatcgattatactcatactgttatcaaacggttccattggcgccattggaatccctggaatgtggtttgtactattgtcatcaggctccatcaaagccgaagatgtttctcctagctgtcacgcgtactccaaattccacaatacatctcccatagaaggccggtccacaccgtattccgctacacatttctctgcggt

SEQ ID NO: 15094 - DNA, 501 bp, Arabidopsis thaliana columbia
tttgactgtgctcagaacagaaacccacgagttggacaatattggcatgccgtattctatctatattattcactagctccaaaaatttgccttcttcttcatgattgggagacttcttatccaacttcctcacagcgaagagctatccaagaaagtaaactaacttatcagttgcggaaattgaatacacataaagaaagaatgaatgtaatgcatatatacctttccacctggaagctctgccctgtagacactcccaagcatgcctgttccaataaggttttcgtgggaaaagctatttgtgtgttgttgtagagatgcgaccgtgaaatgcttcacagctgtcaagggaccatgggatttactggttgtcctttttagagatgcttcagcaggttcagtcgcctttgcgatgacccttttgataggtggaattgatgagggatgcatcaaatccatagcattgccattcatgtctatctcatgactctcctgctttga

SEQ ID NO: 15095 - DNA, 593 bp, Arabidopsis thaliana columbia
ttctcggcagactcatagatcctcacgagcctctcctctgcttctttcaaaagcttctcataagattcatgaagctcgttaagcttaaggatcgatttataccaaatcttctcttgctccacagcttctctcctcttctgttccttctccgccacgtcaatatcgttaggagagagagcgatctcttcgaaagattccgacaaagacgcgtcgatctcacggagcctagcacgagctctgtcgacggtttcgtgatcgggtcttggtcctagggttcgaagaacagatcgggtctgagaaacgtcggcggttgcgttagtcatggaggcaagaacatcaggatgagccaagtgaggcatctgagtcactatctcgatagagtggtttgatgatgaagaaggatcggatttggatggtggtggctcgacatcggaagaggaagaggatttggcggtgaatgaagggagacgatccaagacataagagagaacagggaagttcttagggttaactccgtcgccattgttgggagcttgatggaagagacgattgggagattgaggaagaagaagaagaagaagaagcgattattg

SEQ ID NO: 15096 - DNA, 470 bp, Arabidopsis thaliana columbia
ataaatagccaaaaaacttctcgttcataaatctcgacaaatctccttgtagactaacggcgccgtttcgacttcattctgtgacacgacacggcacagtttcttcttcactgaacggtgacgtttttagctgcgtaatccaacattctcaaatgggaaatggagtcgcgagttttagtggctgttgcgccggaaccaccgccggagaaatttccggtcgatacgtaaccggagtaggactggttcaagaaaacctcggccactctttctgctacgttcgtccagttctcaccggatcaaaatcttctttcccgccggaaccgcccctccgacccgacccgatacccggaaccaccaccactttccgatcaatctccggcgcctctgttagcgcaatacttcaaccgcgctctcaacttctctgtcaacagatacgtctggaatagctccgcgttcgagagtccaataga

SEQ ID NO: 15097 - DNA, 526 bp, Arabidopsis thaliana columbia
gtatgaatttactaattaggtacaattggaaacgagcaggtacaactatgtatctgggtctttgtatgaatcaactatgtatgtatgaatcaaagttttttttggtaaatttcaactatgtatgaatcaaagtttcttttggcaaatttcaactatgtatgaatcttagagttttgatccaaatctaagtcatatagttttgattttataacaaaaaaaacaaaaaaatctaaaaatatatacaaatatctgatgaaaatcttatgtgacgccgttatttttaaaccttggtgaccatcatcgtctacctcatcttcaccatcattagtaaatcactcgcccaaaccacttggcctcttcgacctcttcttacctccttttccatgttctccaacggatggatacttttttcttgttttcttctttgtttacctcaaaatctcgtggatatgctaagagtttcattatctcctctggaacaaaccattgagaattatgttgaactggaaaaatcgtccttgtgaac

SEQ ID NO: 15098 - DNA, 394 bp, Arabidopsis thaliana columbia
atgaaatttagagaaaccaaaccattagactcaacgaactcaagtaaaagattttaaataacattgataaaagcaaacgagccatagaataactattgctcgtgtcttatgttgcgccatacaataaataataagctgagaagagttgtcacgaagtgaaactacattcatcagtcaaaagactcaaaactcaaaatcaacgtcaccgcaaatgtccacagttgcacaaaaccaacgtcacatccttttcacttatctaaacgaggatgaaaatacttaaaattacgaagaaatgggcaacaacttcgagccctagccattgtttggagaagctttgagcgtggttcgtgcctggcacagaggtcgtccgactactgttgttaccagcactgga

SEQ ID NO: 15099 - DNA, 379 bp, Arabidopsis thaliana
ctctgcaattttctctgtttcatggttctgttttcaggtttcctatctaagttcttacaagtagagtgtagaatcaagagagtgagtgggagtaatccacaaagacatcaactttatcatctctaaacctcagattttagtttgtactaatctttaataaataacagtcatgatcagttgaataacacattgtcacataatattaattggactttaacagcaacactagcaatcaatcaaacttatatgagtaagatcgagaagaagaagagacaacggacatgaattcttgatctgattccaaagcttccataaactctggaagaagacatacttccaaatctatggtaccacctcctacgcttcctgcatatgctga

SEQ ID NO: 15100 - DNA, 1479 bp, Arabidopsis thaliana
tgttaaattagtaacaaaagttttcatactctctgcttatgccaacattggtggttacttatgattcgtatataggtcagcagaaatatgtgtctcatgttccttggtcttccaatgtgtgaaagcggtatgcaaaaccaaaagacttggcggtggctttaaaacaagatcagctttcattgctgctgcagcttctggtccttgctacctattaaatcaactcgtgaaactcacactggacagagatgtggacatgatgataacttgtcatccccatagtttcgttggtatctctatatttctctgttgataaattaggattattattttcagtggcaagttaaaacaatcgtagaagccttttacatggttttgatgaaaagacaattgatttcggttcggcgttcatggttttgaaattacatgtgatttctgtttggtttacatagttttgaaatgaaaattgattttggttcggtttgcattagaattaatacggttttgagaaaaaaaaaaaaaaaaagttcactcgaggctgttttagaaacaaagcgagtaaatgtaaaataggcatgattttgtgggtttacccctacagaaatcgaccacacgcgctcaacgcgaggttcgtgcgagtgggcgtggtctggagcgcgtgacgcgagattggtgcgagtgggcgttgtctagtgcactctgattggctaaaaaaatgaaaatagtagtgatgctcctcctctattattttgtttttcgtcattcctcggttatgaaagttgtgtggttttaagatggaattgagtttattctgaggtttttagttattttgaaatcattgattaatgtcaccaaaaaaaatagaaactagattttgagatactaaaattttcattttcattttgttctgcaaccattgaaaactagattcagctgagcccctgaagaaatcaaagtgagttgaatatttttctataaatgtgaaaattggtaaaagtttgtcctcattttgttagttaatgttttcttgactttaggagatgaactttcaactgcaaagatcccatcacacattaatctcactctcttctgcacattgcatggtgtggtgtagctatggttcccacacaatttgtcatattcatttacaacaaagttcatgaatcatgtttgaagtgaatccttttttttcaaatttagtcatctctcgaggaactttaaagttaaaagaataagataaagcttcttggaaatctcagcattgcactacctttgcttgcaaatctagaatctggattttaagatacttactccaacacatattattattacaggccggtgcttttgttcatgtttgcaccaatgggactgttttggtgacacatggaggtgttgaaatgggtcaaggatttgcataaaaaggttgtgtcattccccttagtcagtttttgtgtcagaatcaagcacatacaaggtacatct

SEQ ID NO: 15101 - DNA, 586 bp, Arabidopsis thaliana columbia
taacgtaataagtaaacttttttcccctcagaatcgactttaacgtttttaaccacaccatgtcaatgggtatggttgcaagcatagtaacaaactctgaaaccaaagacatctgatatggtatttgatttgaggttcggttacggtttctataatacatgtgatggtgaaaagataaattcatagagaagaccatctgattctacaaagatttctatcttctgattcttatcacagtatttagtgatcacctaacagattagaattatccccattggcaagagaaaccatggaagtgtgttcttcaacacttgcagcttcagtgtttaagttgttagcagcatcagcaacactcccaccatcatcctacaaataagcgatgatgattcaagctccgccttatgtggataaaccaaccagaaacacagggtgatatttataagagcttaccggtttcattaaagccaactgattctcttctgttttctttgagagaccctcaatgtacctacaagaattgaacaattctaaatgtcaaacttcttggctatatcagtatcttatgaactggacatagtgaacatat

SEQ ID NO: 15102 - DNA, 527 bp, Arabidopsis thaliana
cagtttacaagactgacgctctaccactgagctatacgggcctttgatttaatctttcagtaatgtatttaaatacctgttttgattgcaaacacacctgatcttacatgtaccattgtcaacaaacaaaagctaattactcccaaagtgacccttgaaaacgggaaattaaaaaagaaacttgggaagtgaatgaacataatatttcatataagaggcaagaattcacagagtaattgcgatgaaatgtagcttatacattataagaacattcaaacaagtcttacacaaaaagaccaaatctttctctttttcttgttgaagagtcttaagaccaccatggagcatcaccagtcctgaagtcagtttccacccatggaacaaaaagaaccttcccagcttcatctatatccgcgtgagcaacgctagcgactgttccatgaaattaaggttactttagacggtccactttagagatacgcaaaaaagaaagaatgcaatgtatttgacttaccaatggggctgga

SEQ ID NO: 15103 - DNA, 1187 bp, Arabidopsis thaliana
ccaacacgtaagggtgaaagtaataccatatcctgaaaataaaaattgaaaatagtccagcaaagcaataagaaacacattttatctagtatataaacaatcgtcctcatgctaacaaagcaaaacacatataacaaaaacaatagatatgaagagaaagatgaagttatcgttaatagaaaacagtgtatcgaggaaaacaacattcaccaaaaggaagaaagggatgacgaagaaactaaccgagctagtcactctatgtggtgttgaagcatgtgcggtcgtctatagtccgttcaactcgatcccggaggcttggccgtcaagggaaggcgttgaagacgtggtgtcgaaatttatggagttgtcggtgttggaccggaccaagaagatggtggatcaagagacttttataagtcaaaggatcgccaaagaaaaagagcagctgcagaagctacgtgatgagaaccataattctcagattcgggagttaatgtttggttgtctcaaaggggagacgaatgtgtataatcttgatggaagggatcttcaagatttgagtttatatattgataagtatcttaatggtcttactcgcaggattgagatccttattgagaacggtgagtcttcttcatctttacctcttcctattgttgcgaatgcagctgcaccagtcggatttgatggtcctatgtttcaatatcataatcaaaatcagcaaaagccggttcaattccaatatcaggctctttatgatttttatgatcagattccaaagaaaattcatggttttaatatgaatatgaataaggattcgaatcaaagtatggttttggatttgaatcaaaatcttaatgatggagaggacgagggcattccttgcatggacaacaacaactaccaccccgaaatcgattgtctcgctaccgtcaccactgcccccactgatgtttgtgctcctaacatcaccaatgatctctagtctaagggatgtatttcgagtgaagtgtttgtccgtttgcatttgtgttttctccattttataagacaaaacttatatgtgatgtcttttttattattattaattgttggacaattcttgcgtccacacttatcttatttaccctttcttaagttccttattaaactttacattttttttaacaccgatcaaatactttctc

SEQ ID NO: 15104 - DNA, 591 bp, Arabidopsis thaliana columbia
tgatcaatcatgtctgggatcacctccaaagactacaaccttgccaccaaacggtttgttatcaccattaccacaaatatctgacaaactcctatccaatgactcaaaacagtatctgctcatcattggagcttcatcccatataatcagagaagcttctttgactacatttgccctatctgaaccaactttcatattacatgtagtaaactcattaggattaagaggaattccaaatctagagtgagctgtcctacctccttctaaaaggagagaagcaataccactggaagaaacgttaagaacaatgtcaccctttgacctaagtgcaacagagagtgttttcgaaagaaatgttttacctgttcctccaaatccataaacagtaactactaccccaacgttttcattcactgcaccaataatgtcatcgtaaatagacttctgctctggagtaagcatcttaatccatttggcatgtttttctgtcaaattatcacgatcataccctttctcatccataatcaagacattagtatcaaacctaggatctctaggtacttgtggcatagtgttataatatgtaagtga

SEQ ID NO: 15105 - DNA, 572 bp, Arabidopsis thaliana columbia
tgatgtacagggtttaagtgggagatcattgaggaagcttccgtttttagcgcaccagcacttgcagatccatatagccatgatccaagtaatttcttgtgtacaatgatagaaacagctaagagagagaagtctgaacaacctgaatgaccatttttgtgaggtcataaacaaataacaatgaagttgtgttgttcagaaaaatgttatgctaattgttgattaaacatcacttcatcatctacagctatgatgaaggggaaaatgctcattttattattttgtgataaagaaacgcagatcacgggttgagtattaaacatgggcttcagatgcccaatgggttattaccatctttaacatctctaaattgttgacaataaacgaatcgatgataaattgataatgaacaattgtcagcaaccaagtcatctgatctgttttttttttatttttgtttttgtcatctgaaaatctaaaggctaagaaaaaacgaggcatgaaaataaataataaacaaagaaagatgaaaaggaagagacaagacagaagacaagacagaagtgagtaga

SEQ ID NO: 15106 - DNA, 517 bp, Arabidopsis thaliana columbia
aaggtataatagaatataccataagattccgggggaaaattccgatgagattcaaaacgggaaaaaaaaaaacaaatcggaaaagtattaaaatacgtgaagaatcggtggagacgaagaagacgttcgtgacgacggactcttgcttgggctttgaaagtgctgcgcagtgccaaaccaaagagacctgactcatctagtggcttcttcacatgctctcatcaatcgctacgcaaattttacgagataggtttggatttttcattattttcacgtttgaccccatagttcttttataattatcatgtccttttttgggaaattaaatcgaagcgtataataataataaaaaatttaataaaaatgagactgttatatattattaaaaaaaataggtataaacttatcgatatataaagtagtccaaaaaattgattttagaaccgtaaatttaacaaagctcaaaatgtatgatgaacttaaatggtaaaaaagagcgcaagtttgtttgtgggtt

SEQ ID NO: 15107 - DNA, 593 bp, Arabidopsis thaliana columbia
gatctctatttaatcataattcccatagtagttcaagcattgaaatcctgacctgcttaggggattatggcaaagtaggattgtcctgttgcagaatctaatgccattatatatgtagaatcttttgggaatcaaatacgaagggcaaactgacaaggttgagccatggtataacactgctgagaagataatcaaattcaccattcaggttggcttttgatgtattaatttcctcaagttctgattatacttgcatgtttattttcctctgctattttctgtttgattcaagatggattttaactgcccccttgcagtcagctctcccgccactgtagttctttcaaacagttctgtttggttgctggtggactatttgaatgaatatggtaagaaagaacaatttaaagcaattgatacaataaaaactagagtaaggtgtttagccttcctagtttcttactatatcatgaaaattgttccatcaatctgtacttgtatgtttcagcttattatgctcaggctgctcgtcttcactatggattaagtctttcggacaatggttttgaggtgtgtttgacaaggatgctgac

SEQ ID NO: 15108 - DNA, 1303 bp, Arabidopsis thaliana
attgtattcttcaatggctaacaatattatcaagaataacgtgatactgttgccattgttacctatagtggccaacaacatttattgcaaaacaaaatgaactactctttattcttctttgggtatgttgaaataatcgaatagaaaatgacaaaatgtaatctttcccatttagtcgaacaatattgtagatttgtagtaacagtcagagcatgatcctcaaattgcatcgacgacctcacaaaaatgttcggttcaaattaatttgagataatttccggtccgctaaccggaaaaaccagaagacgccacgtgtcgattacacctcacccaaaacggcgatacacacacactccatataagctttcctccaacctttacgacttcaacaacgtgtttgtgactttgtgattggattctccactcactgctccagatttgaataaacacaacctaaacaaatcgagagagtcagatatggcggcaacgaagtggcgtgacatcgatgatcttcccaagattccggccaactacacggcgttgactccgctttggttccttgatagggctgccgtggttcatccgaccagaaaatctgtgattcacggatcgcgagagtacacgtggcgccagacttatgaccggtgtcgccgactcgcctccgctctcgccgatcgatcaatcggtcccggttcaacggtattcgctttttctcttcctaatctttcatttatcttccaaattatcatttcgactctagctaaaatgttcatttccaaaattttgaacaatcacttaccagagattttggaattgcttatagatttttcgtaatcaaccacttaccagagattataatcgatttcataaagaatctgttttagggaatcatcatgattatgtattaatcacatattaaccataatgtttctgaaactaattgctctcgcatgattcttgttgatcgatgcactggtgatgttgatgtttgttgactttttttaattaacaatgttttggtttggttgtttggtcttcttgcaatctgagtaatttcactagaccagaaatgttattattgtttcaggtggctattattgcacctaacatcccagcaatgtacgaagctcatttcggagtaccaatgtgtggagctgttctgaattgtgtcaacatccgtctcaatgccccaacagtcgcttttcttcttagtcactcgcagagctctgttataatggtggatcaggagttctttactctggctgaggattctttgagacttatggaggagaaagctggaagt

SEQ ID NO: 15109 - DNA, 579 bp, Arabidopsis thaliana columbia
atcccgaaagcttccaacggatacagtagcctgtgggagatttgtcatttctacactacgagatccaaattctgtaccgtcaattgattcagcatctgaaacagttttcagagtccgacatagtctctgcatggtgcccgagagactgtccagcaaaagttgttgttctgagcttcccttcatacttaccaggtaaaaaaaactccagtattatagtcattgtcaccagtgaatgtgctcctcagtttggtagcaactgcagcattaagaccaaactttcgagcatgttgaacaagagggtactcgcagatatcaaatgtctttacatcagatgagaaagacggtttgtttgatatgagtgctttgccaacaattccttgcccttctcttagataatgctccaaacatgcattcacaaagccttccatttccatatcattcacataacatgatgtctcttctatgcaaagaagagaacattcctttgagttttttccataaacctttaccaactcatcgtttgctcctttggagtaactacagggaatccaagctagagctaaaggcaactatgtgcat

SEQ ID NO: 15110 - DNA, 452 bp, Arabidopsis thaliana
ctacaattattagtgggcgtctagagtaatactgggtttttaatatttttcccacaattccaggtgactgtaatggacaccttgagccggcttagccatgacacagattcggaagttgccatggttagcaatcatttcgcttcatagcctgtcccatattatttagctgaatagtattgagagaggactgatctttcttttgactcgtacagtcagcaattatatcattgggactgattggcgctggaactaataacgcaaggatagccgggatgcttcggaacctctccagctattattacaaagacatgagtcttctcttctgtgtaatgtgttcctcattttggtttctgtaccctgcggtaagctgttgttcttgttggaattattgtaactaacttggtaagtcattatgcaggtgcgtattgctcaagggcttgtgcacatgggaa

SEQ ID NO: 15111 - DNA, 758 bp, Arabidopsis thaliana
gaagcccaataaagcgaggcctaaattagggccaaaatactattggaggcgaaaaagaaagtccggctggattttgctccaaggcaccgtcgactttacttagtactccctctctgtctcctcgtccttcccagatttcgtctccgttctgaaaaaaactccaaattctactctgaaaccctaagtttccgatgtcggtaagtttgataattcccagttgattttaatttcggagacctcagctctattagtcttacgcatcaatggtttaatagtgactgaacgataaaattgattgatatttgtggcgatgcagatcttcgagtacaatggaagtgctgttgttgctatggtaggtaagaattgtttcgccatcgccagtgatcggagactcggtgttcagctacagacaatcgccactgatttccagagaatctccaagatccacgatcgtgtcttcatcggtctttctggtctcgccaccgatgttcaaacactgtaaactatcgtgcaagcttctaaatttttcatatttgtttgtttttacattttgaagtgaactgagaagattttttttcctctttgttttgtcttttgatgtttgaagataccagcgcttggtgtttcgtcataagctttaccagcttagggaagagagagacatgaagcctgaaactttcgctagtcttgtctcagccatcctttacgagaagaggtcagtgtgcttgtgttgtttacttatgtagctgtattagtta

SEQ ID NO: 15112 - DNA, 711 bp, Arabidopsis thaliana
cgattcattgtctctctaacaagtttgacctgcacaagttatatatgaagttattaaccaagaacactaaagtcaaaagtgattgcacttcttataaatttttaccataaattgttttgaaattttaccttatcgaatcgtctgctctcaagaatacctagacatgtcttcttatacagtggagctaattcttcttctaccatagccactctagccattgcctccgcagcagctttcctcgcacgccaatcgtcgctgcttagaaactccgagacgtttggtaaaagccagtctagcaccgccttttcgctgtttcgaccgccaacagcgccgattacggttcctatggctccaagaagttccgctttcgccttgaaaccttccgatttaagcaacttcccaatcttcggcagggccttctgcagttgctcaacatccggctcatctgctgcgtctaccgccgcagcaaggcacatagcagcgctgatctgcgcattgggatcgcaatcgtggataaccgtttcgatcattggtccgaaaaggatggagaaaggctgtccggtgatgttggtagtcatatcaacggaagcggcaacacaagcggcacggacggaggaatcaggatcacggaggcggcggagaacggtggagaccatcttcgagaggtgaggagcgagagaatcgccatgagaacgagaaagaacagagaga

SEQ ID NO: 15113 - DNA, 554 bp, Arabidopsis thaliana
ggcttgatagtgagcacacagacacacgctgtgacagagatctggacggcttgctgtaagatacataagacttccaatcattgatctgttgagtttctgatcaacagcatgacctccttcatcctttgataactttgacgctttactcatgggagtgtatgctgtcttgcaggtttgcatgtcaaaacgtttgatgagattctttgcataagtactctgagagatgaaaataccagtgctggattgagtaatctgaagtccaaggaaataattcaattctcctaccatgctcatttcaaactcctcagtcattgtcttgacaaacttgttcaccagctttggatcagtactgccaaaaacaatatcgtcaacatacatctgaacgatcagaatgtgtgctcctgttctatttatgaacaaggttttatcgacatttcccctctgaaaattgtcatccaacagaaactgagctagtctctcatacctagcgcgaggtgcctgtttcaaatcatagagagctttttttagtttgtaacgtgttcaggaaagtgagg

SEQ ID NO: 15114 - DNA, 572 bp, Arabidopsis thaliana
ttgcataagtgctttgtgagatgaaaattctagtactggattgagtaatctgaagtccaagaaaataattcagttctcccaccatactcatttcaaactcctcaatcattgtcttgacaaacttattcaccagcttcggatcagtactgccaaaaacaatatcatcaacatagatctgaacgatcagactgtgagctccagttctgtgaatgaacaaggttttgtcgacgcttcccctctgaaaatcgttatcgaacagaaactgagctaatctctcataccaagctcgaggtgcttgtttcaaaccatagagagctttctttagtttgtaaacatgctcagggaaatgaggatcttcaaatccttttggttgtgctacatagaattcttcttgaaggaaaccattcaagaacgcactcttgacatccatctaatgcagcttgattttcaatatacaagcaattcccagaagtagacgaatagactcaagccgtgcaataggagcagaagtctcatcaaagtccactccttccacttgagaataccctgagcaccagtcgagctttgttgcg

SEQ ID NO: 15115 - DNA, 608 bp, Arabidopsis thaliana columbia
tccctgttactcttgcgcaagggtatgcgtgtcaagatcccattggtttgtattccaggttgcatcgagagggtcatgagcttaatccacacgtcttcacttctttcttgaagttgtttgttagtttggacaaagctgagatttgtccatggttgcattctcctatcgttaagctcggttatgattctaatggcttttgttggagctgcgcttaataaatgcttacttctgtctgtggttctgttgatagtgcaagaactgtttttgaagggattttgtgcaaagacattgttgtttgggcaggaattgtatcttgctatgtagaaaatggatatttcgaggattctcttaagctgctatcttgtatgaggatggctggtttcatgcccaacaactacacctttgacacggcgcttaaggctagtattgggctaggcgcatttgatttcgcgaaaggtgttcatggccaaatcttaaaaacatgttatgtgttggatcccgtgtgggtgttggtttgcttcagttgtatcacaactcggagacatgtctgatgctttcaaagtgtttaatgagatccaaagaatgatgtggtccttggagttttatga

SEQ ID NO: 15116 - DNA, 564 bp, Arabidopsis thaliana columbia
caaaaatagccgatataagaagaacaactaaactagttcaacattcactaaagatatcctctaatgcaatcgcaatacaataaaacttaacactcgagagagacgatcatggagagagtaaactctatacgtacatctttgaactggacgagaccgagatcgccgagataagagacggtaagatgagcagattccatgggaacaatgacttgaacgagttgcatcggttctgaccgcatcagatccatcggcggacagcaaccaccaccaccaccgtgactctccgccatgtctccgatctcgtattcgtaatcctctctctcagtggatcaatgatgagctaagaagggacaattttgagccagaggtaactttgttgttgttactgccacgtatttgtttaatgtatctttttaacacagttttgaccataccattacacatatgatgatgattcatcatgaatcaattatgataaatcattactagttgtctgaattaccattttgtccttgtttccagatttgagttagggtctctctgtatcggccatatttagttcgg

SEQ ID NO: 15117 - DNA, 1204 bp, Arabidopsis thaliana
ttcttccattgagtgggttgtgaggattatcgcggtgttttgttttgcacgcttgatgacagtccataggttctttctcgaagctggatcaagtcctgtacttggctcatccatataaaccaccttcaaaggaaatgaggacgagtctggtaagcttgaaagagcttatcccttttggtttactatttttaaaggcttagtgttgtaccttaggattcccgataagtgaaatggctacgctcagccgtcttttcatacctccgctatatttcccagcaggcttgtccgcaactcctccatggaaaaggttgacactcttaagagactcttccacagcctgatgcagataagtaacgatgagaaatagattgagcaatggaagtaatatagaaggtgagcgagattgataacatacttggttgagatcagcgcctttgagattcttaagtctcccataaacagcagatgttcccttcctgtcagtgtttcccatagcaaactggtatacgacagacaataagagaatgattaaacaactatatcatctatagtgaagaacaaaatgaaatgaatttcaagaatttaattactcatgctgcgggcatacgcccatgctggtgtacactctgtccatatcattgcatatatccaaaccttgaacaagtgctgtcccagatgtcggtttcaggagcccagtcatctgacaaagaaaacaaaggacatattactaaggctgacgcacaattcgtttgggcatacactagatagagtttctcgatcagcaatgatattggaagctaaggtctaatgtgcacaaaatattttgtccatttgactgaccatattgatgaaggaggtttttccagcaccattgggacctaacatgccgaagcattctcctgaaggcactgcaagagataacccacgaactgccaatttaggcgggttcccatctctaccaggatacaccttcttcaggttgtcacatacaatcgcatggcttgtgctcgactcaagcatcaaccgctcgacttttttactctgattggaacattttttgttatcagaaccagtatatattatgaaaaacatgaaatatattgtaaagtctttggacatacctcgtgagtaacatctggtttttccatatcaactgagactttggagccttgcctctgcaaactaggtcttctcaaagaaggag

SEQ ID NO: 15118 - DNA, 1020 bp, Arabidopsis thaliana
gattttcattgttccttttgaaaggtatagctagctataaagactcttaagagtttattattgagtctactttatgtatgtagctgtgtttgaatcttgagaggctgatattagctcagatcctcgttttgttagtatttgtgtagtggatttaccctgttaactatcaactattatttgtgcgacttgttcatagtcaagatgttgttgattttggattgtaggatgacttagaaaggaagtgttcatggaatctgactggttcagttactttgaaaatgataaatcattgaaccttggaatatgacacgatgattcctgcatctgttgcgtcctgtttctgggtttagctatgtattctcgatggagttagtcaagttcataactctttttactgtgtgtttgaaattctgaattggttcttagtgtttcaagtttatgcttatgcattcgcttgtatgactggtgatgaatgtttttgtgttcatatgattatggcatgaatgttttattccctcttttatcagagttttgcacttattttttgttgtcttgtctctgtgtcaggaaaaaaatgtcaggctctaggccgactcagtcctctgagggctcaaggcgatcaaggcacagcgctaggatcattgcgcagaccactgtagatgcgaaactccatgctgattttgaggagtcaggcagctcctttgattactcaacctcagtgcgtgtcactggcccggttgtggagaatcagccaccaaggtctgacaaagttaccacgacttatcttcatcatatacagaagggaaagctgattcagcccttcggttgtttacttgccttggatgagaagaccttcaaagttattgcatacagcgagaatgcatctgagctgttgacaatggccagtcatgcagttcctagtgttggcgaacacctgttctaggcattgggacagatataaggagtcttttcactgctcctagtgcgtcgtgattgcagaaagcccttggatttggagat

SEQ ID NO: 15119 - DNA, 569 bp, Arabidopsis thaliana columbia
tgaaaagtatagttacagggcaagagttttttcgtctgcacgagtcattagtgaaattagcatcaagagcacgatactcaggacgtggaattagaatcaatggaggccatggttgtggttttgggatagcacaaaagaatccttgatcccgagtcgaatattctaaaccacaggtcatttggcatttaccatctccgagtttgtcaatgcattgacaaccacattgattatctaaagagttattgacttgtgaatcaaacaaagcttgaataaacacaagaactatgcagaggtagaaaggaatcataataagtcgaacattgctccatatattccgtttctgcaaaaaaaaaaaccaccaaagaagacaacacataaaaactaatccctagagttcccaatactacagagaatttacatgtaacaaaaatcgtacatggtcgcatatttacatgtaatagtggaattactaagggaaaatgaaaatgtcgaacatgataggttaagtttttctaagtatagcattgcacgcgtccagaactggctgggcagaatctgccattgatatg

SEQ ID NO: 15120 - DNA, 479 bp, Arabidopsis thaliana columbia
acccaaacttataaacaaatgggagtgaactgaggagaagagaaaaggtttaaggaactttacagtttttccggctccgttagcgccgacgattagggttaaaggtctgaagaaagtaacaacgttcttattttctgggtcgaagcttcttatacccttgatcaacattttatcgaccgtactcatcttttaccttcagcgattacagatatgaaaaagtggaggtgataagttacggagaaaattttggtgacacaggaaggttaaacccataaacgagaagggttttgcgggaaaatcatgaaaactcgacaatggaagaagaaggaactggaaattggatgcagaagacgaattgaatcgcgagagaccggtttataaacagaatcgcattgaaccggtgtagtattcgattgagaactccggtcgtatacagtttcttccttttggggttagattagaagcgtactagaatattt

SEQ ID NO: 15121 - DNA, 498 bp, Arabidopsis thaliana columbia
ccaattatcacgccagatttcttaaacaatatcaagctatcaggttttttgccacaccatcaattacgtttgaagattgacgctccaattatgctacttagaaatattgatcctaaatgtggtatatgcaatagaacaaggcttcatattactcagatgactaaacaagttcttcgagcaaaagttataactcgagatagatgtggtgacattgttttgattcccttaatcaacattacaccattggatacgaagctgcccttccggattcgtaggaaatagttcccggtgtcagtagcattcgctatgacgatcaacaagagtcagaggcaatcgcttgagagagttggtctctacttaccgaagccagttttttctcatggccaactctaagttgctttatctagggtcacttataagacaggtttaaaaatccttattctagataaagaaggaaagattcaaaaacaaacagcgaatgttgttccaaagaagttt

SEQ ID NO: 15122 - DNA, 539 bp, Arabidopsis thaliana columbia
acatctatcccctgcttgcatccgaacatgtgaatgggttcattttatcacacaagtagctcatctcatagtatcccgttccgcaacacgcacttcttacgttttcgaaacctgcaatgcacataggaatattatcataagaattcttgatttaagagcatttggtacatattgaaacttagccctatgtctttgcagggttgcaatggttgggaaaatatttttgttagaactttgtactaaccgaatgcttcaggatggtatatgatttctgaaacaaggtcatatggatttgaaaacaccagctggattccgttcagatctctgttcaactggaagactttctcttccatcttgatgttgaaatctctagccacaatgttgtattcttcaatacatttgcttccataaaagagctgagttgttctttccaggggtaagcatccaaaaggagagagtcccgcaaagacatcttccgagctccgagtctgtatatatctgtcacgaaatctgctgctattcctatcaggaaatattgg

SEQ ID NO: 15123 - DNA, 533 bp, Arabidopsis thaliana
tacaactttgagctggttgagtccttctgcatcaggttctttatcgccaaacacttgcttcacttcttctcgtgcacgagcctgccaatcttggtgttggcttaacagcaccattgtccaaaccagaagtactgatgttgtctcttgcccggcgaaatagaacaacttgcactcctccatcagatcctcggtactcattccgtttccttccgtttgcctcaaattcgattcaagaagtattcccagcaaatcgtcgcttggtgcttcaccagcttctctggcccttaaccttttgtttacgatccctcttagtataacttggatttctctggctgctgctttcattcttctgttactttttgttgggagataactacacaaaaaattggctcaaagattctgagagcaccgttctactttaatagattgcagtactagaagacaagtttagtttttcattacctatatccagggatgaaagctttcctaaaagcttgaatgatgagctgtcgtagttctgcttggactcaaat

SEQ ID NO: 15124 - DNA, 547 bp, Arabidopsis thaliana columbia
ccataaggacaaataacttacattacttaattttaccaaaagcagagctaaaccgcatcgtcaacaataacccataaggtctaaagatatttgacagatcacttacatctacttcattttaccaaaataaatacgagcttaagaggggtcattcatagtttcgttttcttatttaccacggagccaacacagatgttataaactccaactccacatttgcaatctcttgatcaatggtttccgcagatgatttcatttcgacaatcattttgtccgccgcttctttcttctctttcgcaacctctgctcgtctcttcagttccaacattttgcgttctacctcaaccatctcgtgttcaaatttttgcatttcaatctcttcagcttcaatcctcttctcaagacatttcctttcctccactttctttgctcgcccaacttggagagacaacactttgtttatccgtgactgaggggttgcaatgtcgaaaccatgcttctctagctcggcaaaacaagtactgaggctacctagtttgcttgaaga

SEQ ID NO: 15125 - DNA, 459 bp, Arabidopsis thaliana
ctaatatcttttggtgcaacacataattattagggaggaagaatcagagttaataaagacatagtttgtctcttgttagtgatgtttgaaaagaagtgtcaagcaacagtcgatgattatattgcaatccagggtttgacacatcttgaagggttttattaaactatgacacgagttctgacttggatacatactaagataatgagtttatttgataacaaaacaaggggttatgtgattagagcttgtgcagcataagatgagctccgaactgtgggtaaagggtgatgattgtgtaaggcgcgtgaacataggaaggagaaagctcgaaggagaatctctgtagaatcaaactcattgccatctttgcctcaagcaatgtaaaattctggccaatgcagatccttggtccccacgcaaagggaaagaaggagacttggttctttgttgcttttgaga

SEQ ID NO: 15126 - DNA, 545 bp, Arabidopsis thaliana columbia
gttctgtggattatgctactttttcatatgtcaagatctaaactagaatcataagcctcatgaaaagctgtcaaaaccatattgtaaaattgattcagaaaatttgttatttttcaaggtggcaaatgaaaatggggaaagttgagaacaaacggttaagagaaattgaggtaatcgtttatttaaccaaagatactaatgtctaaacctctccttctaatatgattattcatatgtacgattttacaccataccagtgccccccaaaaatataccaaggaaacacagtgacactaatgaacatgtgccacgtagtatccgacggctatggcctatgatggcctatggagcggatcggaggtacaaaggaacccaattctttgggttaggatccgagccccagacagagaaggcgctcgaacatcgcatccattgatcggttaacctcgggaagtgtcggtctatcacatcttttaaagtctctgtagtattgacccactctaaccttccttagtataagtctctcattgaagtcgtagtgaaaa

SEQ ID NO: 15127 - DNA, 615 bp, Arabidopsis thaliana
tgtgggtactgatgcagcagaatttaagcctgagagattcaaagacggtctttcaaaggcaacaaagagccaagtctccttctttccatttgcatggggaccgaggatatgcatcggccagaattttgccatgttagaggcaaagatggcaatggcgttgattctacagacattcaccttcgagctttctccttcctatgttcatgcgcctcaaacagtcgttaccattcacccgcagttcggtgcacatcttattctgcgcaacgtataattctataaccacatgtgctgttgtcaaataaacataggaaaataatccagatcataatataaaactcaaatctttttcttatttgaagtcagaactttgtcctcacatatgtcttgagaaaccaaaatatttccaataaaaagagtgaaacgcatggaccaatagatttcttcctcttttcgtcgcttttcacacaaagtccaaatatgcttctgcgctttggtggcatgtgactgtgagggtccaagtaaagcaaaagatcaattaagcacaacaaaataattgtccaaaccaccaaaatataaaatataaaataatttgtgaccatcatcaccacatccata

SEQ ID NO: 15128 - DNA, 582 bp, Arabidopsis thaliana
tcaaatatactttccattcacagatgaaacaattccatatcagtctacctataatgctagtccaacgcgacaccatgatgtgggaattcaagcctgagagattcaaagacggtctttcaaaggcaacaaagagccacgtctccttctttccatttgcatggggaccgaagatatgcatcggccagaattttgccatgttggaggcaaagatggcaatggcgttgattctacagagattctccttcgagctttctccttcctatgttcatgcgcctcaaatagtcgtcaccattcacccacagttcggtgcacatcttatcctgcgcaagctgtaattctagaatcccatgtgctcttgtcagataaacagaggaaaataaaccagatcatagtataaaactcaaatctttttattaattgaattcagaactttgtgctcacatatgtcttgacaaaccaaaatatttccaagaaaaagagtgaaacgcatggaccaatatatgtcttcctattttcgtcgcttttcacacgaagtccaaatttgcttcttgcgccttggtggcacgactgtgagggtccaag

SEQ ID NO: 15129 - DNA, 539 bp, Arabidopsis thaliana columbia
atattttaccgcaatcccagaagctccattcaacaacaaagcaggaagacgagcaggcaacactgctggttctttttgtgagttatcaaaattggccacaaaatccacctgccaaaacaaaagaggttaaggaccatctagttgagtatcggtaaacttggcaacaaattaatagtgaggttaccgtatcttgatccagatcagacaatagtactgcctctgccagtggctgcagaaaaaaaataagtacaatcagctgaaaacactgacaaaaatacatgttcatctcaagacaagagaaaaagtagagatgagagatacactatagatagcaaagacaagtgaaacaactagaaaaagtgaattgcagggaaaaccatttcaactagaagggaaagtaaggtaaaaggcactcacatcgagtctgcattcagtgtaacgcgatagcagcaggaggatctgcatctattgagccaaaatttccatggccttggataagtggacatctcaaggagaaactctgccaaaaaaacaaaggt

SEQ ID NO: 15130 - DNA, 477 bp, Arabidopsis thaliana
tgtaatgaaaaaactctacttgtctagctttaatatagtgcttttaaatctggattcttgatctttaactttcagtgctgcaatctattagagatatgacctgtgttgtcataatcatgtgcttattgtttgtgtagttatctcccaacaaagggtaatagaaggatgaaaacagcagccagagaaatccaagatatactgagagggatcattaacaaaagggaaagggcaagagaatctggagaagcaccaagcgaggatttgctaggtatacttcttgaatcaaacttggggcaaacggaagggaatggaatgagtaccgaggatatgatggaagaatgcaagttgttctatttggccgggcaagagacaacatcagtacttctggtttggacaatggttctgttgagccaacaccaagattggcaggctcgtgcacgagaggaagtgaagcaagtttttggcgataaacaacct

SEQ ID NO: 15131 - DNA, 1261 bp, Arabidopsis thaliana
gacaatactgagtcaattctcaaaaaaaggtttgtatctcttgctatagtcttggtttttgttcacaactgagatttgttccgtgagttctgtacttcaaaaccgtatcaagatttgagttttgtatgataatatggagttgtttcatctgtgtatggaaattggaaagtatatttgtgaacaaggagtttatacgattagagcttgtgcaagataagaggagcaccgaactgtgggtgagtagtgaggactgtgtaaggcgcgtgaacataagaaggagaaagctcaaaggagaatttccgtagaatcagtgtcattgccatctttgcctcaagcagtgcaaaattttggccaatgcagatcctcggtccccacgcaaaaggaaagaaggagacttggttctttgttgcctttgagagaccgtctttgaatctatctggcttgaactcccctgcatcgtttccccacagctccctgtcgcgttggattagcagaattggtagacttatctgaacgccgcctggtagtgtcaggtcacctagctgcatctctttgtgaatggctcgggtcagctggactactggaggatatagcctaaggacttcatataatatcatcgtcatctgtgagggatcaaattttcagcttcaatgcaacaaaagaactcacgtcacttgaaggtttttggttcggtttacttacaactttgagctggttcaagccttctgcatcaggttctttatcgccaaaaacttgcttcacttcttctcttgcacgagcctgccaatcttggtgttggcttaacaacaccattgtccaaaccagaagtactgtagtagtctcttgcccagcgaaatagaacaacttgcactcctccatcagttcctcggtactcattccatttccttttgtttgtcccaaattcgattcaagaagtatacccagcaaatcgtcacttggtgcttccccagcttctcttgccctaagccttttgttaacgatccctctcagtataaatttgatttctctagctgctgctttcatccttctattaccctttgtagggaaataactacacgaacagacgacagagagacaagttagggtttttattacaaaacatggttcaaagtctctagtagaatgcagcactactgaagctctaaaaggccttgttctaaaagcagacaagtttgggattttattaccgatatccagggataatagctttccgaaaagcttgaatgatgagctgtgctaa

SEQ ID NO: 15132 - DNA, 918 bp, Arabidopsis thaliana
cttcatgcctaaatgatccatcgcgatatcacctgcgaccgggacaactttttcggacaacaatgtattcaatttctcatcgccaagattatctcttaacaccttgaaaagatctttctcgaatgcctgccatatgtatatacttcagttaatcagatgaacaaatctaattatatatttatgaataatactcagcaaaacgaatatatatatatatatatattaaatagtccataaatcaggtttgttggtaacttggtatataaacaaacctctgtgcgtaacggtttcgtcgcggcttcattgtcggatgctctcaccacgaggtacagcttattcacatttggttgcactctcaatattttctccacaaaaactaaaatattattaaagaaagttgattgtaatctgattgcttgtcactagtgaaatgatccatttaatatataaggaacccacgagctgaaatagttaaatacataaactacaccttaattatcttcaaggaatatttgttcacaacacaaggagacataaaagattcaaaaataatcttattatagttttattctttttctaaacactatcatgagaactcgaacaatctttctagttactttgtcacttatcgagtcttgaagaacatttggacgtacgttaattggtgagggttaaccaaaatgacatacctttggcaaggaaaccggttgcgcctgtgacaagaatcgtcttgttttgaagaaaatgaacacaactgaattccattgtttggactttggtctaactctgaggaaatgattttttttttgtcactaacaaagaagaaatgagtatatgttgcaaagaagaagtggaagggaatttatagttgtaaacgacgtagtacgaacaggaaagtctataatatcctccaataat

SEQ ID NO: 15133 - DNA, 871 bp, Arabidopsis thaliana
cgtcgactctccccgttaccaccactacagcagcagcaactgctactgctgatatctttgtatcactcataaacgcacttacttgtaaaattcgttagatgctttcttctattttactgaactgaagatgccagataaaaggggttgtataaataggttgaggattggatgtaatttaaaggtttaagccaaaggaaaattcaccgatggtcctagattatctaaatccataaaatacttatgtttttgctaaatctttctccactggcctatgacataaataacgattggcttatctaaaacacatgctaaagatggtagagttgaaattggcttcttggaatagacttttcaagattaataatgcagccaggatagaaaacgaccttagacttgactgaagaagacttttaccttatagaatagcgactagtttcagacaaagatattgacaatttcacaacatatggctacagggctttctatgacatctttttgttacataatatgagacttttgatgacatatccatggatatacaaaatcagagcttgtgcagaattagatgagctccgaattggggacgagtggtcatgactgtttgaggcgcgtgaacataagaaggagagagctcgaaggagaacttttgtagaatcaaagccattgccatctttgcctccaacatagcaaaattctgaccgatgcaaatcctaggtccccatccaaaggggaagaaagagacctggttctttgttgcctttgagagccgtctctgaaccgctcgggtttaaaatccgctgcatcatcgccccaaagctcggtgtcacgctggacaagaatagttggtaagtaaatttgaattcagctggaa

SEQ ID NO: 15134 - DNA, 599 bp, Arabidopsis thaliana
cactcctcccttgttggttactttgttatctgttaaatagttttccaattgtatccggatagtgttctacttctccttgtagaaaatctcaagtttttgttactcttgctattctcttggatgttgatttgtaaagcatgtcgttttattgtaggaatttaacagaagagtgtccgaagggttccaagctactccattttggcatcaaggtcacatttgcgatgatggccggtaattatatgattctatgcacaacaagaattcactatattataaatattggatattgagtatttttgttgaaaatttctgtgtttaaatctgacttgacttgttttgtcagtactgactatgcggaaactgtgaaatctgctcgttgggagtatagtactcgtcccgtttacggttggggtgatgttggggccaaacagaagtcaactgcaggctggcctgcagcttttcctgtatttgagcctcattggcagatatgcatggcaggaggcctttccacaggtgtgagctttgcttgattgacttaaagttaataaatagacggttaagtttacttgcctagtcccggtcacacgccgtggcctgcg

SEQ ID NO: 15135 - DNA, 1182 bp, Arabidopsis thaliana
ttctccatttcgcttcacaaactcctcctccctccggatccatccaaaccttaaattcctttgccggcggtgacagtgacagctgcagcggaggactcgccagccttgacgaccaccgttccaagtgttcttacataagatctcaatcaaaatgtggcccacaaggttacatagactatctcaagattttcttctgcatcttcggacaatcccctgttttgggccatctagttttatccgcctggttgtttgttctgttctacttgctcggagacacggccgcgagttacttctgtccttctttagacagcttatctaaggttttgaagctgtctcctacaatggctggagtcacgcttctctctcttggcaacggtgcgcctgatttgttctcaagtgttgtctccttcacaagatcgaataatggcgattttgggctcaactctattttaggcggtgcgttcttcgtctctagcttcgttgttgggacgatttgtgtgttgattggatctagagatgtcgctatcgacagaaatagctttatccgcgacgtggtttttcttcttgtcgctctttgctgtctcggtttgatcatcttcataggcaaagtaaccatttgggtcgctctctgttatctctccatttatctcctctatgtagggtttttatcggtttcacatttctttgaccgcaagaaacgtatgtccgatcagattcttcgtagcagagaagatttggcgagatgggtgtttcgttgctaggctatatagcagaggagaagctggtttgccagagaaaacaactcaagaattcaagattgtgtttgaagattctccaaaaaggcaccgatcttgcttctcggtgctagtgagcataattggactacctctatatctccccaggcggctcacaattcccgtcgtttgcgaagaaaaatggtcaaagccttgcgctgtggtttccacggccatcgctcctgttctactaaccgaactttactgttctcattacagcgggtcacaaagaaacctaatcttgtacataatatccggatctatcgggctaatcgtcggtatcttagcttacttgacgacagaaaaatcacatccgccgaagaaattctcattagtttggcttctaggaggcttcacgatgagtgtgacatggacatacatgatagca

SEQ ID NO: 15136 - DNA, 1695 bp, Arabidopsis thaliana
gaatatcgatttcaaaatctggaaatgggtttcagcatcttcactaggctgcatattgggatcaatacgtaacttatagcaataaacaatgtataaagtgctattgtatcatatcttatctttgttatgataaatccattgggtgccatctttgtttttttttatcaaaaaatataatgaatagtaagcaatcttcttgtaatcctctatatcctcgtactttgtatacggacttgtttctagtggcaactcttgtttctcttcactcttcgacatatttcctgacatatttcttgaatttaagtttagcttctttttttttttcttccttgtgtgtgaagacaatatatttggagacgtaaataattattgtccaaagaaattgcacaaaattggccatcgaactagggagtgtatttgactaggttatttccacatttagctaaatctcaatttctctttatttcaaagttctaaaatctaaagcatgcatgcattgtctaatttgcaatgaatggaaacaaaacattcagtaatttaacactatatggcatatggttataaaaagtgaataatcatttggttaacaaaagaattactatttgtgatacattttcacacctaaagttacactcacacacctaaaattaaaacctacaatataaaaaatttcaacaaaaaatttatattatgaaagaagtagataattgtgttccttcttcttcttcgacaaaagacgaatccaacacagttacgaatccttcttctatcatctgtctactaaccaaacaaaccaaatccttcgtctcttcaatcatcggatgcattgtatctcccacaacaaaaacatggtactgattcttcagctcgatccaactgcaacccacttctttgctcaccccgtttgctctcatgtgtttccaaacccgttccacatctctcatccgccctaaagcccgtgtaaatgcctgacaattgcacataagttgatgattctctcgatccaagggccatgagcttctctcctgcgtaaactcctagctcacatttcccatggttcttacatgcgcttaatagtatccgccaaaggcataaaccgtgatcaatattagctgattcgatgaactcttttgcctctttgagctgtcctgcacggctcagcagatcaaccatacaagcatagtggtcaacttttggatcaagcccgatctgatctgacatcatattgaaataaaaccagcctctctctacaaaacctttgtggctacacgctgatataatgttcacgaaagtgacatcatctggttccattccttctgctaacatctcctcaaacagttccaaagcctcatctccttgtccattatgggacaagcctgagatcatagcgttccaagacacaacatctgtattgggagttcttctaaagacgaggttcccatcttctaaactcccacactttgagtacattgtagaaagtgcgcttcctattggaacttcaagcccaaacccatgcttgattgtgtggccgtgtacttgctttccgagctccacggtagctagagaagagcaagcttttagaacacttgccatggttgggtcgtttgggataatacctgctgttttcattctgcggtacagaatcaaagcctcttcgttatctgagtgttgaacatacccgctaataagcgatgt

SEQ ID NO: 15137 - DNA, 421 bp, Arabidopsis thaliana columbia
gcagacataatacacaatcaacaaattgctttgattctgatatgtacaggttatcagtttgactatgtatttgattggacaatattgaggtatccacagttcggctccagttccagctcgaattccaaaccaagagtaagtccattctgaagctagctgtatgtgcagaattcttatcattttgaatagtgtatcaaccttctcacgcttttcctgttccattagccaactttaagaccagctatgaatattccagtaccatctgccgacaaagcggaaaagcctccaagtaagcatcagatttaaaactttacaatcattggtagagtaactttttattccttgtaactgctctcattctgtgtttacccgatttggtttcggctgaattacctgtctttctctccggttcaaaatgtat

SEQ ID NO: 15138 - DNA, 518 bp, Arabidopsis thaliana columbia
aagaggggtttacaatgatacaatgatcatgtcctagaagagaaggatcagatgggttggtctttgggaacgatctgatccttgatccacatgtagatagggattaacacaaaccaggcagctgctagagttcccaggaggaagcgtcccaagaaggagaaggggttgttgacaggcttctctacgtcctcttcctttggaccaagctgcagcatttgagtgataagtttagtgtatcaaagagagaagaaagtaaaaaaggtgaagtgggaggtaaaagacctggagaggagagtcaccggaggcaggtttaacaccagtgacagaacatcccatgataaggccgtgcctgcgaacaccacggtaccacttggggccaatcctcttgagctgaacgtccttgaaaccggcattcttgaaccactcaatgtactcttcctccttggggaagagcatcagacatcagaaaagaagcgagagagccagaaggttgggtagacagggccgatgagacacgc

SEQ ID NO: 15139 - DNA, 297 bp, Arabidopsis thaliana columbia
tgaatatctttggctttgtctctaccaatttcgggaaatgtggttaacgagtcaagttataagttataaaaaaaagtatatgaaacgattaaatttgactcactcccatgggacatcgccaacgagcatccagtcaccatctttgtcctcgtagcttggcacatactcagagctattcagcagattcattagcttgctctcgttcatgaaatctatcattccttgtgctccatagtttccttgaagatattcaagacattcaaaaattcttataaattaaggggcacaaatggggaa

SEQ ID NO: 15140 - DNA, 596 bp, Arabidopsis thaliana columbia
cttaagccaagaattgtgatattttcttcatcacagcagataaaaactacacactgttgctgtccatcttttcatataattagatcttttcacgcgccattcattgtgttatccgtgtgaactccgttgctgtcaatcttcccgttcacctgagccctcggtctctacaacccgcaccaacaaaaaacattttaagaccaaactattggatttgttcagattaagaaggagaacaaacacagatgcagatgcgtacccaatcagcagggtcaacaccgtttccattcaacagcttgtggttctcttcttttgttctgtcttttgagattactgggagcaacacagcagtccgatctggtaattctgtggtattgacgtttgaggaagatatgagaaaccatgtctccgcaaaaataagacaaatagtgttaagcttcagtgaagaaggttatgagatcaaacctggtaatttcttgtctagacagaacaccaccaaattcacagtatacctaaacagtggaagaacaacacaacaagtcaatatatctctctgtattcagtgaacatgtttacttgggtcagttttgtgtgatagt

SEQ ID NO: 15141 - DNA, 578 bp, Arabidopsis thaliana columbia
gaaagactattattttttcacatgttgtatgtttagactcatgaacaaaaaatagtaaaaagaaaagggaagtagagatagaagatacaaaaccggcaagctttggaacggaactccaactaggatgaccatgagtggtgatataacgaagaagcttctcgtcttcctctggagaccaaagacctctcttcactttgtgttttccacaacatcgatgtcccatttcatctcttttcatttcccacttctctctcatcttcctaacttatatattacaaggtctcttggtgttgattaaccagcagggtggtcactatttgatgtattttccctgatcagtactaatatctttcttgggagaattaatctactatatatgattaaccaaacttgtgtcgtttctctttttttctctgtgtgtcttcaaatggaagcctgattagagacaccagtagttcacgtcactttccttaacaaaatcatctatgtatctcgttaacttgtgtttctagttattgcatacattgcatgcttaaaatcctataattatcagtttagtttaatgcaatggtttaatg

SEQ ID NO: 15142 - DNA, 876 bp, Arabidopsis thaliana columbia
atatatcatatgcatttcttgattatgtaaatagttattaattataatcaacatgacaggtacaagcataggctaacgttgacatcactgtcgttcataaggccgagaagaccattgtcaagatgtgcgtccttaggagaagacaaattgaggctctatgcagcaatattaacctctcctaaacccaatcccgacgattttgatgattattgattgaactatttttttgttacgtttgatatacctcaattctggaacacttaagtggtaactatttcctcttctcatagttcatgtggatatttttttctcctgccgcctttttatttaggtttaacaagtcattaatgcctctactaatatctacaaaattgttaggtcacaagtctaatagagaaagccagtaaaaatactgttaacagataagagatcaagctcccattggttcgaatgaaggtaatttttttccaagttcacttcacactgctgcaaattctagcagcactcatataatcaaacctttaattattttctaattcacaactagaggatagtctctcagcttggtgatgaattgcttgactccctaatagtaaagcatatttttcacgaaccttatactaatcatcttaatcaggaacaataacaactgcacaaaggcaaatagaagcaaaatgtaacgaaacaacattttaagtcaatagcttgtgcttttcacactccatcatcagtgagtcaactcaaggctttgatgattcataattatattgtgaacgcataactcattctcaattcgaaattacttgaggtggaatgtggaaaggggccgagagtttagtaaatatggtcttttagagaaaaatcttaaatttggta

SEQ ID NO: 15143 - DNA, 898 bp, Arabidopsis thaliana columbia
tgcatgatttctcctttgatagttaattattttgttttcggtttcaaaataatcttccagaaaaaaaaatagcatatgttcctatagatttgtgttagataaggcggttgtgtaacttttaaagtcttgaaacaagactgtacatctcagttcctgtacacttcttcaaacccttcccttcccgtatcttttcattgaaccggttgtagattttattttatcctactactaaattattgaaagaagccacatgccgtcatccaacaattagtatggaaatttccaactgtcataataatttttagtctgcttcatgatttcatagaaatcattaaagatcatggattatagtagtattaattctaagagttgacaagataaagtgataatttgcaaagacttccatcaatcgtgtttagtttatgtctgcaagcctggaactagtcctaaatatatctggattaagagagaaaacaaaagacttgcctaagttgactttgtaatggaactggtctttaaactctagttacatcttataaataaaaatgacaaatttgggagcagaaaaattcatcatttacgagttgaaaccatttatttgcataccctctcatttgctttctcccttcattccaaagaaacccatatgggactacgtcgtccttctgataatggttttaagccacctccttatttttctacatctgaacctacatgtcgtttgtccgatccggctcaaccccacatgtctttgccggcggagaccacgatctcatggtccactttctatctgcttttgcaagcatttggagggcagtatatactattactactgtgctacttgcaatttggaatccacaaaatgtgtcacttctttttgccggagataagacaccct

SEQ ID NO: 15144 - DNA, 600 bp, Arabidopsis thaliana
gtcttcaagtgttaagtacgacgatcaaattgtcaccacttcccgtgtccagcactacacgagtcgcgggtcaccattcagagggcattgagcttggatcagagggacaaaactcggggcgatggttgggtccggacttcctgtgttgtcgtagttgaagaatctgtccctaaacacaatacatccggccgttcctatcgtatgtccagctgttatataccaagccctctatgtgaattagccaggtgtcttcatgacaatttcaaaatatgtaatttgtaacatacagaaagtatttattatctcctttgaatgttaagctagctttgattctttgtttacgactttacgtttgcagaaatatataaaaaaggtagaattttcacatgcaaacataatcgaaaaaacaatgttttaacacaagcgatcgaggccttataaaatcactacgtaccagcaaggacaacgagatcttgggtattaagatttttttcggcaaacctcagcttctgcacggcaacggagtcggtaggtcccggcaaaatgacattcgaggctagagaaattcggccatcgagtctccccaatggaactggccac

SEQ ID NO: 15145 - DNA, 576 bp, Arabidopsis thaliana
catagatttttaattcaccctaaccatttttttaaacaaatttttatagcccacgtggtattggcctagttttaagaaaaatttacgcatatttaattttatagaattcttatacttggatagtaataattttgtagtatttggctataattatgttcttatagctactagttaggcttaagcaagcttgagttaaagtcatgttctttgtgatgaccatcgaaaccaaacacacaatttgattaagttttaaggaaaccgagtcaattgagaaataaaaaggtataaaatgtacatgaggagccaaacctaaccagagcagctcatcaaacaatttgtctgctttcaagtactactaatcatccacaaataacgccttgcaatatgattgtataagaaacaatgttgaagacgttacatttcatatgtggtttctaaaacccaactagattctgaggcccacgattggcccagattcgtttaggggacttttctacttcagttgactatatatttgtttcccttaacgcaagaaatcagaggaaagaaatagggttttgcaggtaaaaaaaagag

SEQ ID NO: 15146 - DNA, 725 bp, Arabidopsis thaliana
taactactctttgttatacatagccattttagttactctggtttgtttctcatcccattctctctctctttctctaatggttcttaatctgttttagcattttgatcatctaaaactttcaatttctctcttgatcctcacttgaattttttgttgtttctctcaaatctttgatcctttcctttgtttttcatttgacctcttacaaaaaaatctggtgtgccattaaatctttattaatggcacaacttcctccgaaaatcccaaccatgacgacgccaaattggcctgacttctcctcccagaaactcccttccatagccgcaacgggcggcagccgcagcaaccgctggacctcaacaacaaaacccttcatggatggatgagtttctcgacttctcagcgactcgccgtgggactcaccgtcgttctataagcgactccattgctttccttgaaccaccttcctccggcgtcggaaaccaccacttcgataggtttgacgacgagcaattcatgtccatgttcaacgacgacgtacacaacaataaccacaatcatcatcatcatcacagcatcaacggcaatgtgggtcccacgcgttcatcctccaacacctccacgccgtccgatcataatagccttagcgacgacgacaacaacaaagaagcaccaccgtccgatcatgatcatcacatggacaataatgtagccaatcaaaacaa

SEQ ID NO: 15147 - DNA, 522 bp, Arabidopsis thaliana
tgaacttaatccttccaagagccttggtcaaaatgtccgccttttgtttattccccggaacatgctcgacttcaatttgtccggtctctacacactctcttatgaaatgatatctcctatgaatgtgtttgcttcttccatgaaaaacaggattcttggtgagagctatagccgatttgttgtcaatgagtatagtaacctttccacacactgttccggtgatctcacttagtagttcttgaagccaaatagcttgttttgccgcttcagtccctgccataaactcagcttcacacgatgacagagccacaacatcttgtttcgacgagcaccatgttattggactttctccaagataaaacacatgtcctgcagtacttctaccatcatccggatcaacattgtggctgctatcgctgtaccctactaactttggtatcttctcacatcgcttaaagattagaccaagtgatgtagtcccttcaagtaccttagacactgtttcattgcagcgcatgggag

SEQ ID NO: 15148 - DNA, 700 bp, Arabidopsis thaliana
cttataaaagttttgtcattataatgtcagatttgagcacaaggagagttgcgtaagttttaaaactctacttttgtgctatttgtgagatacaccgacaaagttacatggcaactactaggaactataatagtcaaatttgtgagagtatcatcatcaagaaccagaagtagctttaaaccgcatttgcaatatacatttggttgtggttcgaacccaaatttgagaatgagtgaaagaatgaatgaaattcatttatttccatgtcaacttttcaataatcacagaaaaaaaacaaaaatccctcacaacacaccttaaaacttgaccatcactatcatgttaattcgattttccatattttcgacaaatttaaccaatgaaaataaggaaaagacaaaggtattacatatttatatcagtaaaaaataaaactataatttatttgatgtatacatttgcaagtgtataataaatgatagaaaatgaaaatacagtccaaaaaaagaaacaatttgctatcaacttaacaacgaatctatgtaatgaaatgaaacaaattaaaacaaaactacatttatgaatcttgaagtgttttagttcatgttctttctaaagacaatctcagtgtcaagcccaaacccatcgatcttcctcatctccacaaccttggatctcttaaacaatttcaccaatggtt

SEQ ID NO: 15149 - DNA, 772 bp, Arabidopsis thaliana
aagggtccgaactgaattggccaaccctaaccctagtctcactaaaccgctctggtttgtgaagctaccagccagaacatgtgatctgtattgattgtgaaaaggaacttactcaggatcaacgtagccgggagtgcccatgacggtagtcacgacgtggctgagatcgtcttcagggaagaccttagaaaggccgaaatcagcaatcttggcttccaagttatcgtttattagaatgtttgctgttttaacgtctctatgtactattgctggtctgcatccatcgtgcaaatactccaaacctgccaagggggaaataaaaccaggtttcacaatacagaactaggctaaaccaggtttggtttcttggttaagccctgaggaatcaaggttgccaaaaccgggaccaaccttgtgcagaatctatggctatatggagtctcttttcccaactaagatcctctgcattctcacctgcatgtccataaacataacacccgtgagcgcaaaggcagcgaaaaattggcaatagagagatcgagagagatgaagaatacttgaaagataatcttgcaagttgccattggccatgtactcgtagatgagagccatactgcgaccatcatcgcagtatccaacaaacgaagctaagttccggtgatggactgtcaaaagaagctccgcctgcatacatgttacacttcagcaaccataaaacaacattgtctaatttatcggattaatgattctagtgttacgttacctcgacttg

SEQ ID NO: 15150 - DNA, 808 bp, Arabidopsis thaliana
cataatatacttatagaaatgagtcacttcgactgttcttggcggtatgcattttagggcaggcaactaagaagaactccggggagtcttttaaatgtgtaacagtgacagcttatttgggctttaaatgggcttctcatgagacaccaaagaacggttttatgttccataggccatgagaaacaaatgagggaaagtaagctccatcaatgtctgcaataagcattaaggaaagaagctgctggtcttgttggtagtatatatccatataattagcaagacttgtgaaagtatatattcagtgtcgagcaagtgtcactaattcataatgcaaaaggaaggaattggaatctgaatcggattcagatccaggcaaggtaaacacattctcagaccattcaatgactccccaaaccagcttgcccatcatgcggatctcaaatgaaatctgtgcacaccaaatctccgtttttccttagtatacgtcttccaccaaactgtcactctcctttctccgccagggtttgccaccgaaacaagataattacaagacagtccttcaagtcccccaaccttggtactccacgcccacggcctagaatcatcactgcaaagtagtttgagtttcccattggaaaccgttgcttggaagtctttgcaatctatgagtaccatgcaaacattcggacacaagttaagcttgtccatcagaagattgtcataaacttttccactaattaggatgccacaatcatgaaaaactaattcaccaactataaaattgttggtcggtaattgagttttcagt

SEQ ID NO: 15151 - DNA, 1005 bp, Arabidopsis thaliana columbia
taaaatattaaccatctactttggtattgagctaaaaaaaactctctcacgcatgctcaataatcgatgacagccgcatgaaccaagttttcaatactggtggagtctttgctcgccggcgtaaagatgtatctatccatcttttagtctcttgtctctattccacttttcgcaaactttttgttcttttttgtcaccttcccgaccaccacgacgttcttcctttgctttggtttatagtggttggatatccttttatcaaactttccagaatcttatattcgcgcgggtcctctagactgatagttgttttcgatgaaacttgatccaccatgccaagattcctcaaagtcaaatttgtaaaaatgcgtgaacttgagcttaatctcacacatgcgtccagatctatgaatctagttgtttcgtgatcctagtcgaccaacaacctcaccagatttcagcatggctcgaaccggtgacgaagatggcagcgaaagggttaaccctgatccatctagccttctccatcctggatcccgtcactctctttaaatggtattgcagccagttgcccttgtttgctcttgtgccacagcctccgataatgtctctatcaactctaattatctgatcgccgatgccgagctaccacacagaaagcctcatcgacctagctagagttgataagtgtattatgaagtaacccaccaaaaataaaaaaaaattttgcttggctaacccactaaaagagaaacaagactttaaaatctacaccgatttgtggagaaataaaagttaggcatagagatgttttgacattttgactttatccaatacaactgtctacatgatattacaactgcaacacaagatgaagagtcatcaaaatataccgatatcaactttcaccgccgacaaacatcaaatctggtgaggaaaacatcaccgaaacatcccaattattttcctagtaattaaaatattcttcagcttcacaaaagaatt

SEQ ID NO: 15152 - DNA, 786 bp, Arabidopsis thaliana columbia
cccaactgcacagcctgattctgaggaagttttactcaaagtaaggatcacattaagtcatagcctattctactgttcatgggactcaattctagtgttcatggtttgcagtacttgaaacaaaggtacaagacagacttggagccaaaagagaaggaagaaaatcatagaaatagaaaggccccagagcatcttcaaatagcaatccaagtgaagaaggactggactctttcatggtgggatcagttcttgattctttcaagaagaacattcagagagcggcgtagagattactttgataagctaaggctagttcaatcacttggtgtggccgtcgtgttgggtcttctctggtggaagtcaaagacagatacagaggctcaccttagagaccaagtaacgaaactacatatatatattttgtgactataccaaggttataagcctcctatatatttatctggtaagcttgtgtgcaggttggtttgatgttctatatctgcatcttctggacatcgtcatcactctttggagcagtatacgtgttccccttcgagaagatctacctggtgaaagaaagaaaagcagaaatgtacagacttagtgtgtattacgtatgcagtacactatgtgatatggtggcacacgttttgtacccgacattcttcatgatcattgtctacttcatggctgagttcaataggaacatcccctgcttccttttcaccgtgttgacaatactactgatagccatcactagccaagtaagcagagaaaatatcgaca

SEQ ID NO: 15153 - DNA, 1184 bp, Arabidopsis thaliana columbia
agcttgatccgatgtgcctgagacaaccaccagtccttctgtagtccctgcctttggatcatgcacaaccacattcgctcctgatacctagttgattaggtttacaaacggtaatcagatgcagcctttcaaaatgaccagctgctcatatattatcggcaacatacctgtttgatgtaattcaggttactgcagttctcaccatagacatgacctaagtatgcttgaggaatcacaatctccacatttgcacttgtcattactggattctcgctgccaacaccataaccaaaaggcaataatgtgaaattagtggataaaattccttcgtacagtttctggcatttcaaagtcatttagttttaaagtgaacaaagacagcgccgggaaagtgatacctgccaatgggctcatttctcaaagcaaatccatggttcacatcaggaggaaccataccaccgggatggccatcgattcccggctggcgattgagaaatgttgaattagaaagaaataaaaggacatgacagctaacgaaggaataaagatcattgagttcacatacctgcggggtccaagacattggggaaggtggcctgtcaaatccaggaccaggtggcctatcaaatccaggaccatgacaatgcctctctgtatcatatgtaacaagtagacattattaagaaactgagattgatgcatgtatcaactggtgatcatgggtcggaaattgatgaaataccatggaatggtcctactggagaatggtaacgatctggagaagctggatattgtctcggtccaaatgggggaggcggttctggatacggacccatgaacggcggagtggaccacccattccttgaaaaggaagtcttccaggaaacattgcttcccgaagcctacataatatttggaacaaagcatcttgaacagttttcaaattaccaatgacctgccaatccagcaaaaaggtgtcaaataacaagaaaactacagagttgaaaaacttatcgaggccgcggatgttatataaaatttacctgaacaatctcatcatgttgtgattcatactttgtagcttgatctttcgcaaagacgcggatgctagcaccagttgctctcctcatttcacttatcaaatgaccccctttacccaatagacgtccgatatatggagaatg

SEQ ID NO: 15154 - DNA, 473 bp, Arabidopsis thaliana
agacgcggacgatggtaagagtaccggaggcagtgtgttttacctaaatgagtgtcctattagttggtgctcacagaaacaacaagttgtagctctctcatcttgtgaagccgagtttatggcagctacagaggcagccaagtaagccatttggcttcaagacctgcttgctgaagttattggaacaccatgtgagagagttacattacgagttgacaacaaatccgcgattggactcacaaataacccagttttccatggaagaagcaagcacattcatcgcaagtatcatttcataagagagtgtgtagagaatggtcaagtctcggtagaacatgttcccggagtcaagcaaagagcgaatatactaaccaaggcactcgcgaagatcaagttcaaggatatgagagatctcattggagttcaagacttgtcaaatggagacttcaagcttaaaagagtgaatgttggag

SEQ ID NO: 15155 - DNA, 489 bp, Arabidopsis thaliana
tctagaggtgttccttgacactttaacattctggaaaataatttgggttaaagttgagaagaagcatcatccgattgttaaattaggaacccaactgcaacaattacatgggcatgaagaagataagaaacagatgctgaggaagatgagagcgcacgcccaagcaataagagtatataagcctcgctagtaagttttacttaaataaacgtcttagtggtgtcatataaggaaagcttgttacgacttctccttcctctaaatgataaggtttagtggacttctcgcgacgtcgcgggcggcgaaccacccacgtcgccgcgatccgaacacttcaccggatcattcaatcggtaggagcgacgggcggtgtgtacaaagggcagggacgtagtcaacgcgagctgatgactcgcgcttactaggaattcctcgttgaagacaacaattgcaatgatctatcccatcacgatgaaatttcaaagatta

SEQ ID NO: 15156 - DNA, 919 bp, Arabidopsis thaliana columbia
aatcatccagaattttgctacacacctaaccatagtgtcagtcaaaatcgttaatgcatataaaacaaatggtataaaattaaaaatcacttaatctctatgaaaatgaaagagaacatatacatgcttcacaaaatgggatggagagaagaaaattaaggaaaagaacaagaaaatgaaagaaattaccagtcacgcggcttgcagctgctttaaaaaggtgtgcagcctacgaaagcaaacagcattgataagacaccactaagacgtttatttaagtaaaacttactagcgaggcttatatactcttattgcttgggcgtgcgctctcatcttcctcagcatctgtttcttatcttcttccctttttaagtccagcgtatatcgaaatcgacgagaagcattaagaacaagcgcacttgcgtacaaaacccaaattattttccagaatgttaaggaaaagaacgtcagaactatctggctgcggaaaattgcaaaattacatcgattacatgaaactaaaaccagataaaacaattactaagttcaattcaagaatacaaacaaaacaaaaataaaagcattatgcagtcaatgaaatgtcaattcgaacccaaataagaactgcaatacaagcaattaccctccaacggcgtagcatccactggagcattcttagtactggcaatgtcaaacggactatcttcatattcggtgaagctgctggttccagcctccacgtccttgtcttcccctcgtggagaattattgaattgtccactcatgactgtcgcaggagagatagcaacacgctcttctttaagctaaacacatacaaaagagaacaaaaaacgcatcccaatcagaaacagtacatagccttgagcattctcttcttcgtctctaaaaccaatctcag

SEQ ID NO: 15157 - DNA, 1374 bp, Arabidopsis thaliana
cccataactttttcttacatttttaaaatatcctacaattatctaactaaacacccaaaaatatttttaccgttttatgttatcaacttatcatcgtgtccgacaaaaaaaaaaaaacttatcatcgtgctcctttacatttttcgtgacctaaaactgctacgacatcgttttagtgacttacttgctaaaaccctttttaactttctttcaagctaaagacctgcacaaactctctctcgaattcttatgtttcgaagccatggaaactgaatctgatgacgccaccattaccgtcgtcaaagacatgagagttcgattagagaatcgaattcgaacccaacacgacgctcacttagatctcctttcctcactccaatccattgttcccgatatagtcccatctctcgatctctcactcaaactcatctcttctttcacgaatcgacctttcgtagctacaccaccattaccagaacccaaagttgagaagaagcatcatccgattgttaaattaggaacccaactgcaacaattacatgggcatgattcaaaatcgatgcttgttgattcgaatcagagagatgctgaagctgatgggtctagtgggagtcctatggcgcttgttagagctatggttgctgagtgtttgcttcaacgtgtaccgttttctcctacggattcttctactgtgcttaggaagcttgagaatgaccagaatgctagaccggcggagaaggcggcgttacgagatttaggcggtgaatgtggaccgattcttgcggtggagaccgcacttaaatcgatggcggaagagaatggttctgtggaattggaagagtttgaggttagtgggaagcctaggatcatggttttagctatagatagaactagattgcttaaagagttaccagagagtttccaagggaataacgaatcgaatcgggttgtcgaaacgcctaattcaattgagaatgctactgtttctggtggcgggtttggtgtttccgggtcgggtaatttcccgagacctgagatgtggggaggtgatcctaatatggggtttaggccaatgatgaatgcaccaagaggaatgcaaatgatgggaatgcatcatccaatggggataatgggtagaccaccaccatttcctttgcctttgccgttgcctgtaccgtcgaatcagaagcttagaagtgaggaagaggatttgaaagatgttgaggctcttttgagtaagaagtcttttaaggagaagcaacagtctaggacaggtgaggagttgcttgatctgattcaccgtccaaccgctaaagaagccgctactgctgctaaggtgaactcagttaactatagtctttagttaaatacatg

SEQ ID NO: 15158 - DNA, 589 bp, Arabidopsis thaliana
agtaacgaccgccagtgtgctctaaagctaatcgagccgtatacactcagcacagcttccgacatgacctcactgttacctgtccgccctcgctcagtccggccaactgcccccgtaactatcagcgacgaccacgaaagctccgacgcttcgactatcccttctccttccaccacaaccagctccaggagcttctccaacccatcgacgacgccagatcagaagagaatcaagatgcagcggaaacaatcgtctccattggctccggcctttatggtgtccgccccgggaaaggttattgtgtacggcgagcatgccgtcgtgcacggcaaggccgcaattggccgcagccatctctctccgctcatatctccttgtcaccactctcagcaagtcgcagcgcacgatcactctgaatttccgcgatacaaacttgaatcacacttgggatatcgatcaattgccctgggatcttttcaccacccgtcaaagaagaagtattactacgacctcgtcaccactcttgatcaggagctctacgatgcgattcagcccacgtcgaagatatttcccagatgccccgaggaga

SEQ ID NO: 15159 - DNA, 659 bp, Arabidopsis thaliana
gacgaccttgatcacaagctgcgagtaaacatcgtatccagattcaacgcctctatatacgccttctgcctcaccgtccattggctcgatccatacggatctttccaccccttgtaatcccaataatccacatgaaacaccaaaaccatcgtcggagatccagatccaccatcttcgccacggatctgagcgtcgaaatcacctcgacctagccgggacatcaacatctccgccgcgggcgatgttttacatccctgagacgagaatagctggacgagaacgggaccatctccggcgggaatttctgcggctacggcggcggaattgttaccaccagagataggtttagttgaagatttcttgaggccgaaacaggcgaaaagacggcgcgacattggataaaattgttgaccgtctcttcgcctcctcccgaagaaatcggatataagaaagaaggaatgatctggagaaaaacgaatcagaaaaaggtgttttcccgagaaaatttgagaatgtctttcagagagagatcttcaggaggaagaagattaacacgtcgagcggcaccgagagaaacgcggcaaagtgtctttacctttatactgtacttctttttttaataaggaaaatctcaaataaagtttttttttataaaatgg

SEQ ID NO: 15160 - DNA, 935 bp, Arabidopsis thaliana
tacagtaatatttttcttgttatatatgttcccatttgtagtgaagatcatatctggaacattgacttaaacaggagtttggtcttctcagttcagcacaagcacaatattctacatggtacacatctacgcctttaaaggttgcaaacgtagtccttaatccttcccctgcattttccttaaaacgtagtcctaaacgtagttcagaactgcacattgcaatgctgttgaacaaaagaaataccttaaaatttaactcattgaccaatgcaggcaggcagccatgcctaaatctggagcagaactaatataaccaccgggtaatgtcaaacttgcagcgaaggtcacagttgctattagtgttgcagacaagaagggtttaggtactgtaatgaaagtcgaagcattggataacgttagcttcctactctgtgagtcacgacacggcaagctattattaggttgggaagttgaggagattcgctcgttcttgctgtgtttgtgtgttttgttattggaccaaacacttcttctacagacttctcttgttgcttctttaaaaagtttatgtgctttgttcgatttagtttgggctaactatgttggcccaaaaacttttgcttctcatctttgaaaaccagttctcttaaatacggtttggtttttttttgtttttgtgtgtgttataaacctaatagttttcttttcttcctgatattcaatgagaaagttatccaaatgaaaattcgctatcaatgtggaatcacactggacataataaaagagaaaatagaccatttaaaagtaataatatataactagagaattcatctgttatatcgtcagaaaaagaaaaaaaaaatcggtaattgaagcaaagaacttcaaatagtgtttatatgtacaaaccaaaagtactgctctgtttttttttc

SEQ ID NO: 15161 - DNA, 754 bp, Arabidopsis thaliana
ttatctgttgcacgaaacggcatcgtttactaccaattatctttgcttcatttcctatccctttaaaacccttatcgtgttttttgtttcatgtaaaacccctctcgacattttgcgactcttcttctccttatcctctaaatctctcaccggtcaccgacgacgggaacttggtagttacaggaacaagaaatgtcctcgaagttccctctcggtgtacgcttcatcactcattctcttccttgtactcgtctcgcttccatgaattctggcgcccttatctattcatttcgttccgttcctgttctatccaaagcctttccttttaggttaaagtacattggattaggttcccgggtcaacttttcaacccgaccagagagatctcaacccgaattcgcgcggcgaagtggagctggaggagagattcgcgcgtccaagagcttgattgaggatgaggcagagcttagtgattgggtgagcgatttgaggactagttcgttgcgcgggaagttcacgagcgacgaagataacgcggatccagaggtggttcgtagaaacgtagacagggacaccagtaggggtccaaggagaggaagggaaggccaatctgataggttcggtggtgcgaaaaggggaaaggaaggtgaaatggataggtttgggagtccgaacaggaggagaaccagcggcgagcctgctgattcgttcgggaacaagcggttaggtgatcgagaaggttcaaggaacggtc

SEQ ID NO: 15162 - DNA, 837 bp, Arabidopsis thaliana
attttgacaaataatgtgaaggacgagttgatatcgggcggcaacatggctatacaaggcgacaaggaatcatctataccttagctacctcaaattcgaagccataagcgcttacgttgccgaattcagctgggatctcaagtacgctggtgcgcagatcctcatcaccaaggtacataacacatcaaaatttaacttctttttttcaaaaccaatttatgtattaaaatatatgtaaatgcatgcagttgatcttcgaaggccacaaaggacttgatctatacaaacaacaagccgatagttttgtatgctctaacctccctggcagtccttaccaccaagtcttcactaccccaggttttgcctccatgaaataacatatatacatatttgtaaaacttaatgtatacagtatgattgatcatatatagtgtgatcttcttgcttaaaggtggtatgattcacttgagggatggtgccaacagtcaatatgtcaccgccaccgccttcttgttctcggcctacgctgatatactacagaaacacaaccaaaagatctcttgcggtagccaccaattcgattcaacacacctcatggctttcgctaaaaaacaggtattatatatttttccataagaatgcaaaccaaacatacacaaaatatttgtgttccttatttttcacatatgagttatgaagttatatataatgtgttagatatatacctaatgtgttatcattatatgcatgttacagattgactacatactaggggataccgacaaggaagatcgtcatggttgggtcggacaacccacaaagaagctatacagagga

SEQ ID NO: 15163 - DNA, 925 bp, Arabidopsis thaliana
aaactcacaagattttggccacaatatagacttctcggtcaacaaaaatttgtatttgatcataaataaataaacaattatttcccacttgttgttatgcgttttgaccgacttctaaaaaaatcaacgttctagaatagataacgttttggtataaaatcagtctcttcttctagtgactcaaaacaaactgtaaagtttattaagaaataataatgaagacattagttgtgaaatgtttccttctattggctcttgtatgtagctgcagacacgagattcaatatggcaactctgcaacacaaattcaaacatctcagcaagcagccaagtctccaagaacatcgattctcttctcgcgacgcttgtctcaaagactccttcaaaaggtttcaagaccacaacttcttcaagttacaacaacaaagagaaagtgtatggacttgctcaatgtagaggagatatcagcaataccgattgctccacgtgtatccaagacgcggccaagaaaatccgtgaagtgtgtcagaaccaatccgactcaaggatcttgtacgatttctgcttcttacgttatagccaagagaatttcatagggaagcttgacacgggggctggtcttatatacttcaacgtcgctaacgtaaccgaaatcgaccccaaaaagttcgataatgagctcggggcactctttgacaaaattaggtctgaggctgttttacctaagaataaaggtttaggtaaaggtaagacaaaattgacaccttttgtgacactaaacggtttggtccaatgcacgagagacttaagcgaattggattgcgctcaatgctttgcaactgcggtcgggagcttcatgacaacttgccacaacaagaaaggttgtcgtgtattgtatagtagttgctatgtccggtacgagttt

SEQ ID NO: 15164 - DNA, 1277 bp, Arabidopsis thaliana
aataatttcttcattagtgttcaattatttcagacaccaatttttgtttttatctgtccaatttttttattttattttatgtttgcttttatacgtgaaagtgaaaactcttcatattttttagtttgttcaaataaaaaatcattttcataaatattgtacaaaatataaaacggaagaaagttcttcattaaacattaacacatcaaaatccctaagaaataagggaattaaggttaacactatcattttaagaaaactaggtgttgggcctttggcactaaatatcaagagaactatgggtctaatgttagctcgagtccagattacatggtctcagtctcatgcttttcttttttatttgtggcccaaggaaaaagtgattaaggaaattacttattagccaaatgacttgaggaaattactttaactgaatttaaaatggttacaaggtacatttgttcacgaactctatgttttcatttcaacaaaatcacaaatggttgttaactccaaatacacaccaaaaaatatgaaaagtgaagttttaccacctatacagaacacaaataactcattcacatctctaatgtcataaggaaatcaatacacaaaaaatagataagaaaaagaagaagaaaaatcatagaacaatggtgacacctctagcaccatgaacataagaaggatgagcagcttcttgatctctctcaaactgttgcacatgccttgtagcatcaaacttctctccatctccccaaagagcataagcttcttccccatgtgctgcgtcgtctccaatcccgagctcttcctcagccattctcaatgcgtatgaacaccctaatagcgagtagaatgatagtagtcgacaccacattccagacggcaatgaaggcagctccagccaactgtttcaaaagctgtttgccgccattgccaccgtagaaagctcctctggtcgctgggagaggaagtaccaaaacgcagagatcagggtgtgcaaacaaccctgtcattattccaccaagtaaaccagccacggcgtgtgtgtaaaacaccgctaatgtatcatccacctgtttatttcaacccaatcaaaatattacagttcaaatcattcgtttgttattactaataccttaattctacaattgaaacattttcgtttttctaataaggtaaaacatttttttgtgttttttgttggttatgaaattaaaatgggatttatgatctaaattaccttttgaaggagagcggatttcttgtgaatg

SEQ ID NO: 15165 - DNA, 612 bp, Arabidopsis thaliana
agtcatgattcaccagaggaaaaattcttctgtctcggaacaccaatcacacaacttctgaacaaaccgctattgtgcagggaagaatattactcaggtatgactcactcagcaagatttaagtgttctctaaggcttgctctttttactcatattcgaaatggatttgataaacttgagaatcagctttattcaaaggttctctaaaggagctgtgaaaccaactaaaggatgagaacagagaagaacttacgattggagaaggctgcgacacacgaagcagagcagcatcaaagagagcaccatcagcatccaggcaatatatgtcctatgagaaatttcagagagcaacaatgttcatatatatgctagagaactcagttaaatatcaaagagaaagatccctagaagaatagatgtgaatcaactgacggacaagcaccgatataagaccaacgagtactcaccagataacccatccaagcagcttttccactaactagacacagttctttaagatcaatcataccagaactagaacaaaaaagaaacacttttagaaggaacattgtatttgatgctcaatgagacagagaaaatataaagagaaag

SEQ ID NO: 15166 - DNA, 1117 bp, Arabidopsis thaliana
cttaaactccatttcatgtcgatcaatcgttgaattaccttccccatcttctctcacaaccagttcccaaccaactgagcttaagtaaaaccaaagaatttttcgttagcttcaacaatcttggaatctccggtagtcgtgaaagaagtaatgtagagtattattatacctggatttttactttctctgttggtttcttcagctgcagcagaatcataattgttaccggaatcaataccaggctgaatcagagcagttcgtcttcggatagaaacgtcgtactcttcatcatctccatcggaatacatggtttcatctttctcaattctatttccgcagaaaccttgctgggttctgaaatggcgatcgccgacggtttcgagctcccggatcttagtacctgaatctcccacacggaaacgcaaagattcatcttcaacgtggaatacgaaccgaggatcgatactgtcgttaacggacatttgcttttccgccggaaaattcagaaggcgatcgatagagactggaagagcacagagagagagtttaaaacgacgtcgtcgtaagtgggacatgagtagcacgcgcgtcgtgatggttaatgattatgaaaccgtatcatttacctataagcttttggtgggtccgatttacatggactcataaagtgatatcgccacgtagacataacatataggtttttatatttatctgaattaccttaaaaacaactaatatcaagaaccgggttacattcagaatttctcgaccacaattcgtttacggtttagagaacatacagtacaatgccattacagattctccattttgttctacattaaagagggatcaggtaaactcaaaaaaaccaaaactatagtgagtaggatcacagtgtagtaaccggtttagctgggcaaatgaaccaagtttcggtttgataaagatgtcctcatttcacagttcagtccctgaggggtttcattcccagtgatgctctcagtctattcatctctgcaatttcaggatttggatgatcggttccatcttccttcatcttctccttcttttctttctttttcttaggttcttcccgatcccgcacatcatcagtttc

SEQ ID NO: 15167 - DNA, 1444 bp, Arabidopsis thaliana
actgcagtggcttaacagttgtgtcggtcgtaaaaactatgtgacttttgtctctctgatgagtgccagtcttctctgggtatgtatttcacctcgtatgtgctatgtcttgtacttattttctcactgaaccactaacaggttatgctttctcccttcctcagctcattattgaagcagcagttggaattgcagttatagtgcgtgtatttgttaataagcagaccatggaaactgaaattgtcaatagacttggaaatagtttctctcgtgcacctttggcggcagttgttgtaagtattcctggtgttatgccattagtttgagtttagctcctgtcatcaaggttcctaatgccatacctacaaattgcgtagggtctttgcactgctgttgccattttcgcatgtttccactgggtgaacttctctttttccacatgcttctcattaaaaaggtcagtgggaaagaaactagttctgatattagttactctactcataacacggataattttcttactgtaagatatcatggtaagacttttaaaagatagaagtgacaatgctcatcatagtagtgaggttgaacttcggattatttttgtttaactacctattatctatcaattgtgaacttttcttaacactggcagggaattacactatatgagtatgttgtggcaatgagagccatgagcgaggcgccagatggagcatctgttgacgaggaaattcagaatgtgctctattctcccactgggtctgctacaaccggctttagtggtggaagctctctcggtttaccatacaggggggtctggtgcactccacctagagtgtttgataatcaggtatttttaccttttccgaagcatccaaccattcttgtatcgcatgcctaactcttgtgaaacactgaaactcactagtgttttggttgcaacagataggttatatacctcatatacatcatttgaaagtctagttatccataggatcaatctctaaatataaacttgaaagacaagggtttccacgaaatgcagttaatttttggcatacatgtattgcttaatctgagattatgctcaggtatcaacatgccatttttacactcattatctctatgtaggatgaagtcattcctcatttagacccttgcatggtcccgtcaaccgtagacccagatgcacctggatcagagaaaggcactaaggctctgaaaagacctgtaaaacgtaatgcatggaagcttgcaaagttggatccaaatgaagctgcaagggcagctgccagagccagagcgtcatcatctgtcctaagaccgatagataatcgccatttacctgataatgatcttagttccattggcacagttagtatcatcagtagtgtaagcacagatgcaaatgtggctgcaagtaaagagataaggaacaatg

SEQ ID NO: 15168 - DNA, 1795 bp, Arabidopsis thaliana
ccgacccgagtccataaacgtacggagccaacctatgtggttaggatagaacaccaatagatccagtcggtgcagtgtaagcccataactctcctccatattcagcttctccggcgtaactcctccagctaattcccaatcaaatccttgaaccaacgtcgccgtaagaaactgaatcgtacgtaaccctaaacttaaaccggcacagattctcctcccagctccgaacggtattagctcgaaatcgcttcctttcacatcaacgccggatttttcaccaccgggtaagaatctctcgggtttaaatgctaacgggtcggaccattgatccgggtcacgggctatggcccatatgttcgtcaatagagtcgatcctttcgggatatggtagccgttgatctcacagctctctgacgcgatgtgtggtaacgagagtggtgttggtggatgaagcctgaaattctctttgataaccgcctgttttaaaccaaaaccggattaacaacaatagctcgctaaccaaaacaattccaaattccggtttgggttaacggtacctgaaggtaaggaagctgagcgatgtctgattcattaacaggcctgtcacggcccacaacaatatcaagttcttcttgggctttaaccattatatccgggtgacggataagttcagctatagcccagtccaccgtacttgctgacgtgtcagttccagctgtgaacatgttctgtatttacaaccaaaaaaaacaatctaactttcattatatacgatttttaaggaaattaattgtcaaaaaactgaccaatagcaaggctttaatctcagtatccgttaagcttcctccgtcaccgtcaagatcagttcctttaagggagattaaagtgctaagcatatctgtatgcttttgatcttgaccgttcatttcgtgctctttcaaaatcgacgatagaaaagcgtcgaatctcttgtgaagccgtttcattttaccagcgacgccttgtaaatctaaccaatcaagtgacggcacgaagtctccgatgttgaatactccggcgagagcatcatttccgtcaccattgatcgaaactcgtcagctttatgatcggcgtcggcgcgaacaatcgccgtccgatcatctctcgtcctagagcgttgactacacacatgttcaccaactggcctaaattcacggttttcgtgccaacacgcactagctcccgcgttagtctccaacctcttcctgtaaaatttattttattctgtttttagaataaaagttttcttgaatactaattaagtattttcgtccaacataatcacaattaatacgaaaaaattatgattatgatctaaaagctctatcaaattttaaaacacggttaacaaaaccatatatttctttttaaaaatttactctaattaaattaaaccaaaaaaaataattagaaaataaaatctataatagcatatattatcagtagtctgaaattgagaaactcgtgagaccttccatttaaggaaacaatgtggtccatacattttataattcaagcaatatttcctctggatctgaactttccaatttttcaaggcatcatcaaagttagatcatacttttatacatccacgacaatgacagtattgcatatttgcacttatacctagctcttatgtaaattcatttgagtaaaacccaatcgtttatatatttttaatatataaatgcactttaagaaaaccaactttaacataaaatttatgtgcagatcctaatatcattacaaaagtcaa

SEQ ID NO: 15169 - DNA, 589 bp, Arabidopsis thaliana
aacgatccccctatctagaaaacagaaacagagcaagagagatgattacataagtgttaagctgtctgacgaagctggagaaattgttgtgtttgaaattccttggaagtatgattctggcaaactctagaggatcccaaactacgaagctagctccggtcagtccccaagagatgaccgggtcaagagtcgggtcatcaaccaaatcaaaagtcttggataaaaaaggtggaattggattcccttgtaagatgtctagtggcatgggaagtggtgacccagagaaacccatgtcagtgtcgacgtagagagacccgggtatatcggatcgtctcgaaacgggtactgaaattggagttggtttagaaacagcatctttttttgggctcatttgatatagtagaaaatttatgggttttagtgagagagagagtgagaaattggggtgtgtgtgataattagggggtttaagagaagaaggatgagaggtttaatggtttataaaggtttagggaaggaagtaaccgacaaactgtagtcagataattgaaaaaaatctggggaatagagaggctgtggaaatgggtgg

SEQ ID NO: 15170 - DNA, 568 bp, Arabidopsis thaliana
tgagcatcatatggctctttttattacatcgaaatcgttgtcttaacagagacaggtattataacatcatgaacaccatcagtccatgttaagcttccaaagaaatagccactgttgactttatgactcgttttagccttaaccgagaaagtgagtactctctttgctgcagagttaaacaccagagtggttgggttcacggtgagagttataccgagaggagactcgattacagctttataaactgacttgatgggtccaacattggttacagttcttgtaagtgtgacttctttctcaagatttggaattgtgattgaaggtaagttgatatcaagaattgatggcttgggaattgtgcatttagtctttttaccaagcacacgagagattgaagagtcgatgtaacccgcggaacacatataattgatgtaatctttgatcccatatcgtagacaagaccaggttgagcagctttatcagggtttacaagtcctcctccatagtcaaatggatctgcaagcttcttgtttgatcgttgagcaaaaatgggttctctggatggact

SEQ ID NO: 15171 - DNA, 651 bp, Arabidopsis thaliana
ccatgttaagcttccaaagaagtagccagtgttgactttgtgacttgttttagccttaaccgagaaagtgagtactctcttagctgcagacttaaacacgagtgtggttgggttcacggtgagagttataccgagaggagactcgatcacagctctatagactgacttgatgggtccaacattggttacagttcttgtgagtgtgacttctttctcaagatttggaattgtgattgaaggtaagttgatatcaagcattgatggcttaggaattgggcaattagtctttttaccgagcacacgagagattgaagagtcgttgtaacccgcagaacacatatacttgatgtaatccacaatccccatatcgtagacaagtcctggtttagcagctttttcagggtttacaagtcctcctccatagtcaaatggatctgcaagcttcttgtttgatccttcagcaaagattggttctccagatggacttgtctccaagctacaaaagaaacagatgatagtctgtaacggtttgtttatggaaaagaagaataagaagaagcaggaacctgttgtgccaaagctgatccactgcagcaggagccacttagggtgaagagatttaggagactattattcagaaacacaggagtt

SEQ ID NO: 15172 - DNA, 886 bp, Arabidopsis thaliana
accgtgatagctaagccttttaagactttcactatggattgtaagaaggagtgtattgcttattgttaagatataattaagatcacatcttgattcttgatcttaataatatatagtcattatgatgattatatatttgctatgttatgttatagctatagattatgagatcatgaggatccttttgtctcgattcggttttagtagtttttattatatggataatatatggttgtgatgaatagatgaggaaagattactgttatctctatttgtatgtttgtgtaagagactctaagtttgtgatttgatattttatcatgatgatgatcttgaatcttgatttgacactttgaacttagagttgcaagagtagttacataagaacaaacacaatgagcatcatatatatggctctttttattacatcgaaatcgttgtcttcactgagacagggattgtaacatcatgaacaccatcagtccatgttaagcttccaaagaagtagccactgttgactttatgactcgttttagccttaaccgagaaagtgagtactctctttgctgcagacttaaacacgagtatggtcgggttcacggtgagagttatacccagaggagactcgatcacggctctatagactgacttgatgggtccaacattggttacagttcttgtgagtgtgacttctttctcaagatttggaattgtgattgaaggtaagttgatatcaagcattgatggcttaggaattgggcatttagtctttttaccgagcacacgagagattgaggagtcgttgtaacccgcagaacacatataattgatgtaatctttgatcccatatcgtagacaagtcctggtttagcagctttttcagggt

SEQ ID NO: 15173 - DNA, 639 bp, Arabidopsis thaliana
tgctgcactctttgggacaaatatatagaatatcttttgggtcagcagcaatggagttcactggctaatgtatatctccggaccttgaaatatccatccaaaaagttggatctctattacaaaaagtatgtccttttacatattttctgtaatgactactacaatgttccagtacttcgagttcatgtagcttaagtttgtctttctccattacattatacttgtcctgtactttcttcagcttcaggaagattgcagcttctttgaaagagaagattaaatgtagaatagatgttaacggagacctttcttcagaccccatggaagaagatttggtccatacacgtcacactgatgaggagatctctattgttgtaagagaattgatgggtccttcctctagctcagctgtgtcaaaagcactgcatacatatttgtcaattggagaacagttctatcaagactcacggcagttgatggagaaaataagctgctttgagacacaaatccgcaggccttattttcatgtaaaaccattggatactaatcagctcgacaattggcatgcatatttgagcttcggtgaacatatggggcctttgactgggtaagaggtattcatttgttactgattaagtt

SEQ ID NO: 15174 - DNA, 844 bp, Arabidopsis thaliana
tactcgtgctttgcttagaagagctagagcttttgaagctgttggcaagtttgatttagctgttcaggatgttaatgttttgttgggttctgatcctaatcataaggatgctggtgagatttcgaagcggttaaaaactgctttgggtcctcaccaagatttgcagagccgtccttcacctgcagctcttggtgcttcggctgctttaggcggtcctattgctggacttggtccttgtttgccttctcgtaatgttcataaaaagggagttacttcgcctgttgggtctgtttcgttgcctaatgctagtaatggtaaggttgagaggccacaggtggtgaatcctgtgactgaaaatggtggttcggtgagtaagggacaggcgtcgagagttgtgttgaagccggttagtcattcgccaaaagggtcgaaggttgaggagttgggttcttcttctgtggcggttgttgggaaggttcaagagaagaggattcggtggaggccgttgaagtttgtttatgaccatgacataaggttgggtcagatgcctgtgaactgtaggtttaaggaattgagagagattgtgagcagtcgtttcccgtcttcaaaggcggttttgattaagtacaaggacaatgacggagatttggtgactataacttctactgcagagctgaaattggcggaatctgctgctgattgtattttgacgaaagagcctgatactgataagtctgattctgttgggatgttgagattgcatgttgttgatgtgagtcctgacaagagccgatgttgctcgaggaagaagaggaggaagtggaagagaagctgttatagaaga

SEQ ID NO: 15175 - DNA, 1020 bp, Arabidopsis thaliana
ctaaagcgaaagagctgttcgaaggccgtgaccgtgaaaccggcgaagtgaaatttacggccagccgtgcggatctggtgtttggttctaactccgtcctgcgtgcggtggcggaagtttacgccagtagcgatgcccacgagaagtttgttaaagacttcgtggcggcatgggtgaaagtgatgaacctcgaccgtttcgacctgctgtaatctgaccccgttcagcggctgcttgctggcagtcgctgaacgttctttaccagcgtatagtgggcgaacgaaaactacacactggatctctcatgtctgccgcaggaaagagcaacccactggcaatcagtggcctggttgtgctcacacttatctggagttatagctggattttcatgaagcaagtcaccagttacatcggtgccttcgactttaccgccttacgctgcattttcggcgctctcgttttattcatcgtccttttattacgtggtcgcggaatgcgcccgacaccgtttaaatacaccttagccattgccctgttacaaacctgcgggatggttggtctggcgcagtggggcgttggtcagcggaggtgcggggaaggtggcgatcctgagctataccatgccgttctgggtggtgattttcgccgcgttgtttctcggtgaacgcctgcgacgtgggcaatatttcgcgattctgattgccgctttcggcttatttttggtgttgcagccgtggcaactcgatttctcttcgatgaaaagtgccatgctggcaatcctctccggcgtcagttggggggcgagcgcgattgttgctaaacgtctgtatgcccgtcatccgcgcgtggatttattgtcgttaacatcctggcagatgctgtatgcggcgctggtgatgagtgtggtcgctttactggtgccgcaacgtgaaattgactggcagcccacgtgttctgggcgctggctacagtgcgattctggcgacgcactggcgtggagcttatggttgtttgtattga

SEQ ID NO: 15176 - DNA, 593 bp, Arabidopsis thaliana
tcaacggaaaatgttcataagagactacttcaaaatcaatcacataagttccatgatattggaaagaatctacaaaaatgcttagagagaaagcaacttacctcttgagcaagggccactcatccatgtgcaaaaactggattagcctatcagttaaactcatagcaccccgaaggccaccccaaagcagagcaagttttccaactaaactcaatatgccacccctctgacccaagtctgccaacattgccacaatcctgttcacatgaaaaccaagggatttcagattaaaaagaatcttagggcactgatagataagaattgacttattcactatgaatacctatcctgatccacttcaccagtttcctttgtcggaacagcaggaccagctatggacatagctttctcagcaaaacttcccaccatactactctgatcaagttgtccagattctttctgttgactatctttatccgatgattttgacatgatgccacctctttgtggatcctgtgcaggaagcactgattacaaggacgaacatatttgtatgctcttttgattatacattcatatgaatgctaatggtt

SEQ ID NO: 15177 - DNA, 862 bp, Arabidopsis thaliana columbia
agtccataagggttactaaaagccacagtaaaccaaccttaaggtgaatgagtcaaggcacaactccgatcttattggactagttgcatgaaggtgaaagtaggataggatccgatctagaactcaccgagagtcgaacaacggcaaatcgcagtctagaaggtgaccttgaagaaagctgagatagtttgttgcatgaactaatgtcacatctagcaatgtgttgaagaatgagattaaatctttctccatatttccacattcaacagcttcaccaaatattactttgctcttataatcagataaatatataattatcattaacggttctagaataaacatagatagatagcaaacaaaactttcactaagagatcaaagtaaaagccaaaagaaaagagaaacaatggaacctaggagttagcttaataatctcaaaagctggattcctatggggcactaatacaaggagttataagtataacaagtagctaggatagacaaaacacagatgatcaaagaaggaagcagagtaacattcaaaagcatactctgtcccaagaaaccagccaaagtgatcgtcgcatccgctatcacacgtgcaatcgtgccagcttccgtcgacagtaaccctccgttataagtcccgcgggacagcctcgatgacatcactctcgatagtaacgataagttcacacctacaaaatccccgccacaaaaaacaatgttttcaaatgataaagagggaatgtttcaagcttttaccttaaagagcgtagaagatcatcaatcattttttccttcaagacttcagcaggacaaacatgatagacgtgagatacgtattgtggggcagtgtagg

SEQ ID NO: 15178 - DNA, 610 bp, Arabidopsis thaliana columbia
tttcttttcccacgacgcgtttccgtcgttttcgaattttatcgatataaaggaatctgaacaaaacatgaaacttttcaaatttatcataattgatcttgtacaataattaagatattatattaagataaactacattattttaccaactataaagatatagttagccgtatagcacacaactcattatatcaagtagaaacaaaattttcagctggctgtttaaaataatattttattcactcatttttgaatataaaaatatataaaattattgtgtatatgaatgtgtctatatgatccttatttgataaatggctttctattaaaaaattatgaacatatatatcattgaaaatagtgttaaatcccacacacacatattgtgtgggagaggagtttataatcttaatcggaaaaaagaaaatcccgtttgtcaagggaaacagataaaagaggaaaattaccaattagaattagatcttgggtatgtgtataattaaagtgatattcataaaaatactgtaccttcttggcttgtggagacgtcaagatcggaggagggatggaatttccggtgacggagatcgaggcgactgaggagagagct

SEQ ID NO: 15179 - DNA, 1493 bp, Arabidopsis thaliana
catgtagggttgaaccattcctcctggttgtagatggagataagcaagtacctgaggcagcattcaagaacaattgctgggaagtcacagcttttcatcaactcttatgcgaaggctctagaggtacacttcctggttggcttggctgttttaacttttgtacctcttaatttcacatataaataaaagctttctaattgtgttctgtgttattcggcacctatagaaaagacatatttcctgttcgcttgttgttgtgtacaataggagttagtaaacaaccaaggagggtctcaatatctttggccaggatctgaaaattgttggttcacctttgatacacaaaaatctgaattcacactgtttatggtggtactacaggttattccacgacagttatgtgataatgctggatttgatgcaactgacgtcttgaataaacttagacaaaaacacgccatgcaaagcggtgagccttctctcacagtcacaagcttgatgtattcatcttttgatgagagctgcttaatctcattcatgatatctttgttataacaggtgaaggagcttcgtatggagtggacattaacactggtggcatagcagatctcttttgctaacttcgtttgggaaccagcagttgtgaaggtatttcaagattctataaaattccactcttttttcgttcttgggactattgtgccagttatgaatatgtctatcttgtgtggatatctttcattgaaaagtttattgatagtatgattccctttgttctggtagatcaacgcaataaatgctgcgactgaagcggcttgcctcattcttagtgtcgacgaaaccgtgaagaaccctaaagtaaataacacatgctctcattttcttttgtatgttttgacaatgtatatgtattgtattgataattgttgtctattgcagtctgagagcgcacagggagacgccgcaggtgcaatggggagaggacgcggtggaggtcgtggccgtggaatgcgaaggcgataagctccgtctctaatgccaaacttgtgggattcttcttcttcttctctaatttcgattttgttgaatttttgttttgaagttaaaaaacctattattgggtttgtgtttgttcaattagaatactggttgggtatgtatgtctatacaatctgtgaaacataagttttagtgttgttttggttaaggagtttatatttgcttaatcaaatcttgacaagaatgaatcactgtaacaacttcagatgtgttgtagatgcaactctaactatatgcatcatcatcttgatctaatagctcgattgaggattgatcgatcctcatcaaaaaaaatgcatacacttgaatatttcgatatctatgtgtttgagtatgaaaaaagttcgatgctaagtatgcgttgtgtgtgcagcagattatttacttagatctttgccctttgggtgagatgcttagcagcttagtgagaagag

SEQ ID NO: 15180 - DNA, 497 bp, Arabidopsis thaliana
ggtatcagtggctccaataaaaatctcctgcagtgaaaagaacaacatgtctttagtatggatcctcaaatgaaaatagacataattaacgaggaacatttaccacgaaaaatgacttgatatgattcctagtgatgttatactctgcgttttcatctccagaagctgccaacaacacatccatcatatcagtaccttgatgctcctcgtgtagtttctcttcgtgttccacaagaattctctctagcagctcatctaatctgtcagaaacagccattatctccttctcgaatagtgagatccgaagcttctttagcggcttggcaataaagatgccaggaacatcttcttggtcaaggcataagattcacccactaatcccctgattttctcttgctcaccgttctcctctgaaaaacttcttcccatgctcatcctgcacaaggtgttgttcaaagcttcattgcttcagtactgatctcaacgctctcagtcat

SEQ ID NO: 15181 - DNA, 541 bp, Arabidopsis thaliana
tcccccattacctacactgtgagtcaccttagcaggatttgaactctgaatacttaagttcatgatattatcaatctaatcaagactcacgagtgtcatctttgacctcagttaataatattaagaaaacaagattctagctgtccactatttcacgttcttccagagagaaaacgctttttaaagattaataataaagcatgataagtcatagactatgactcatagtttatattaactgattcttgattatgtttcagctccctcttcactttaagcaacaatggcagcaattctcagcgttgactttcagaactgtttcatcttcatcgtcctatgcctcttctcactcttctgttactctctcttcttcaagaaaccaaagcacccgcgaggctgtgatcttcctcctagccctccttctcttccaatcatcggtcatcttcaccttctcttctctcctctaacccacaagtctcttcagaaactctcctctaagtatggacatctactccatctacggatctttaatgtccagtca

SEQ ID NO: 15182 - DNA, 761 bp, Arabidopsis thaliana columbia
tacaaatttccacttcagcatcgatctacagcagttcaagactatctttccattgtgaatggaagcaacctgcttactttgatccaaacgctattattgaagatgtcctcgaacggataagcaatgaagattcaatgttcatggcttggttgactttgaataggaataatgatgttggaaaaaatggtaaacgtgctagagaacttctatattctcaaatcctttcctattttacttgggatggaaagaataagtagtgggtttagaaaagtagaggattttctttgggacgtattaactacggggctaggaaaatggaagatgaatactatcttcaagtgcttcttaacatagtcagaggtcctatgagttgtgaagacatcaaaacatttaatggtgtcttatatccatcattcaaagaagcatgttttgcaagaggaattttggatgatgatcaagttaatatagatggtctacttgaagccagtgagttctgttttgaagattacttgagaattttttttgctatgttgcttctatcagactctctagcaagattgaagtatgtatggtcagaaacataacaccttttggcagaggatattgagaacaagaaaagagaagaatataagaatccaggtattctagttttaaaaagaaatctgaatcattgcacttaatagtaaatcgtcttcattatttcgttttttcaaaatctaacaatgcttatcaatttcatttttgatgacacgtgcagaact

SEQ ID NO: 15183 - DNA, 772 bp, Arabidopsis thaliana
atctcataaccaggaaacttagaatctaccggcgacacaagatcgaaccagaggcatactggtccagctagtccccggaatagcgaataatcatgttctgtttcttggcttgtcatattcacgagctctatcgcatcacggcacaagtaactcgcaaacgcttttgctctctcttcatatacaacatctccggttaagcgataaagggataagaaagcgtaggcattaccagcaactccatcagctaaacctaccttcttcaccaagccactcttccacactacttctcctgcttcaatggctgcttcgcggaaatccctttccttgggaaacacctgagatgctttagccaaagtaatggccatgccggttgctccatgagcccattggactagcttatccctcggattcccttcgctgcacgggtagtttccgctgttcggaaacctattactcatcatatacctcaatgtcccttgaacatctttaacatcctcttccgatagtggaaaatgcagcaatacatacaagattccagctaatccattcgcagcaccccaaaatcgcgttccgtgaaacctaaaagccacaaaagtaagatcaattcctactaaagataaacaggattctcttttaacaaactatagctattttgtgaaacctgtataacagaggacaagcttcatgatctgcagctccaactcgcccaccggctaagatggctgcaacaatgggtgataagagatggtcaggaacagttccttggccgagt

SEQ ID NO: 15184 - DNA, 766 bp, Arabidopsis thaliana
aactcaagacaagggatataatctttctcgcaagcagttatatcctttagtgtcctacatgttttcaaaaactgttctgatgaaaacaaataaacttatactacaccttcaagttgagcaccaagcccttccaatacatctggattagcgcgtacaacagacagcgcaacatcgagagcagattgtaacaaaattgtcacttctttttgaacaagatcaactagtttcccctgtgtattaacatggaaggttaacttttgcatggacaattggaaattataagacaacctaggcaagtgcattgcaacatgaagttacctgatctcttccccatggcgagcctccagaatcgtcaatcccaccaccagaaagtgtagccacagacacaggtccgattttttggttaagaccgtattcagctactgccttgtatgccatatcagttgcccgccttatatcatcaaatgcacctgttgatatacgccctgagtaaacaacttcttcagctgcacgacctccaagaagggtaactaaacgcccaagcagctcatcaatgaagagtaaatatctgtcttcactagtaggaggaatgtatgtaaatcccaatgcccctcctgttcttggcaatatgcttaatttctgacaacaccacaaagatgagcaaaacttgaatcatttgcacgtactaaacaacataaacaatgagcgtaaatgtagacaaagtttttgcattttcctcaacacgtggctgtccagtaagaagatt

SEQ ID NO: 15185 - DNA, 610 bp, Arabidopsis thaliana
agtgtgctctaaaggaattaaaagcgtacctggcaacacagggcgtggagatcaggatatgttaacagaacaacaacgtcgcgaactggactgggaaaaaaccgacggacttatgccggtgattgtgcaacacgcggtatccggcgaagtgctaatgctgggctatatgaacccggaagccttagacaaaaccctcgaaagcggcaaagtcaccttcttctcgcgcactaaacagcgactgtggaccaaaggcgaaacgtcgggcaatttcctcaacgtagtgagtattgccccggactgcgacaacgacacgttactggtgctggcgaatcccatcggcccgacctgccacaaaggcaccagcagttgcttcggcgacaccgctcaccagtggctgttcctgtatcaactggaacaactgctcgccgagcgcaaatctgccgatccggaaacctcctacaccgccaaactgtatgccagcggaccaaacgcattgcgcagaaagtgggtgaagaaggcgtggaaaccgcgctggcagcaacggtacatgaccgctttgagctgaccaacgaggcgtctgatttgatgtacacctgctggtgttgtgcag

SEQ ID NO: 15186 - DNA, 986 bp, Arabidopsis thaliana columbia
gtggatgctgcagcaaaggtcccaatcccagatcatcaaaacaaccaacaaactcgttttggcatattgccacttccaaatcatgcaatgtcacgattcctctagcgccaatgaagcagtgaataaatgcaatgatctacaagattcaaaggttttaagtaaaaggaatcaactttgcaatagataggctctgtttcatttgcaatatagaaaattttaagctttaccttgccttcaagggccatgagttggcgaacggaaggaacatcttgcatccatatccccaaggaacgccaagtgtcagcctgaagttgtgctaaaaccgattgcgaaactctagtcgaagatacgttgtctccagcagcaattaatgatttacgcgtattgtttacggccttatcaattcgaataagttctacattagcgccgccgccaaattgtggatgagggaaattgagattctgctgcgtctggaaattgtatctgatgggttgttgttgtttgacaatgtaattgtgaaatacaggagtcgtttgaggaagataccctccgtttccattgccgcttccacctgtacgcggaggcgcgtagtgaccacgagccgtcgcgattcccttgcattggtcggcgcaaaaacgaggaaaataaaaagctatcggagaagtaaagagggaagggttttaacttttaatagaagggctggtgtctctctagctcattcggagggttagggtttaaggtgaaacgtaccgtttttgatttagcatctgtaaatatataattttcataatattgtaattgatagatgaaaatataatttggatgtctaaaagtaattttttgaatatacagtcattgtatcggtcaacaaaaggaaacattttttttctttaattataccaaaatgaagtttaattacaaaaagaaaaatttaatttgaattgtagtactattgtattggtgagttgttcaaacccggtttcaca

SEQ ID NO: 15187 - DNA, 517 bp, Arabidopsis thaliana
taatcgaagtagcaaaatcaggcctaaggggaaaactatgaaaccccaaaggtaacaaaaaagcatggtttgctaattcatctgcgagacgattagcttccctatacacatgagtaattcggacaatctagtccttcgaaatgaagccataacataaacgtactaggaaagacagagaatgcgaatcgctaatccatgttttaagaaaacccaccaccatatctgaatccacttccagctacacccgcgtaccgtttttctcccaagctatgaaaagcccgtaatacacacctcataacttaactaaaggagccgaacaaactccgagattcccgcaaaaccaccacaccaaataccctcattatcccgtaaaacaccaccagctattgctaaacccggatttccacgtgatgcgccatccgtgtttaacttcagccaaccatctcctggcggaactcatgctatttgtctctccaccctagttacattacctcgattactcccaagcagcgagtga

SEQ ID NO: 15188 - DNA, 461 bp, Arabidopsis thaliana
ccttccatcatcttgagccacctcacctgacccaaataggtgacatcgatatcagcacatggcttcatcgggagaaactcaagagatatcaacattaaatcagaattgtaaagtgcccagttgtgaagtgttctgcaaggtaggttcctcgcatcaaccgcatagcccgcattaaagagtacaagttcatctgtttcatctttggtgtttttatagtaagatgggagaggataatcatgggcaatctcatcttcatttatcttaatgtagaacttatttggagcagaagttgttgaacttctcttatttctcgaccgatccatagatttcatatgttcttcctcttgcagtagtttagcatattttaggtcctcgtcctcaccaccatccattagttgatcagatgtcaagaccttgctctcatcaatcctcagagcaacattggagaaagccttgtgaat

SEQ ID NO: 15189 - DNA, 486 bp, Arabidopsis thaliana
ggtatgtcccttgtatctacctcatagccaggttcaaagagtaaaagctcatctgtttcttctttggtgttcttgtagtaagacgggagtggataatcattggcaatctcgtgttcattgatcttaatgtaaaacttattcgaagcagaagttgttgaacttctcttatttctcgaccgctccatagatatccgatactcttcttcttggattaacttagcatatcttacatcctcggcctcagcaccatccactaaatgatcagatttcacgagctggctctcatcaatcctcagagccacattagacaaagccttgtggattttactactttcatgatctcttagagaaacaagaacagaattttcaacaaagcatgtttcatgattcttggctgtctcatccagaccagcgagttggttatatatgaattctccttgggatataacaaactcttggatggctccacgctagaaaatatcttgc

SEQ ID NO: 15190 - DNA, 651 bp, Arabidopsis thaliana
acttctgttcccattctatactcggacagtacagcagccgtatacattgccatcaaccctgtctttcatgagcgcaccaagcatatcgaaatcgactgccacacggttcgagacaagcttgataatggtcagctgaagcttctacatgtcaaaacagaagaccaggtagctgacattcttaccaaacctctattccctcaccagttcactcatttactgtccaagatgagtctacacaacatctatgcctcatcttgagggggactattggagtacataggccggtttagattaattatatttgttcggtttagtattggttagatcttataccacacttgtatataacagagtaattgtacagtgtaattattaagatgaatgagaactttctctttccgtaacaaactctctcgatcttcatcttcttcatcgatccttttctatctttgtaatacagcaaccaaaaattgtttattttcccgtcgttggttcagcgacaaattgcagcgaaagttgacagcgaccagcgactgtaattttcattcgctaaattttagtgatcaatagcatgtttttgcgattagtcgctaagattggtcgttgaatccatcgataagcaaacgaacaacttagtgataaaaaatataa

SEQ ID NO: 15191 - DNA, 1328 bp, Arabidopsis thaliana
tccctgggtttctcctgaatttatgatgcagttgggtaatggatatgcccgcatttagaatggtcggtgagtggagatgccaataagaaaaatggacatttgaaccaaaggaagacatgtttggtcgctgtgtacgtgttaaggcaaacaggacgtacacagaatttgtacgtacactaagcgaggctttcagtttgaaatccatagagatcaatcccataattagttactggatgccgggagagatgttagtgctgatagatactaaacgccctcctgtctacattgacagtcaagtggggttggatacgttctttttaattcgtggtcggtatccttctctcaatttgtttgtctctttcattacaaccgtcaagacacccgataataatgtctctaggactcatggtgatgatgctgaaagtgaccgtgtatgtgatagtgtttcaaatgttgatgaaaataatgaggccgtagatgagaaagacgacgatgaagacgataaaacaaatgaggatgaagaggagggggacaacaaagatggtggtgggtatgatgattatcagggtgacgatggatctatagggggaagtaccctcgatcctactattgatggtagtgaaagtagtggcgaagattatgattacaacaagtggaacgatgtaattgtagaagaatatggaatagggaatgttgacgagaacgtcattctcacaccaggggaattcagtcgtctgttggcagagtgtacgtacacaagtcagcgtgtacctggcggagataacatttctcactcgggtgaccgtacaccagttgtgactcgaagaagtatgtgtcaacatggtttgtaccaatgtacctacactatagattgggaagtgtttttaagaacagaaaaatcatacaacaaacaatgtcttatctcagccactgccaatattggtttaatattgtattaataaatttttcttaataatttcattcacaaacaaagatgtacgtatattattacacatgtacatacattaatttaccaacaaaaatgtacgtacattatttcaccatctatttttatttaattattatgtatgtattgagattattgagatataagaatacgtaataaaatagtttgaattattagaaatcgtctcatatatgttccataaataatttcgtgtacgtacacagaaaaaattcgatgaagggtataattgtaattttccagtcatcttcaacctgtgtatccttttctgcaaacctaattttgcggccgtctttatcagttttctcaaaatctcatttttttacgttttgattactattta

SEQ ID NO: 15192 - DNA, 501 bp, Arabidopsis thaliana
ctaaaggcgtatcggagcggtgatgtatcgctggttcctgcgccatttcccacgcggcggtagttatgccgatattcatcatgcactgattgaggaaggatatacggactgggcggagagtctggttgagtatgcgtggaaaaaatggctggcggatgaaaacttcgcgcatcaggaagtttcctctatgcaaaaactggccacagaccccggagagagaccattttgcagtcagtttgcccgcagcgacgatcatgctcgcatcggctgttgtgaggataacgccagaatcgcaaccgctgggtatgccgcgcaaattgccagtatgggttatagcgtgcggattggaagtgtcggctttaacagtcacattggcagctccggtgaacgcgcacgggttgctgtaaccggtaattcttcgcggataagcagcgctggagatagcagtcggattgcgaatagcggaatgcgagtacgcgtgtgtacattgggtgaacggtg

SEQ ID NO: 15193 - DNA, 689 bp, Arabidopsis thaliana
ttactaaccttctaattttgtacagctgccagtggatccgcttatagttggagaccttaatgctgaccaaagttgggcagagtgggacgatgaggtgaaagataaaaaagttgcatacatgtatgatttgatattggcatctcatcaattccaaaaaaccgattggccaagaggtgatgccacattgcctccaatttcattcccaaagaagaagctatctggtgttcataaaaagcacaatgtggaccgtaagaagaaagagaagaaattaggtgtgaagtctgtggctcccaaatccaagcgaaggtattcaactcgtagtaaaccggtactcaatctctctgatgatgagaagtctaggctcattagtgaactacaaactaaggtggaagagctatcgaaccgtgtaatgaagcttgaaaaagccaaaaaagctgtcagattcaagcggtccacaaaactctcctccagttttgttgcatgttcttctagatcaaagcgcaagaagacaatggaggtccctatccaatctcaaacccctgaggtattcaagatttcaaactgttttaaatatttgaacattagcatagacttcaacttcaggctgtcataataaatcttttaattttctcatagacttcatctcagtcacacacgctgtctaagcatgtatttggacagcctgaagt

SEQ ID NO: 15194 - DNA, 798 bp, Arabidopsis thaliana
cagagatggtcatgcatacaatgaagagggccagcaaattgatgaacagggaaacctgctacctgaaatcgccaagtctgtcaatcgacacaacttgggtgtcgctcgacaccaagaaaatatcagagcagatggtcgtcggatgactcttggtgactccaacagaccggatcttttctattccaatcggtctacaatccgaccacctacgtttgacagaagcgttttcgagataaaccctgctttctatactcttgtgagtatgcacccttttcatggtgaaccacaagaacacccggtggatcacattgagcggtttgaagacttggtttcaagcattaaggcaaaaagtgtttcttatgactaccttccctgcaaggtcttcccatattctcttactggggaagcatctttttggcctaagtagttgaagcatggatgtttgacaacttggaaagaaataaaggttgcttttctaaacaacttctataatgatgcaaggtccgaggagctgagaatgaagatctctatctactctcaagaagcagctgaagaatttaaagccgcttggatcagattcagagcattgacgttatcagatggcattggatgcagctagtcatgggaatttcatgtcacgatatccaggagatgcaacaatgttgatagacaacttagcttccaacattagtaccacaagtgttgacattgcgaggagaacgccagttcagtatgttgcacgtgttgacagtcctagccacttcagaggagatggatgatcagagatacgtgagcttc

SEQ ID NO: 15195 - DNA, 589 bp, Arabidopsis thaliana
tagtaacgtgcgccagtgtgctctaaagtctgaacgcgctgaaatgcgaaaacgtccgcatgatgctgaccgattcggtttccagcgtgcagattgaagatgcggccagccagagcgcggcttatgttgtcatgccaatgagactgtaatgtccctcacccgcttgttgatccgcgatttccgcaacattgaaaccgcggatctcgccttatctcccggctttaactttctggtaggtgccaacggcagtggcaaaaccagcgtgctggaagccatctatacgctcggccatggtcgggcgtttcgcagtttgcagattggtcgcgtcattcgccatgagcaggaggcgtttgttctccacgggcgattacagggcgaagagcgcgagacagcgattggcttaaccaaagacaaacagggcgacagcaaagtccgcatcgacggtacagacgggcataaggtcgcggaactggcgcacctgatgccaatgcagttgataacgccagaagggtttactttactcaacggcggccccaaatacagaagagcattcctcgactggggatgctttcacaacgaacccggattt

SEQ ID NO: 15196 - DNA, 1005 bp, Arabidopsis thaliana
tagctgctgtctttcgagattttgtctgttgccacaaccgttggaagcatctctatagtgcttctctcagtattcggaggatttattgttcgaaaacgtaagtttttaacctgtaacttgaactgtagtaactcggaggattcactgtaatggtgccctgttacttttcagcctcaatgccttcttggcttgagtggggattctggctttctccattgtcatatgctgagattggtctaactgcaaatgaatttttcgctccacggtgggggaaggtaatgaattcttcagaaacctttctcattagataattttttagtctattattgatccttatcatctttgcattaccattagataacatctgaaaacagaactttgggggaacaagttctagatgctcgcgggttgaactttggaaatcaatcttactggaatgcatttggcgctttgattggcttcacactcttcttcaatactgtttttgcactggccttgacctttctgaagagtaagttcacaagagataagaatgtgacttaatcatgttagattataatcaatgagaattgatgttttttctgcaacttcagcttcacagaggtctcgtgtgattgtttctcatgaaaagaacactcaaagctcagagaatgattctaaaattgcttcccgtttcaaaaatgcattgcctttcgaacctctaactttcacatttcaagacgtacaatatattattgagactccccaggtaaagactaaagagtatgcaagatcagtgcaagttttcttgaatccttttaaacaagatagagaattataatgtgtggctatgatttatgtgttaaaagggaaagaagctgcagcttctctctggcgttacaggcgcattcaagcctggtgttctcactgctttaatgggtgtgagtggcgctggtaaaacgactctgctggatgttctttcgggaaggaaacccttcggtgacattacaggacagattgaagtag

SEQ ID NO: 15197 - DNA, 776 bp, Arabidopsis thaliana
caacagctcaattacaggaataggaaacttatcaggaattgttgctctgtttatagcacaataatccacacaaaacctccaagaagagtcttttttcttcaccaacaacatcggactagctagagaaaggactagtacttggcctgataattccagttactaacataacttctaccatcttctccaagaccacattagtagcatgtggataacgatatgaccggacaatgatagaagagacacccggcttcaatgaaatcgaatgctccagccctctaaacggaggtaattcaatatgtatgtcaaagatggtgggaaattctgacaacacaacctctaccactggtaacatctccattgtggccaaggaagatagacttagagacccttcagtcaaatcagactcatgaatctcaaccagcttgggaactgctagagattttaatgagacatttgacttatgtaaagatggatctccccacaaggtaacctgctgacctagataagtaagactccactcctgagttttccaatccacttctcatttacccaatgtttctaaccactcaactcccaacacaacatccacaacaccaagttccaaagacataaagttacctccaaattcaacaccaccgagccagaacagcacccctttacaaactccagaacaatgcactgaaactccattacccaacatcacctccaaattgttatcagcacacaacttcagcttagaacgatgtgctactgttggagtgatgaaattatgagac

SEQ ID NO: 15198 - DNA, 909 bp, Arabidopsis thaliana
cacttgcaacatttgtacagcttccaccatctataatcaaactacacacttttcttttaatcaaacaccttgtatggaacaaattctctctttgcgcttgctcttctgctttgtttagcacacttaagaccctcatattcacaagtagcactcccttaggtgcttcttcaacattcggattcttctggtttctcatcctcggactcaacctctccactgtccctaattaccataattcttttgttggaatactcactagcataatgcccaaatctgtgacatttgaaacatttgagatctctagttctcgtaacttctttttctttccattttgaactgatttcttcaaccttaggcttcacaaacggcttgtactccttttgaaaaccagatttctcttctctttggtagatatgttttcttgaattgtagctaggcttagcactccttctcttaatctgtttcttaaacatgactgccttgtgaaacaattcttcaaggttctcatagtgtatcacctccaaacggtctataatgtctctattgaggcctcccatgaatctaaacattgttgcttcacactcttcatgaacatcagcccttagcatcaatgtttccatttctttgaagtagtcatcaactgttctaattccttgaagtaaattcctcaacctttggtgcagctctctatggtaatgactaggcacaaaccttcttctcatgatattctttagctgattccaagtttcaatagggggtagcaacacgatgttgaactaaagactgaagaagcaattttcgcaaggatcttagtgatgaaatgcttacctccgtcactggatgactatgcacgacactccaaaaacgagggaggatgatagacttgaaagtttcatgacaactgcttga

SEQ ID NO: 15199 - DNA, 997 bp, Arabidopsis thaliana columbia
tgaaaacaaagttttaaacatatttctccccgaaacgtaagttctatagctaaatctccccgaattaatacttcgagatctattaatccatatatctgggttttatcggttattatttatttaaccgtttttaaccaaagaaaacctgattttaaccggattaaacacaaacccaatcaccttcttcctctttcctctccttcttctcttcttcaccctatttcacgttatgggttttgtttttttttctcaaaattggaattccactttctttttatgattaaaccacttatgattaagttttaattaggcaaaatcccagaacctatcttaaataattcagattcatgagcgtcttttctaataccaattatgaaggacgcttttaaatttagaaacccataatctcataataatctcatagctgaagaaacacaaacccataatatcataaaaatctactcaaaaaaactaacaaaaatctcatgttgccgcaacaccactcctcgtccaagaattagctctttcaccaccaccactacctttaataactgccgatttccctcttcttcatgctatcaagccaatgatgatacttcttatcagcttcttcctcaacaaaactagatcttttcacttattcttcttcttcttcccatccatgttgtgtgtattcaccttcaccacatcgaatccataaaataacagagtttgaggagaacttgaaatcacgaattcacgattaagaaactcgaatttgaagttacataaaagcaattgacaaaaatgagtgaatttacaggaaatcaataaactgaacgaaggatgaggaaagtctctttatacttgcatccaagatcgattattgatttcatcagaaaaaagttagtctggtattgtttttaaacgaagagaatccaagcaaaatttcaggtgaagaagaagcgttggatcggaacgttaataggtcggcgggttcgggttaatttttgataat

SEQ ID NO: 15200 - DNA, 888 bp, Arabidopsis thaliana
taagtactagtactagaaaatgacgatgctatgaaatacttagagaattacactagctaatgaatggatgaaaggatagatcatacttacgtttgattcttgattttgattttgattttcgtcagtttgggtcgatgccataattgagagaatagggtttcaatatattgattagggttttctaataagaataagatatatagagtttgggtggaagacataattattttaattaattaaattatttttaaaataaacctaactgctaccgtccgcaaccgcaaacgcttgcgggaaggtgcttttgaaatccggcgatttcgagcggtccaaagcgatatctagcggtttctatgattggtgtcaatcgctaacaaccgctaccacccgcaaacgtagcatttgcgggtggcagagggagaaccaatcaagcgctaagtcatttaaaatgtcccacatcgataaatgagacatttctattctaatatgtaatgttcatggacaaatttagttaattttgaattggaagtgtatggttcttttgaacattattctaatacaatattagaaatcatagccatagaatgagaagaagatattcaaaaataaaataaaataaaaataaaaaataaaaaagtagatctaagaaaagattcagcttagtgcatgcggaaccagataatgaacggagtgatgccccaaaggccaaaaaagggagctaattaatgcggttgcgattaatttgcataatattttgatgatgacacttgacggcttagattatgtacaacgcaatcgggtgttgtgttgctgctttaaaatcttatagcaaactgcttggaggaagatttttatgatggttcgtaatcggaggtaatcacccgactc

SEQ ID NO: 15201 - DNA, 595 bp, Arabidopsis thaliana
gacttctcccttactttgggaacccaaaggagagtaaccctatcatcaatccaaaacagatgaaaaggcatcttcgttaattcatacttgcaaaaacagagtaaattttggaatttgtaagtatactcacagataagtgaactcctttggatttgcataactcatgaagaccttgttgctgccaaactgggtgacattcaacttggttaacagccggggttacacgtgccacgttaagaagatctgtaagcttcttcgacgagaaattgcttacaccgattgctcgagcttttccagagtcatagagagcttccattgctttccatgtgctagttatatcaggttttgtgagcatctcaggtgttggcattagtgattccttcttcaagctcgcaggccaatgtatcttcaacaaaagcaaaaacacatcaaaatggaaaaaattacacgtaaacaagattcatttgctataagttatgtaccagatataaatcaacatagtcaatctgtaagtcctgtaacgttttttccagtccttaggcacatcttcaggtaaatgatcattgctcctacagaacaaaacaaaaaacatgaa

SEQ ID NO: 15202 - DNA, 824 bp, Arabidopsis thaliana columbia
tcacttaagtgggaagaaatcgacgacaggtttggttttctaaagcaacgagccatggagaaggaggtctctgtccggaatcagattctggagctggagaagaaggaagagcgactgaggcttgttgaagaaagagagaggaagattgaggcatccttcagtacattgcaggagaaaggaaatgaatctgatctgatactgttaatggaagcgaatgtgatgagattggttcttcaaatgcagtttgaacaagtggtggttgctcagctcaacgcccaagagaactttcttggttcgctccatgattcgatgatgaagaagcatgaagagctaatgacagagcttgaagcaaggaaaaatgaggttgctttgatttctaagacgatcgatgccaagacttgtgatttagacatgaaagtcaaagactttgatcttaagcaaacaacagagtctgagagaatgagaaaagagactgagctgatggaaacatctcttaagcaacttgaagccagggagaatgagcttaggttgcttaatgagaccatccaagggaaatcgatggagctggagaagaaagaagtcaactttcaactgaaacatgaagcagcagccagagagactgaagtgaagaacaagtttcttgagttaaaggaaaagaaacttgaagaaagggagcaacatttggagttgaaacagagaaaaaaagaaaaaccagcaataagagcagagactcgtaagagatctaggcttgaatatgagtctccattgtcggcagagaagggtagatatgctgagactctgattcgccctggaaaaaagcaagt

SEQ ID NO: 15203 - DNA, 878 bp, Arabidopsis thaliana
atacaaatcaatcgatataatagagaaagcgtgattggtggtgatgatgaggtacaaatcgtgggcattgatggagctttatgtctagatgcattctctggattaaatggtggatcaaggatttcgagcaagcaatcctccttagcaatcaatgctaatttaattacgtcgaataaggaaagtttatttcctttgaatttctctttgattccttttgatatttcggccaaagatgttttgcaagcttcttcttcatttggagggtttgaaatctccaacataaacgatccaaggttgatggatgattcactttccttgcttggttcgacacgtagtagttcaggaagtccttcgttcagcaagttcttcaggaagttcgtcagaaagtccatcaaccagtacatcagcaaatgtgatgtctgcatcattctccaaatgcccgctattgacggacaatcccttcgcacatgcaagattggttcgtccccacctttgcagacctgacaaacacttgactctccaatatgacctcgaactcgttccacattcgtcatgataacctgttgagtaaccaaccaaagaaacgttctaaccctttccggagccatcacctgccacagtctagcaaaaaaggaagacatatctgttcggcactcagaattttccatcaacatctcataagccgacgtaaccgtaaaagcaccatcggcagagtaccccaagataacctatcccgcacgccagtcacgttatctaaagcaatagaggctaactccaactgagtattatgagaaacgtagggcaaaattctgtcaagtctccaacccatgccgatccaccatagattgtgagcttgcaactccttatctgtatttggt

SEQ ID NO: 15204 - DNA, 1036 bp, Arabidopsis thaliana
  unsure (1)..(1036): unsure at all n locations
cagtaatggccatctccgtcgtaccgaatgttatctggataacctggtaagccttgaataaacacctctacacgctcttcattaatgtaatacttgctgcatcgtctcctagatatagtatatcgatgaattaacacattgctaactggtatgagtcggatattagtaaaatccaacagagtcagtggacttacatgggagtttcacagaagatgagatgcgtttgatcaggagacatggagacgccattagcgaagtaaaggtctttgagaagtacacgtgtaacacgtgtggtgggatcaaagctcatgagacggccatgtggtttacttccaaaatgtcaaacttgacttgatgcagagtgtacttgtaagaagcatcagtgaaatacaaaacgccgttatctgcaacggcgactacatcagtcagcttaaatttaacgccttccgcttgatccgtcaataattccgtcttcttcccgtcaccacttatgttcaacagtccctaccgacacacacactaatcaacctaagatcgagattttcaaaattcgatttctaaaaagttcacgaatccaaaccttgtatgcgtctgccacaatgacttcgccgtggactccgaaagcgattccgagcggtctaccaccggtattgacccaatcctcaacgactgagtcattagctgagtcgtggacactgactcgtttcacccatccatctatgcagccagtatatatgagattagagtcttgatgataggcgatatcttcgggtttatcgagaagaccgacgccaataaactcagctccggtgagatatttgtcgctgataagcggcgggattgaagtagtagaggaggcgtatgctctggaaggaactggagctgggtcaaatgtgtcgagttggtagagagcgatagagacgagtaaggggacgatggtgaagaagaagagaaaacgagaggagtagacataggcattggatacaagagaattggctttgtggnaaaatggtgagcagcaaaatttggagtgatt

SEQ ID NO: 15205 - DNA, 463 bp, Arabidopsis thaliana
tttgtgggtaatgcattggtgtctttctatggaactcatggttttgttactgatgccttgcaactgttcgatataatgcctgagagaaatttggtttcctggaactccatgattcgagtgttctcggataatggtttctcagaagaaagcttcttgcttcttggagaaatgatggaggaaaatggtgatggtgcgtttatgccggatgttgctacacttgttactgtgttgccggtttgtgcaagagaaagagaaatagggttgggaaaaggtgttcatgggtgggcggtgaaattgaggttggacaaggaactagtccttaacaatgccttaatggacatgtactccaaatgcggttgcattactaatgcacaaatgatctttaagatgaacaataacaagaatgtggtttcttggaacacaatggtaggaggtttttcagcagagggtgatactcgtaccc

SEQ ID NO: 15206 - DNA, 1086 bp, Arabidopsis thaliana columbia
ataattttttaataattattcaaatacttattcaaatacttattcaaatacatcgtatattacaaaatttattcaaatacttattcaaataattatacatatatttcacacaattattattcatcttcgtcttctatttcatcttcatccaaggacgataaattatatcggaattcatcttctggttcagcatctccaatatcgtaatcgaggatgattggggttacgcctgctaccggatagtctattacaagatcttcaattgtagtctgcaaaacagcttcatcatcctcggtttgcaacagtctcggatcagtattttcatattgtccagaaatgtttccccttggattgacctttaaaacactgagccaaatgttctttggtttctttgtatatggatatggaatataacaaacttgatctgcttgagatgctgttcaaacatgttatacatatatcaacaaaatatatacaacattatttattaatgaattagaaatcctcaagtatacttaattacgtaccaagaataaatggctcgtatttattgtatttcctcgtagatagaacatctacaacgccaccatggtttcggcgagtctctctctcgatctttggatcatactaccctccctaaaaaagtgtgattttcaaattgacaatgccctcatactcgaattctatgatattagttaaagtatcgtagaaatccgctacatcagatgaatccgcgtaattttctcctttaacacataccccatagttacatgtttttcgtccagcgccatgattattcgtatgaaacaaattccctcgcgtgaaatacattagccaagttttaaccttctttaaacgcccatgtacaatctcttgaaccaaagtaggaaatggagaaagtagggtttcaatatgttacctacataataaataaacaatatcaatatcaacataatttaaaaggttggccgaattttccaccctctactatttataatctcaacattccaccctgaacttttggctccttgaaatatcaccatcaacgaatatattctcaaaatacctacatgtacttttgattca

SEQ ID NO: 15207 - DNA, 817 bp, Arabidopsis thaliana
aataaggccggatgtgtgaattacgctccggcctgttctcattatttaaataactacgaaaaatcaccccacagtctcagcttgccgcagtggagacagcggaagagataaccctgacaatgaccacccttttgcaggcatttagctagatcacaatttctaataccagaaattctcacaatcttcttcaaggttggcaaattcatcgaggcgatcttttatatcattccagcccacatagccgataaaaacacagaaatcgccacaatgcgcgagccagaattcctgctgccatccatgataacctggcgtgcgttcaaccaactctttcagcatttcatcaggatatgtgttcttaataccggcaaattcgtcctcttcatcatactcaaattcaacaccttctatgctggcatcatcctgaaaactacctgcaaacttttcagcagcagaaccgtccgcaatacaccacggacagagatgttcaacttcatcaacgcaataaaagggacccgagtaataaactgacgtctgttgttcacagcaatcgcactctacggttttatcctgttcaaatgcgcctgtttccagtggcttgggatgatatttgaattggggtaacggcctgatattttgagtcatagaaacatcctgtctgcttttgagtagccaaagataaagtatccgcttaacttaaagagtctgtttcaggacatgaaatatccaatccgggtagacgggtaatgattctgctcatcaccacacctgccagcaatgcaggaatgatgcggacaacgagactgtcaccagaagaatg

SEQ ID NO: 15208 - DNA, 927 bp, Arabidopsis thaliana columbia
ccatgagttcataaacaatgcatagacatgataatttcaaattctgttcaggttctaatagataaggaatggcgtcagataagcgagtttcgatcaaagtagtatagtcaagttacaaattcaaagcagggtgcggtcttacttcagagatacaatcagttaagcaaccgagaactaacaatctaggcattgaacttacttcattgaatcaaaacatgcttatcggtttgaaatcattattatcccctatgcaaatgagcaatgctaaatgcaaacactctatatacaatcctaaaatgatatgcaatctacatgacactcttttttttgtgaaatcattttctaaaaatttttcaaatttttatggtttttctatgccttagatgatgtaaaatttgaaataagaaaagagaacacaatgttaaacatgtcttgacccacccccaaacttaaattacacagtcccttgtgtaataaaaatctgaaagagaaatcaagaccaaaacacaaaacacacaaagaataataaaaagatgctatggtatgtacaatggttgaggtggtgttacctcagtgatcaggtgaagtaggaggagacgaaatcgtccatactctcctttgtgtaactccaaggaacgggttgtgctgaacttggatttgctggatgctcgaccctttgctcgggttgttgatcgagtggctcctcaagtggtgcggtagagtggcttgctccagcatctaatttctttgttcttcttccctttttcaacttgctcctcttttccttttccctaggttcgaaggatgattgccttgttggtgaaggtgcagcatggtgttccctcggctcatatgaagattgtcttggtggtgaaggcggatcaaaatgcataggttcgtgacgagtggatccgcttctcccaaaag

SEQ ID NO: 15209 - DNA, 772 bp, Arabidopsis thaliana columbia
cgcctacacagactgaggatgagttcattgaccctgctggggttccttgagttagctcttcttcttcagctctaccatatcagctgccttcttctcctcctatcccgatggagccactggtctttcagcagtacgtcgttgacagctttaagagcgtttggaacgccatagctacactctctcactgcggttgtgtgtctcctactcgtcgcagtcgtcgctttcccgcacccacctccagctcggaccatgaggattagccatcctccctatcttgctttgttttctaaccctgtttttgctttatttcatactatttgctatttgttttgaaacttgttgcacttaatatcttatgctttgttggacctattgatgtgtattttagtgatttatcagtctaactagaggatcaatgtgaaaacactaacccaagctctacaacattgagctgaattcgcaaaggtgggtgggtactcacaagagtatagaaagcagggtttatctcgaaattgcttctttcgaatgtaggtggtcggattgcagaccgattggaatagaagagatccggtcaattgtagtcaccaagagtcatcggacaaccagctgctatgatatcttcctggtgccgatcagccacttcggcgatttcttgtatcaagtttccctgttcatctattttctgaccctcttcgttgtatgcctgaccagctctgtcgcgtaacactccagcaactatctggtattactatcagcatcttgtagttgcatt

SEQ ID NO: 15210 - DNA, 567 bp, Arabidopsis thaliana
cgaggaagtgaaatagactcaagactatccaaatatacgcgatgaagtcttaggttaataattgtctcacagatataaaggcttaagggcatatattcaaaacactcacgcttcacaaaaagacactcaacacaagatgctgaagtttacgtgtagcaacaaagtctatccaccgcgtgatacgatactgatcactccaactcttctggatacttagcttgagcttgtgcaagcatgacttccgttccctagagaaatctacgaacctgtccataaaactcacaaaggcattgtaatttgggaactcttcagagtcgaaatctaacccgggaaacgaaagccagagacttttccacctcttggacaaaacactaacagctttctttgtcgggagatacaagagtatctgagttatcaaagagtctgttaatttgcttatcagatcctctccacattacatgattcctcaagattatgggcctccatctcatgggcccaataatccttaatctctaacaccctcccccagcccatgatacaagacctttctcatgggtccgaggtatg

SEQ ID NO: 15211 - DNA, 935 bp, Arabidopsis thaliana columbia
tcaaatcccacgaacactaaccgttttgatgaggtaaaaggaagagcagtgagattagctccagcctctgtggattatgttgggaatagacgtccttaagtttgttggttggctttatggattttccattagtcatattgatttgaatctgcagtacttaagcaatccaggcagtaaatcgagagatagatcataattttagacaaaagttttgactcaataaaacaactatctaagttagaatgacacaactgactcattaaaaaagaaaagatgaagttagtaactgactcccccatacttaaataacattgtccccagaattattaagctagaggaattgaaagaaaaataatcaaaacttaaaggttagagaaacgtgagttgccacctgacgatcgataccagggtggtgtctatcgacactgtggtcgtttttgcatagctttgcgaattcagctcattgttgtagagctttggttagtgttttcacatggatcatccagatagactgttaaatcactaaaacacacatcaatagttccaacaaagcatagaaaaataagtgcaacaagttccaaaacaaataacaaatagtctgaaataaagcaaaaacaaagttagaaaacaaagcaagatagggaggatggctagtcatcatgctctgagccggaggtgggtgcgggagagcgacgacgatgatgagtgggagcaacacaaccggagtgagagagtgtagctatggcgttctagacgcttttgaaactgtcgacgacatagtgctgaaagacatgtggctctatcgggataggaagaggagaaggcagctgatatgggagagttgaagaggaatagccaactcgaggacccccagcagggtcgatgaactcatcctcggtctgagtaagtgcggatcctgaagctgaacctctctg

SEQ ID NO: 15212 - DNA, 542 bp, Arabidopsis thaliana
taattatgaacatgattttgtatgtataattattttaaaatattcaaacagtaaacgcaggtcaattgtaaaaaaatatccagatgtaatagacaatttgattcagtttacgattcacttttaagaacatagaatagtactagtagaaacattaatcaacaacaaaaaaatacaaaacatttatcatgaacttgaattataatcgaaagaatcaaaccaaacgaaccgaatggaatggaaaggatcttcactagctagaaccaatttgaaatctcggtttcaactgaaataaagttatacagaacatgtggattttgccaaaaagacattaaccaaacgtaagtagacttatcttccattccaccaaaccataaacgggttaatagtcatctgagtccgaattagatcccgaacaaggtcccgaaggatcaaagatctgaccaacgaacaaaacggttccagttttttcttctcgaatcaagaaaagaaatggatgatcggccacaaaatctatcttcttaggaggctcacaaaatcaagag

SEQ ID NO: 15213 - DNA, 618 bp, Arabidopsis thaliana
tcgataaaaacaatatggcaagcgctctccttctccaatctatccctgaagcattaaccttgcgagttggaaaacttaaaaccgcaaagaagatatgggatgcgataaaggctagaaatctaggagctgatagggtcaaagatgcaagacttcagacattgatgggcgagtttgaaaggataaagatgaaagaaactgagaagatagatgacttcgctggaagactctcagaattgtccaccaaatcagcagatcttgggaatgatattgaagaacctaagttggtgaaaaagtttctcaatagcctaccacggaaacgttatatacatatcattgctgcactagaacaagttcttgatcttaatacaacaagtttcgaggatatagtcggcagactaaaggcatatgaagagagaatctgcgatgaagaagataaccaagatgatcagggaaagcttttgtatgcgaactctgaagaaaagtcagctcagaacaattggaacccaataaaggaaaaagtcaaggtggtcgaggatacggacgaggaagaggcagagatcggtttgtgaatcacaagggcacagagacatgacaaacgtgatttgctataggtgtgat

SEQ ID NO: 15214 - DNA, 713 bp, Arabidopsis thaliana columbia
tcagtgatgtaaccaaaatagttttcttgtattttgggaaacacctacttcatcacgcagggctgaagcttctcgatcatcttcctgctggttagagttattaggtgctaaaatatttgcaggatggtacctgaaactaatcgttcgttcccagtcatttcgtcaaacacaacatatacaaaagaagctttgacttgagaaaaatttgctttaccttttcttatactttaattgagcttccgattgtttagcaggcacatcacattgaacattttgcttgtcttctccgttctgctcaaattcctccaacggattccgacgtgaatatgccgggactctaaccctgagtgtactcttttcattcttttgaggaatctccactgccttccgggagacatcagctgcaatttcgtcactatcgtattcatcgtcaaatttagtcggaagaacgacgggtttcaccaccggagctaacttccctctgactggatccctaacctccactggattccgggacacatcggctgtaatttcatcactatcgtattcatcgtcaaatttagtcggaagaacgactacgggtttgaccgccggagctacttttcctctgacggtaccctaatctccactggattccggggaacatcctctgtaatttcatcactgtcgtattcatcgtcaaatttagtcggaagaacgactacgggtttgac

SEQ ID NO: 15215 - DNA, 1394 bp, Arabidopsis thaliana
gagaaggaaacgaactcttaaagaacggctaggattcaaacgaattggatgctgtggaccaacttggggtctccggttaacaagtaacactggcgaagacgacgacgagccatttgaaaaccggcttgtttccgggtcggatcatgtaacgggtccgttaaatcaaggtatgaatctcgcaacggcgttacatgcggagagaaattaccgaacggaggaaacggaagcatcagggagtttaacgccgttaaaagtgtcgttaatgagattgctcgaagaaacggcggagagagtcgtcgttgaagagaatgaaacggagagagtaacggcgtcggcgtcgtcgacggttagaggagttaataatgattcggtgtgttgcgtgtgcatgggaaggaagaaaggagcagcgtttatcccatgtggacatactttttgcagagtgtgttctcgagaggtgtggcttaatcgaggatcgtgtcctctttgtaaccgtccgatcatcgagatcctcgacatttattgattactgaatcctacggctcaaattagtccggttgcacgtgagttcagtgaggtggtgtgtgcctagagattcacgagtgttacgtacgaaatttaatcacggtgtctatgttttctcttattggaatttggagtatcattcattatcagagatcaaaagtaattcaagattttttttcatatatagtgaaagagtaatgatgatgctaagttgctaacacatcttcaaaatcaagagcgtaatcgccaaagttaaaaaatcgaaaaccagtacataggcatgtgatagtacccgaaaccgaccccaaaccaaaaaacccaataaataacggaaccaaagccaaatctgaatttttaaattatccattatcctaaaccacactatccaaaaaaattcgaaccgaacctaaaccaaacctaaactgaatctaatattcctcagtatccgaatacaaatctaaacttaaaaatattagttaagatatattttcgtaataccttaaatatccaaaattaaaattagagaatattgcatactcagacacttttcataactttagacgtgtttcgacactttaaaatcatcaggcactttgccttggcaaagttactctattaccctaaccggttgttttcaaaccaaatccgcattaaccaaagagatcccttaaccaacccactcgtcgaatttgcagttaccttaccctatttgacttttgaagactttttcagtagcgtaaaaacctaatccagtaaaaaactgcaaattactgtttgttgtagaagacgaatccggcgacatcatcctcttcagtttttccggtgactctgttcgctcagacgacgacgcagacgattttccggtgaccctg

SEQ ID NO: 15216 - DNA, 1136 bp, Arabidopsis thaliana columbia
  unsure (1)..(1136): unsure at all n locations
tggatgaagcaaacaacatgattaagtgtgaaagcataaacacagtaaatagagaaggggaaataagggatctcttcattgtattaaaaattggaatgaatctctcaagaacaatggatgaatagcttatgtctctcacaatagggtttgaaaagaacttgataaaagaaacttaagtctaaaaacaatatgtatagaccctaaaaacgtccagtgactaataatgcaaatagggaagtctcctggggcaaacttgaccttctgtaaactcgatagcgtctagggtttttgctggaccgaaactggtgtcgatcgacaccatgagtgtgtcgatcgacactcctcgctgattcctggaccaaaatcgtccttagcttcattttccttagcttttgctccaaaatgtctccttatctccattgttgtcccactgcatagaatacctgaaaagacactaaaaagactcgagaaataacataaaaactcaaaatcctatacctaaaacatagataaaatcggtgaaaatcgggttatatcaactcccccagacttagcttttgcttaccctcaagcaaaacagaaaagccgaatccgtggaagaggttttgaaaacaaaggaactcccaacatgtacttctctacaagcttacacaatattctagattccatacctaagttccacaactatacccaccaggctttcatcgtcgggtctcatcaaacaagccaacattcaagatccttctagactcattcatgtactataccatgataaattgaccattctttatattttttttttctttttcggtgttctttctctcccccagacttattctttttagagagtaagcaaaggggaactcgcatactggatcaacaccctcggcattttccaacctttgtaattgatcattccaaataatgtataataatggggtcatagaaaacattcctacccctatacactatctcaaagttgtccaatctctcattattactattttcttataaggggagaggacatattctttttacacactggtccaatacaggtatgacaagaagcaagactatgaatactaacgttaagaggtnaaggaagacagtgagattactcagcttagtggtgagtg

SEQ ID NO: 15217 - DNA, 834 bp, Arabidopsis thaliana
aaatgagagttgcagagcaacaatatcgatcgacacccctacccctgtcgttcaacaccctcgggtttcacagatgattctgcacattttcttcagcccacaccacttgaagatctttgtgataagttctcttctctcgattctcctgctttacctttgattaattctttagattattcgaagacttcttcagaagataacaagcctagagttcctcgaaagcttgtttctcttgttgttcttgcaggtgacgagaagagcgtcaatcgacacacccctaagtgtcgatagacacctgcagctgccccaaccagatccgtttacacaccgccttggaaggcgaggaggcagcagcaatcctccaccattccacccacatcctgaactccgccaagtcaagctattgactcaaaacaagcgcttagtgggaggcaacccactggtttgatttttcttaccctttcttttattttctttcgttttggatttagttttcccgctttctctagatttcaatgccactgggaacagtgtcgtttaagtcttgggaggttcttactaatgatgcttttatttttgatttttattatttttcgtttttcagtttattaagtaaaaaaaaaaaaaaaaaaaaaaaaccgttttgtttagtttagttaggaatcatgatctatatttctctttttattgtctgattgatgagtgcagcaggttcgagtcaatccgactaatggaaaacctagatggcaaaccaacagacttgaggatatcctagtttccaactcaaccactaaggctagagctaatctcactgctcttccttttacctcttca

SEQ ID NO: 15218 - DNA, 499 bp, Arabidopsis thaliana
tgtggttactgcgatttattactgctcacaagtgatgtataaaaaaagtagtttagtttacgagtttcacttgaatttattcatacaaaaaaatatataagaaaatggattttagcttggaaccttacatttcttctcaaaatggtgatcagttctgaatcgaggtcgagtatgatcgatatgagggagatgagcggtgaagtgtatgctataatagtttactccaatgaaatctgatgaatttattaacatctttgattgttctggtgtgaaagcaggtaatctatttccgacatgctttttcattgtttcaggataatctccgtaaatcaccggatttaaatgcctaacacaaaaacattcagaatattatgtaaataatttttatgatcccaaaacatataaataattatcactttaattataaaagataacgtaccactctagttctaagggaaggcctcgttcaacggcttctttgtcagcagacgatgtagag

SEQ ID NO: 15219 - DNA, 1470 bp, Arabidopsis thaliana
ctctaggcaataaaccaacatctccttgttgattcttctcctgctcctgtttcagaagcgagtttctctccatctcacgccacttattgatcgcgaatgtacatagaactgcgaaatattttatattttattggaatgttggattcaatcgagatcaaaatagaaaaaaatatgaagcagcataaagcgaacttacatccggcgccgacgaagtagaccattcgaagcatctttggagctggtggtccttcctccatcatttcttcttctaatcgctcgctcgctcgctcgctcctatcttcttcttcttctctaaaggaacggcgtcgtttgcagtttagtgacaaaatgagacctaaacccgacaacataacgcaacccgacccggttctgaagttgtggttttggattttgaagattacaaagacagaggaaattagaatcaaaactggaggacaaggagagcgacgatccaactatcgaagatgaacgtcggcattttagatccagattcctctgcttaactgatgcatattgagcctggttcaccaacaattcttgaaataaagttaaataaacattatgtagtgtatggtctaaaactcatacaaatgtcgatagtgttacaaaacaaggacataatcaaacaatggaccatgggggttataattctctctcaacagtgaaaacaaaaaaaggcttcaatttgagcagcacccgagtttcttcagcgcagagacatcgtttttaacttcgattttctcacctttcgggacagaggcgttcccatcttcaccagcttccacttgcttcttgcttgtgatgcgataaatttgtgtcaacacctctgcaaatgcgtcctccacattggtagcttcaagggcagatgtttccatgaagcagagcgattcttgttccgcataggacttcccgtcttctgtaggaacagctagcaagtggcggagatcagatttgttaccaaccagcatcactacaatgtttggatctgtgtggttcttgagctcctttaaccaccgatctacgttctcaaatgttgcacggcgagttacatcatatactaggagtgcacccacggctccacggtaatatgcactagtgatggcacggtacctgagacgagaagcaaaagtgagtcttcaaattgtggcgagaatcagtggttgacagaacaaaaggtgtcagagaagaaaattcttataagctttttatgttttgccaaaagtgataattaaattggtaggtcaaagaaggaagtaaaacaatcgtctcaatggaggcaactcaactagcaaacagagcaagtcctttgtagcattctaacaatagtctatgcaagtgttcgtgattctagtgatcattaaccagaaaaaatcgcatgctcttgttcatccatccaattcagattccatcaaagcaatcatggtcatatagagtcaaaaccaaaagacg

SEQ ID NO: 15220 - DNA, 938 bp, Arabidopsis thaliana
cactattctatatataattacatgttttatgtgttcaatttcattgtaggagacatatatggcgccctgataaattgggaagtgtttatgaaacacatactcgggaagtgttatgaaaacacatactcgaagcggacctgatcatgtcaaaccactcgaccccctggtcgagtagacgcttcacgacctcaatagaccactcgaccccctggtcgagtagaagacttcactacttcacttcaccactcgaccgcctggccgagtaccaccatgagagtcactcgatcacttcactcgaccacctggtcgagtatcatcacctccaccacttgaccatccctcgatcacgccactctaccacaaagtcgagtatcaccatcaccatcactcgactacatactcgattgccagcttcagagtcttctccattccgcactcaaccagacactcgagcacaaggaagaaaagaagactccagcttatcactcgaccgctcactcgaccacctgggtcgagtaccgttcttaatccgtcccactactgcgtcgttttgagtgttagggttttggaatatttcgctataagtagcatgtattttacattttcgtttatctaagttttattccgcagacactttgttcttcacattttgtaatccggatttcttttaatctattcagtattcaacattttgcttttgatttcgtttacttttgttcatcctgttatcatcatgctattactttgttgttatcatgttttcattctattcaacgtttatgttctctacaatgatgtctgagtagtgaataggtttctgaggatgggttagagtagtttaggattctcggtatgctaggtggttgagtttgatagtctaatccccttctggattagtttctcttaatgtctattgctttctgatcaactggaatttg

SEQ ID NO: 15221 - DNA, 1141 bp, Arabidopsis thaliana
tggctaaatctgcagagtaccgaccggaagaagctagcggcacgtgctggtccacatatgctccgccgtctcgcttctaggttcactcaaatcgtcgaattggatttgtctcagtcaatttctaggtccttttatccaggagttactgattctgacctcgctgttatctctgagggattcaagtttctcagagttcttaatcttcacaactgtaaaggtatctacttttttgggttaaacaacagaaagagttccctttttgttttttttccaatctctctgggttccatttctgatttgatgaaacttgaatttgaaggattgttttctaagagagttcaggtgttaaattttgttctctggtgttttaagttttttgcttacttcaatgttgtttggattagtccctttgtgggtgatttttgctgtaatccatcagctttaaggggttttagtttgagagcgtcttaagaaacctgtcacaataagatttctatgattgagttcttctttggctcattctattggtatgaatgttatgtctgaattctctagggtcttagttttcacaaatagacctttcttgttggattttactgacatatgttgtggtgggtggacaatcctaagctcagaattttgcttacctcttcatcttctgggaacaggtattacagatactggattggcctcaattggaaggtgtctttctttactgcagtttttggatgtatcatattgtagaaagctctcagataaaggattatcagctgttgcagaaggctgccatgatctaagggcattgcatttagcgggttgtcgtttcatcaccgatgaatcgttgaaatcactctctgagagatgccgtgatctcgaagctctggggctacaaggctgcaccaatatcactgattcaggtcttgctgatcttgtgaagggatgcagaaagataaaatctttagacattaataaatgtagcaatgttggagatgctggagtttcgagcgtggcgaaagcttgtgcatcttccctcaagacactcaaattgctggactgttacaaagtcgggaacgaatctatatctgtagagtgtgctcaataatgaagccttcttgaaaccgtgatggggacattgagtggt

SEQ ID NO: 15222 - DNA, 909 bp, Arabidopsis thaliana columbia
tttgtgcgataataactcagccatcacgttctaacaactcaacaaggcatcaaattaatctacgataactcagccgtaacgttagaataactcaggcatctcacacaaataactcaaccaaacatcaagttaatctacgataagtccgccttaacgttagaataactcagccatcacacacgtataactcaaccaaacatcaagttcatctaagataagtctgccatcacacacgcgtgaaagagagacagattatgaatcacacacgctaatagaaaataaaaagtgaagatataacttaaagggattaaataacatagaagtattgcaattcaataacatggagatgtaattttgttatgaccatacaatcacatccatctccatcttcatctgattcaaaacttgaactctgggtcgatccataccccagtttatcccaatcaatactaatcaccttgaattcattcttctccttataagccttgcttacctactcctccactttctggaactcctcctccacgttaaatccgtccttcatccttttcattttccttaggagattaagtttcgcttctttctcatgcagtttgagatccaagatgtgtgcttcctccgtctaccttatgttgcatctgatgaaagagatgatgcctttgaaacgtttctccgtttcaagcagctttctgctggaacagccatccacacacggccttttgttggaagcgtcatccacacatggcctcttgttggaacgtgatgcatctatgatctctgaagagttttgttgctcatggattagagaaaagacaagagaaaagagaagagttttagttgctaagaatcgacaagagaaaagatgataagcaggtttttcaggtctgcttatgtgctgaagagtgtgat

SEQ ID NO: 15223 - DNA, 718 bp, Arabidopsis thaliana
tccaactttctgggaacaatcttctgccgagtgatagcactgcactcatgacttaataccaccattccttggacttcttttgatcttttctgtaatcaggtctttcacgtacttgtgctcgtcaggtattagtgcaagataggccactaaaggcatatcctttatctgtttttcaaggagggctcgatattttgcaaccagaactttcttaaaacgaccagggaatggaagcggaggtttgtaagggggtggcacgaagactgtgtctttggtctttgcagcttccggtttttcaacaaagtgagtagctggggaagcttgtggtcgagtggattgactggtgagtatgggctcttcgattgtgttgttagccaaaacatcatcttgataaaaatcctccccatgtagaattacactgtcctcagtgcttgatgtagggacatatcgagttggcagctctcgatcatgtgtgatagtgatggcatggacagtggcatactcctttggattttggattgcgttccctggaagctggcatgggtttttgttaacagatggtgatgcaaggatgccttccacatatctcatcctagtgctcattgattcggacttgttgttaagttcgacgccttgtcggtcgattttgttgtttactcacataacttcttagcgattccattgctcctgtggcttgtcgttgaatgagctgctggagcat

SEQ ID NO: 15224 - DNA, 1228 bp, Arabidopsis thaliana
ccatcattaataatgacggataaatatcatttggactcagaaacgcgtacctcagaccttttggaagaggcttaaggtcaacctttggagctttgagttctgaacagtcatctgaactttattctcccctccatggtcgagcatctcagtagagtttgttttttcagcaattaggctcatggtgcatcctgatactgcttcttctgagggaacgatcaattcctcaaactcttctggtccttccattggtatgtgggcgtcaaggtactctttgtacccttgggtttctaggtgtaggtacccttcttctccatcgttggttaaggcacttgccaggtgatcctcttctgtaagttcttccagtaattcgtcagccaatcaatccatttcttcgatccaaaagacttgtctactaattgtcggtttcttcatagctttgttaatgtcgaaggttattttcatctcttccccaggtttaggtcgatttttcccttcttgacgtcgatgaatgctcctgcagtagctaggaatggttttcctatgatcaatgggtcttttggctcctcatccatctccaaaattacaaaatcagtagggatgtctattgatccgattttaacaggcaggtcttcgagaactccgtgagatattctgactgatctatcagctaatatcagttggataccgcagggcttgtatttactaaaacccaatcttctggctacagataggggcattaggcttattgaggcacccaaatcacataggcatttactgaaagataacggtcctactgaacaaggtagggtgaaggatccaggatctcccaactttcttggtattatatttttctggatgataacgctgcattcatggcctattaccaccattccatgtacctccttggttctttccataatcagatctttgaggtacttgttggagtgtggaatgagcgtgaaagcatccattaatggtattcttagctcaatctcctttagttgcttatcaaaaagagttttgtatttttatattaattccttcttgaatctttctgggaaaggcatagtcggtttgaagggtggaggagcaaattctttatttttctctgaagccgcatctttctttcctcaaaagttggctttgctcgatcgagtagaggatcgagtgagtctgaacgttgatcaagcttaatgtgttcatcggtttgaacttcgttttgatgatg

SEQ ID NO: 15225 - DNA, 824 bp, Arabidopsis thaliana
gcagagactttgaggaacgtggtttctgcctcagaggggacatgtgtccaatggagcatggaatgaatcgtattgttgttgacgatgttcaggtatgtttcttgaattaatttttgcttcaatgggattagacttatctcgaaaaacacaataatacctataggttctactggatatttgataactatttgcatgatcctcctttgtgctggaaatctcagcacatcgatgtttcttgcatatattgctagtagcatgaccactttatccctttcaactgttcttgttagtgacattaaattaaattattatgttttcagtgttagctgtacctggcatggctctcagaaacagtcaaactatattctgattcttagatgcatgttaatgaaatcttggttgtcgaattgctagtactctgtattgaaggataaatttcttatgactactattttattacactattcttctctaagtgagtaatttttttttcattttccatttgtgcagagtctatcacagtttaaccttcccgtttcagtccctggtgcacctcatctggcagcttcttctaaacaagtgcccgctcagtttgggggtgccagtttcatgaatcctaaaggagctcatgggaggactaacgaggggggaatggctgttgatggtttgggttatggggatgcatatcctagtgctggtggaactgacttttacgatcctgatcaacctttgtggaataatagtactggtgaacttcaggtgcaatatctaactcaattctcatggggttgatgagaatgtggctcactggatgacagtaccaa

SEQ ID NO: 15226 - DNA, 1045 bp, Arabidopsis thaliana
  unsure (1)..(1045): unsure at all n locations
ccaagagttaaggtatttgttattatgtagttgaagttgtaaaacttcttagattaattaactcatgtcataattctctgcactaaggtgtctggaaatatcttctattactctcacaacttgaagaaatcaaacagatacaaatcaatacaagatacactaaccggtaaatccaatctcaatccggttcatacaaacatggttgtttatctataccttggatcaacaaagccggctacgagaacggccacaatggagaaagatttcggtaggttctaagcagccacggagtgagtcgtgaccaagctgagctctttcgttatctccaaacccaaaaatgcgaccacgttgagtgaccacaatggtgtgatacaaaccggtgctaacttgagagacacggtgtggtttcagacactccaatactcttggcctaagaactttgtctgaaactcctctgtccgggaacccaaggcttccaaaccccatccacccaaatccatatagtaatccaccttccaccaaaacaaaagtcttcctttttcttgcacacacctgcaagtaaaagcagagtcatgatcagggctgactaactgatcctaaacggagcaaaactccatacaaacaaaggccaacacatccagcttcggttttctttaccaaaaccgaaaaactaaactgaatgttatactgaaaatcctctaaactaaaatacttgtgctaagttttgattctaattgaactgatcacttattagttcttagagaccgctgaaggtcttagagaatataggaacaaggtgtaaagggatcattatctcagacattgagatggtacagatgggggacgaatctaacctggacagcaaggcaattgttgagattgaccaaaacttgaggagtgatcttgtcgttttcgtctccatggcctagagcaccacagtaacctttaccccatgtgtagacctaagttgcaagaaagaattattaaaacaagagttcttttggtttctgagaccanatggagacagaacgagatagaacaaaga

SEQ ID NO: 15227 - DNA, 757 bp, Arabidopsis thaliana
  unsure (1)..(757): unsure at all n locations
caaggaatgatatccatgaatttacaagtatatactactacttctgtagtgagataacaagatccttaggcttaccttccttggatcatagattctgtcatctcatttacagataagaaatcttgagaattagcctgtaacattggcatatcgtttagagtatgcactgcaaatattggctgttttggtactggaagatctgttgctgaagtaagcatggatagtacttgaagagtgttgggtctgtcgacggcttcgtgttgaacacagagcagaccaatctgaacacatctcgcaacttcgaatgcttggcatgtatcagtaagatctctgtcaagtagatttgatcccccggtctcgcaccaagaatcccatgtctaaagaatgtgaagaagtgttttagaaaaggaaacagggaagtgtctgcatttgatgaaatattagattgttaaaacagtaagttgtttcacttacataagcaagaaggcctttgctttcatcaccatagatgaaccgtgaaattctctttccgctgatgatttctaacatcagaactccgaagctatagatatcagacttctcagagaacaatcctgcccatgcatactcgggagacatatatcctctgttcaaatatcaaatagtttcactanaatgtcaatatataagactatactataaatcctttcttaagaatgttgttgtggacagattcttacagagttcgtacactctgcgagtgttgcttgatattggg

SEQ ID NO: 15228 - DNA, 845 bp, Arabidopsis thaliana
aaaagacaacgagtcatcttcccgcataacaaaagagttataaaaaaaaaaatttttttgtcactttcataacttaagtttaataaacgtatattagttaaagtcttggtatcaatgcattatggtagtctacattttataatgtatagtcaacattcaagaagattagtattatcgaagaataagagtaggtaagtattattaagggattagaaaatggacttacggattaagaaaatgctcgaatagccaagctctaaggatattaacggagcgttcaggcaaaccacgttgcggtctccatgcctcttgctccatcatacccatatgatgaaacgctcgttgctgacgcaaactctgctctagcaaacgcaatcgcggcgtttcccctttggttaaccccgaggatgcagcccctgccgcctctttatcccctagaagctcacagctgcgtttaagctgaaccgctaccgcgtctttcaaacaccggaaatgcctagacattgccttttgagctaatgtcgtgtacggaaccgccgcgccgtaacccattacttggtcgaatgagttcactaccatttgcatttgttcgcagtagtggttgtaccgtcggtccacctacaaattaaattttaaataaatgaactatacatagatgagttcttgttttttttttattagctcaatttctaagataaaatataaacctcaagtgattagttcgtttagatacttcaatgtgttatcttctcttgctaacaatttatgctatcttggaacatatactaaattcttgaaagaagataatgtcactacaagataaattgtaagataaataatgaagt

SEQ ID NO: 15229 - DNA, 859 bp, Arabidopsis thaliana
  unsure (1)..(859): unsure at all n locations
tgaggcgttgtatggccgagcttgtagaacaccgttgtgttggacgcccgtgggaacgtcggttgtttggacctacgatcgtggatgaaaccacggagagaatgaagttcttaaagatcaagttaaaggaagcccaagatcgacagaaaagctacgccaacaaacgtcgaaaggaattggaattccaagtaggagatttggtgtacttaaaggcgatgacctacaaaggggcaggacgattcacctcaaggaaaaagttaagcccaaggtatgttggcccgtacaaggtgatcgaacgagtaggggcggtggcatacaaacttgaccttcctccaaaactaaatgcgtttcacaacgtcttccatgtgtcacaattacggaagtgtttaagtgatcaagaagaaagcgtggaagatatacctcccgggttaaaggagaacatgacggtggaagcatggccggtacggatcatggaccgaatgacgaaagggactcggggaaaagcaagggatttgttaaaagtcttgtggaattgtagaggccgtgaggaatacacttgggaaaccgagaataagatgaaggccaattttccggagtggttcaaggagatgggtaaagatcaacttgatgcggattcgaggacgaatccaattcaagggggggagacttgtaacgcccgcgatcctcaataggatcgttggctaggacttggtccgagagaagaaggtggagtctcggacaagtgagaaggagctggccataagctcggacaaaggggaaatcatgcaggctaagctaggatcgtaaagaaatcacttgggtcagntcgcccaaagcttaagctcagctggaaggagtg

SEQ ID NO: 15230 - DNA, 816 bp, Arabidopsis thaliana
atgattgtcaaatctcttgttccagctccggcgaatggcatcactaaatccgtcccggtcgaccactcttccgtcgaaacagaattggttatgttgttgttcaaaatcgctagtgattgtcgttataatcggacaatggtcagattcgataaggtcaagaaactccatatgtgatgcaggaaattgggttaaccattctgtattgaccaaggagcggtccaagcagcaagcaacatcatgtgaatgtcgctttccaacccaagagaagggatcacttaagtgtttgaggtcttggaaatcacatacttgaagcattttcctgaagtcaatgaaagagctctctggtcttgggtttcctcctcttttttcatcgttcccacgtatttcattgaagtctccaatagccatccaaggacctgttctttgagtcgctgttctttctaatctttcccaaaccaagtgtcgataggtttgatttgggtgaccatatacacaaggtaaatagaacccaaatccattaatattaacataagtatctacaaggtttggggattgataaagaacagaaacagaaacattacttttccacattaaagcaattcctccacttaaaccatctggaggaactgttacaaccctatcatacccaacttcactacacacatctttgacgatgtcattccgctgcttggtttccagaagaacaatgatgtttggagagaatttcttcttgatctccttgagacgtcgaactgcgaggtcattgcctagtcctctacagttccaagcggctgtccttatggagggtagaggtgg

SEQ ID NO: 15231 - DNA, 920 bp, Arabidopsis thaliana
catccaagtggtcgagtggatcctctattggcagaccatgaaatttgttcccctgaatcttcgagatgagaccactcttaatctcgaagttgttgttaaggatagtaggaggtgcaattcctttcctctaacggtggtcccgtggtgcatctctagcaccaatgtttgcagggccattctttgttcgtcagccatttcgagtggttgctgaggtacaaggttgtctgtgtttctcctttctctgagctcgcgagctatgcggttgatgttatcgttgaaaagaaggttctggttgcctgttgatcgagtttgcatacagcagaggtgtacctagaacaagaagacaacaagaaaaacacacagtaagtaactgaaattgaaaattgaaaaagaacttgatctaagcaagtctgaaatctcaaatgtaacaaacaaacacccaattggcaacggcgccaaattgataataggtttttaagatcaattaatcgtaaagcactatcatgtcgttgtagtactgaaggttgtcaatccaaatgggtgtgatgctaacaatcaagatgtgatcagaagtcactaagtcaagccaagcaataacaggttttggtgtgttctagcagtcctaagtgaacatgcagaacacagaatatccaacagacacagtagaacactcgaccaacacagctctttgcagaacattgagtgaggtcgagtgaatggtcgagtaacagacagaaaatggaacagggtactcgattgcacagtctgttgccagacaactgggtggtcgagtaccaggtcgagtaacagtaaagaattgtagacactaagcaacatgtgacaggatgcagtaaacagcagtagagtaaataatacaatcaatcagacacagaattcctaaggatggggtaattgagtag

SEQ ID NO: 15232 - DNA, 1003 bp, Arabidopsis thaliana
acgcgtaagtcaagatatttcatcgttaatttttgacttttgacgacggcttgaatcagtcaacgtcacccttcgcgcgtgaactaactaacaccaatgtttggtcaacgtcagacggaacaaaaccgtgatcttcacaaaaatccttaattaccgataagacacgtggatctcaagaaacgcatccacgtcacaccacatgtcagtttcgtttttgctttcccaacaagtttttgatagacgaaaattacggatttacccgtccgttgacacgtaaggcgacaatcacagaagcagcccacccactatttcctcagcccatcacgcgcttttacttgtaaagttaataacaacaaaaagagaagtgatgtgattggcccaattaaaataaaataaaacgtactgttcacacttgatgacttatcttcatgaagcaccaaccatataaatttggtcaggtctttattaaacaaatcaaattatcttcctcactcgttgtttcatttcttagagccgtcgtttcagatttcttcttccagagagagttaaaaagagtaacggtgaggtttggatctaatcgaatcaacgatggaggttgcttttccatcttcgccgccggtgaaatgcatcgccgatgaaagattaacagagatctccatggatttcaccaaattaggattcccagaagaagatgaagaaattaaaaaattggagagatcgtggagtaagctcgaagaatccgtcgaatttaacgaagacgatgaagaagaagaagaagagttttcgtttgcttgtgtaaacggagaaggatctccaattaccgctgatgaagcttttgaagatggtcagatccgtcctgtgtttcctctgtttaaccgtgatcttctcttcgagtacgaaaacgaagatgacaaaaacgacaacgtttcgggtcactgacgagacagaccgcgtcttagaaaattatttgttgaggatcgtacaggtacggtgacggagagga

SEQ ID NO: 15233 - DNA, 835 bp, Arabidopsis thaliana
aaaaactatatctaatctttcaataaattggtagaataaccaaggtaaattaattgctattttaattccaattatgatcagaaaatacaataatatcattatactcaaaaaagattatgataatgcggggatatatattgttaatggaaatccaaacagttatctaagagaataaaaaaatcttaaaaaaataatcaaagatttacatcaaatgaatatgatattttatcatattatatatttttaggattttatatatttttcaaagtcagtggaaaattacgagtaagtgtgtgtacctggcaagtactccttccccgtacctactttatcaaatacacattccccaaaataccctcgactcaatataaaatccaaaaccttccctcactctctccttcacaaaattctcattgattctctctcgaattctcaaacatccgttttcagtaccaatcaccaaaagtttctctcttctctctctcaaagtcacaacacgaagacgatgaagcaactaatccgtcgtctctctcgcgtcgctgattccgctcaatacagtctcctccgttccgattcacagcgacctagccgccgttccgaatccttcctccgttcttcggtgactcgccgctcaaagaagcaaacctcctctgttcccgaaggacacgtaccggtctacgtaggtgacgagatggagaggttcgtcgttagcgcggactacttaaccatccggttttcatcggtttactaaaccgatctgctcaagagtatggttacgagcaaaaaggagttctacaaatcccttgccatgtccttgtcttcgaacgaatcatgg

SEQ ID NO: 15234 - DNA, 1074 bp, Arabidopsis thaliana
agtaacgtccgccagtgtgctctaaagcatatccgctaccggcgaatcgccatagctcaaaagccgttcagtttgcgatcgcgcgcccactccgcaggggtatacgctttgatcgacacagcatgaatgcggttatccgaatatattccatcagcggaccatagaccgtctgctgttttttaacccgactcatgccgtcaaacaactcacccacggcaataacctgaaagtggctgccatcgccggaaacgtggacttcctggagggagagagcgttcatcaacacgctctgaatttcattattttccatgggatcttcaatcatcagttaataaaccagcgaaacatcttagagcaaagttgcgctggcataaataagcaaaaagcctcgctgataaatcagacaaggctcgacttgcaggcaggtttgccggacaggcggttaacgccatatccggcctgaaaaaatttaacgaggcagaacatcagcaggcaaattatacaatttcgccagggtatacactttgtcgtttaccccctgaagcgtcacattgttgccctgctttttcgccagatcgataagatggagcagcagtgccagtccccccgtatccacgcgggagacacggctaagatcgatgcaggtaatccccttcaccgcttcctcacgcatttcccaaagcggtagcaaaacgtcctgatccagctctccggataacgccagcgtgtcacccgtctgcatccagctcagtgactcgctcattatttggtctcttccagagtgattttctgttgagaaatcgatttcagttgcgcagtcaggccgtcgatacctttggtacgcagcagcgttccccactcgttttgtttggtggtgatcatactgacgccttcagcaatcatgtcgtaagcctgccaattgcccgtctgggagtttttacgccactggaagtccagacgcaccggcggacggccattcgggtcaataatggtaacgcgaataggcacaatggttttatcgcccagcggctgttctggcgcaatctctttaaagcacactggcggacgttacta

SEQ ID NO: 15235 - DNA, 861 bp, Arabidopsis thaliana columbia
taaaaacatgttggaccttctttagaaataagggaaagttctgggctgaatttggaaatcttcaaaacttcaataagttgcgttttcgaattaccgtcacgtattcgcgtcgttggacacctaagcgctttttagtttccgggttgcttcaacagcatatattctttgtcttcctccagaatgctctattatctccaaatgaatcacaaatctgtaaagacctgaaaaggactagaaaagactctagaaataacaagtagactctaaaacctatacctaaatcatagctaaaagcagtaaaaatagggttctataagtcgtcgtcccattaagggcgcatgcgtgtcatcgcgggcggatgacacgtgtacatgctgactcgcccttgacacccctatataagcccaattcgtcctaaagaattttgagagagaaaattgagggaaccgagtggctgtcgagttttaaagtgaccatccgaccgagaaattgtgaaaaattgttaccatcgagaaacgctgcccgtgactaagatcctttgaccatgagtgaagaattcttgtccttgactcaagaattctagttcataagcgagaaatccatgccatgaatcttgttgagtcgaataaggaattctactaaaagatttgatcttccgattcgtgttaaaactcaagaatgagggaggttcctagaaagaagctagattaaggatgcaaatgatgtggagaaattgtgagatgtccgagaattgttgaagctaaccttaaactttctgcagaatctctgtgagtctcgaagcatgtgatatggcacatgatatgtttgaagtttatttgggtgattgattgcttgtttggt

SEQ ID NO: 15236 - DNA, 736 bp, Arabidopsis thaliana
cgctgactttaccaacatatcgttgatatatacttccatggacttgccgatgagatctttgaacatcctgttcactaagcgttggtaagttgcacccgcattttttaacccgaaaggcattactttgtagctatacgtccctcgtttggtgataatagatgttttttcctggtcatccggattcatcataatttgattatacccggaaaatgcatccataaacgaaagcatttcgtgccccgtagtggactctacgagtagttcgatgtggagaagtgggaagcagtcttttgggcatgctttgttgaggtcagtgaattgaacacaaacacgccatttgccattctttttcttaaccactacagaatttgagagccagtcggggtatttgacttcgcgaattaaacctgcctcgaaaagtctaataacttcggcatttactgcttcttcgcgatctgggccaacctttcgacgtttttgtttgactagtttaaaggttggatctacgttcagctcgtgcgagatcacctttgtactgattttggtcatttcccgacagtccaggcgaaagtgcttttatttttctcgagaaattggattagtttacttcggaaattttcgcctaggttggcccgatactacaggttgattggatgtgaatgtgatacgatttttccagagggtattcgatatttgcatggttagagtgctcaagtgtggtgcattgatttgagtt

SEQ ID NO: 15237 - DNA, 1094 bp, Arabidopsis thaliana
taaagagtcaacacacgaccagagtgtcgatcgatatactccttgcatcgatcgacactggattcggactgcaccttattaagtctgcatcccaatgcagccagtatccgcctatgttcctcgtgcttcatatttgaagaagcgtcagtctaagcaggagatatcagaggagaaatgtgaggccatcatggataaaattctgactcagctaccaccagttgatttggagaagctgtcacctccacttcagaggtatgtcaaaagaatggtcactaatggtgtgagtgctgaagaagcaggattgctaaccaaagtcattagtgcgattctgttgtatgagtctcggaagaagaaggagaagaagcagaatttggttgtctccgaacaagttagtgcaatacttcagactgtgggtccggagaagctacgcgatccaggaagctttatactcgattgcaatgtatctaaggaaaggtttcctcactctctttgtgatcatggctctttaatcaacttgatgccccattctgttgtagtgagacttgggatgctagatttcaagcctactaggattactcttctcctcgctgatcgctcaaagagaatcccaaagggtatactagaagatgatccagtgaaagtaggagaatgtttgattccaaccgacttcatggttttggaatctgaagaagaaccttctgatcctcttatactgggcaagcatttcttggctactactggtgctcagattgacgagaaataaggccaaattgctttgaatgtgcgtggtgtggttatggcttttgacatggataagccgaggaagccgcttatgattgacgaccaagcattctctatagaaacctttacagacactgttgttgagatagatgcggtacatggtacaagcaagcagccataagaagcagcggacaaattggttgatggagatcgatctgtagagaaggtgtcgatcgacaccatcacatgtgtcaatcgacacaccacacaaactgcggcagacatggtacctaaagctgcatttcaagttgagacaactgctgctattccagcgactactgtgacaacaacca

SEQ ID NO: 15238 - DNA, 1213 bp, Arabidopsis thaliana
tttttttttttttttttgtttctcattgatgataatagatttaacatcgatatacctatctaatacatgaaccgttcaatcttttatcgtagcaagtaattaatgaaaaccatatttagatttcgaatgacaaaaatgaataatgttgtattgcatttgaaattgaggcaagaccaagtatctatgatattttaagaaattttcattcggtgtgaagcaaaccgccgtagaagggaatgtcagtctgaggcaaccaagtgtctcccaaagtgaaattatatacggtgaagttcatggcttgtaccaagttcaataggctatatcctgaccattggacccttttacttgtatcagcccccggtccaaaattgtcatattcaccataggagatcgtgtctagcccggttgtaccattccattccagccaccctaccggttggacaacatcgctgatgtatgattgtatgtagaccgtcctcgagtaaggcttccatggccgcccaaggaatgtcatggtcgacttggggtcagcagcgaggtccggggcagctccaatagtacaattaatgatggagattccagttttctggtttgggtcagttcttccatgggctgtcactgcattcttctgatttgccatcggttttcgggcatatatgttgcagttttgaaatatggcagctgcatttccgaatataaaatctatggtccctgtaacaaacaagattatattttaacctcaaaatatatatacttgctttgacttgttgttttagtttatagttgaagataaaatgatatatcctaccatatatatcacattcacgatagaactgtctcaaagaatgaacgtaaagagtatcttgatagccttcaaaactacatcgataaaatgtcgatccatccgcattgtttcttacggccacagcctggtgcttctctggtccagctgtgtttcggaatgtcacatcaaccgcaacaaatcggtctcccaccaccgctacaaacgccatcaaaatttattcttattttctagtctctatgaagatatctaggacttatttcagatgcaaggaaaatgtaagaacaaaaaagatacgtaccaaaggtcgaagaattatacgttgtccaccatcaataaaactgtggttccagaaatgatagttttattgattccgtcccaataacattatgttcttttttatttgaaatg

SEQ ID NO: 15239 - DNA, 661 bp, Arabidopsis thaliana
ttttttttaaaactggtataaataatgattggaatcttttattagtatggagtctatttactgattagaatcatgtattttattgtgtttaaagttgtgtatcaattactaaatgtgtatttgatataagtaaaatggtgacaaaaatgtaatataatgatagatggtgtaattattttgttgattataagatctttaaaaaccaaagttggtatgttttatcttttattttttggcaaaacaaagacaataacatttatgaggagaccttttttctaaatcatacagaatatatataccaaagagtattttgaagctgtattaatgaacccattacccaaattatatgatacaataaaagaatatacccccaaaagaaaataatacaaagtaactcatcttaacaccttctaattcttctttctaaagattgattacattcactattcatttttgccatctcttcattgtcttgtccgtagcagccgatcaccgatcgttctcaactcgaacgttctcacagcaaggccaacatcacatattgtagtgtctagcacataaggagtgttctcgaacacgactcgagaatcgttaaaaagttgacgacaaggctcgcggcgctgagagatcgaaccatggtagtggaagtaacggattttgc

SEQ ID NO: 15240 - DNA, 1228 bp, Arabidopsis thaliana
tctcacctgctcgaagttttcttctgtcctaagtcatatttccatctgacttctccatttttctcatgaacctaaaaaaataagacaatgattcagagaagagactcatattttcaagacttagattgtttgtgaaagcaagaacataaaagatttacctcaactgaagtagtgttggatgagagaagagaaatatgcatgactacgaaacaaagaaggctgagaacgaacgcaaagttaagaactgcatcaaggggatagaatctgtaagaaacataaagacggaaaatgagacccagaaaaaagctaagcactttctgggaaaaggaaaacgagaaaaagaaccgtttatactcaccgaatgccagaacgagagaggccagtttacccggagaagaagaatgctttatagcttggctgaagaattcaatgaaactaggaagcaagacaataacatccaacattgtctcaagaaaagtatagaactacaaattaaaaaaagagggtgaagaaatcagcaaatcaaataatcccaatgctcgcttaaaccttttaagaaccataagagactacaatggaaatgaatatttaccagaaagagaaggaaaaacttgtaattgcgtgctccaacacagtttacaatccaaacacaatgatgatccatcttaagaacacatctttgacctacataaggaaacaaagaaccgaataaagctttctttctctatcagtagaaacacaagcagaacatagtataaacaaatcagatttcgccttacacacagaacaatgatggcaacgaggcggcttaacattccggcatttggtacagtaacctaaagagccaaaagctccttgatctgtcgaagtaccagcctccaaactgtcaccacctcccatttctcttctgaaatgctcaggaacagaacctgggtctgtaaaaactgttgtgaagtagctccacaacagcattatcagctgcaaagaaccaagcaaatcagaagtataattgtaaacctaaactcagggagcctaaacatttactaacaatcaatggtctaaacaatgattatgtatctacactgcttcatgcttcataactacattgcatttctcattctcttggctacataagtttcatgcacatccctaagttataggttaggggttagtagcagaaacctagcttacaatccagaaacaaactaactgaaatatgagcttggaa

SEQ ID NO: 15241 - DNA, 1037 bp, Arabidopsis thaliana columbia
tgatcagtttcattgttcaaatgtcatcattagtcccaagtaaagtcaagcctcgatagtttcttcaattcttgtcaaaccattattagccacccccaacataccttgtatatatacaagttatagagccacttatatatataggagatacaaaattttcaaacccatgcaaaaatgactttttcaaaaaaagattgtagcaaactagttatcatcatccattgcaaaattgtaatgggtgacaggatgagagtcataattatgtaagcatatcacaaattaaatctaactatactcctgtcccaattagctagtgatgaacgtagccgtcacactagctagagtaaattccatatataaaatcgaacatgcactaaaccaatctagaccgggttatgcaatttctttgttttgggtatattagatggagacacgtgctatttgttcgggacacgaagaggcctttgtctaaatgcgatcgcaaagtggaaaccgtgttatagtgactcgtttgatcaattcctacgcttgttttatcaaatatttgaaagccatttgtttttgtagtaaagtcaaagtcaaagatatatatacatacatatacaagctagtgaggatgatcccaaagtcaagccatgaggtgttgaccaataactctacatatatatatatatatatatatatatagacttaaaatgaaaccccatgcaaacaaaaaaaggcctacactctacaaccaattttacgtgccaatacacacagaaaaacaagtcagattatttttttctttgaggaagatattgcaagagtacgatcgaggaagatgaagagacaagtaatgatctttgttatgttagttgccttttttgttgtattcttggacgtcaagcaagttgaagcaatgaggccgttcccaacagctgccgatgagatccggttcgtgttccaagcactgcaaaggggtccagtcagcgggtcaggtccaaatggttgcaccaacattccccgtggtacacctaggtgccatggttgagtac

SEQ ID NO: 15242 - DNA, 464 bp, Arabidopsis thaliana
gtattcgttgttttttcttgcacccatttatctcgaatagggaaagggatgggcttctgcaggagtaacccaataatttcaccaatcagtacggtatgtaggcatcaccattacccttctagaatatgatatgatcttggttgatccgatttggactgatattggtaaatagcgtatccttgtatgcatctcaatttagtctttgttatccgctttatttgtctctgcctctgtgttctatgtgtttatatgctgtgtcattgttttattttcctgttaaaaagtgacctaagctatttattctaacgatttggtttatgcagaaccgtatgagaaactcagcaatgggtggaggctatcacaacaaggtggttatcaagcccgcccacctcaagctgggcacacctggtggtcgccagcacaacctggttatggtggtacatgaaccaggagatatcaggtca

SEQ ID NO: 15243 - DNA, 540 bp, Arabidopsis thaliana
tgtaccatacccagcctgtccagactgagctgacgatggtggagcggcttgagatgcatcttcctcttgacttggattagtggtgctgccgtaaccaccctgttgatcatacccagcagcttgaccatatcccgattgctgcgaggcattgtaagctccatacccatcttgctggtatccctgaccagcttggccataaccagaagcatgctggtagtaattgtaccctgtggtatctgttggtggggctgagctaccaccactgcttggttgctgagactgttgctgaccgtaataatcatactcaccttgcgcgctctgctgggatggtggcacagaggactgatcatagtaaccagctgaagtttgttgagggtaacttccgtaaggtgattgaccatactgaggtggacctggatatgctcctggttgcatgtaacaccataaccaggttgtgctggcggaccaccaggtggtgcccagcttgagggtgggcgggcttgataaccacttgttgtggatagctccaccattgctgag

SEQ ID NO: 15244 - DNA, 620 bp, Arabidopsis thaliana columbia
tatttgtgtggctgccatttctctcggataaaaattgaaagaagcgtaaacaaacagaaaactatgggctcatattgggcccaaataatagaaaagcccaaacatgcgagctttgaagcttagcaagaagctgaggatgtgattagtccgcgaaaaaatggcgtttctctgttcgtctctcccaagttcatcctctatcgccattttcggcgacccaaacacagatggatcatcacgctcgtatctttcgattccttcattgaagttacggttccgtcccgtcgctgcttcctcacacatttgtgctccagcgatcgacaagtcgactttcgtcatatccgaatcggtgtcagaagatgagctttgggctgcagcttgtctccgcgtacgaaccttcaacgaactcaatccttctgcttacaatatccaagtcagtttcttacttaatcggtgaattagaagatgatttttagctatttgttgtatcatgaagtcaactccgttgactatgaattggtagatgaaatgataattgatgttggagctgtgtttatagttttgaagaacttcgttgttgttgtgtgattagttagtgagtgttttgtttggtttatggtttg

SEQ ID NO: 15245 - DNA, 642 bp, Arabidopsis thaliana
gtaacgtccgccagtgtgctctaaaggaactaaactatttttagcagactaaagtctaaacaacattacgtttaaaaattgataatcagtgttttatagaactggcgatctcctaaagatgaaccaccgagaagtttcaagataaaaacaaaaataaaaatagccaaacactcttatctattcatccatttgcaggtcaatgacaccgtatttttccacaatcgaatcttccttattctttacacaaacttcttctctgtatgtaagtaaactaatattaaaattgaacttgtcaaagactttcctcttggtcacgtctgctatatatactccttcattcacacaaatgtttaactccaacacacttctctatctctcaacctctctccctctctctctccgattgtgtttttagagctgtcacgtgtcacgtgtcaggttcgaagctctaagaaaaaaatgggtcttcctctaatgatggagagatcatcaaacaacaacaacgtcgagctttctcgagtggcggtttcagacactcacggcgaagactcaccgtacttcgccggctggaaagcttacgacgaaaatccttacgacgaatctcataacccttccggtgtcatccaaatgggtctcgctgag

SEQ ID NO: 15246 - DNA, 803 bp, Arabidopsis thaliana
tacctaacgtcggctttctctagccgttccatggcggtgttgacataatcggcagagataagctcaatatccgcagtgatgttgtgtttcccggccatatctatcatttcctgggtctcttttatccctcctatcatacttcccattaccatcttcctctctatatagacacaataacacaatcacacacaatttcaatgttattttcacacgttattgactaaacattgcaaatttagcacaagtcatatatatacggatttgttactacaaatatagcttaccaaagatgagaggcatgacaggtagctcgagtggcttctcgggtgcaccaaccataacaagttttcccttatgcttcagcaaaccgagcaacggaagaagtgaatgagtcgcagagacggtatcaattataccatccatagtacccattgcatccttaatctgttttgggtcacggctcaccaagaaagcatccgcaccaagccgattaatcgcctcatctctctttttctccgaagtactaataaccgtaaccttagtacccatagccttggcaaatttcactcctacatgacctaaaccgcctaatcctaccacaccgatgtgcataccgggtttgtcgagcccgtgatacttcataggggaatagaccgtgataccggcacagaggagcggtgcggcggcgtccaaggggagattgtctggaatacggatgacgaaaccttcctcgcaaaccatgtggtcggagtaaccacgtatgttatggtgttgtcgtagtacgggaatccgtacgtttggat

SEQ ID NO: 15247 - DNA, 924 bp, Arabidopsis thaliana columbia
ctcttaaaacggttagtattcatagatcttgactccttgttcatacctgatattgagaccaaagtgataaacagaatatgttcctctccccttaaaaaatataatgagagattgagacgattttcagatagtgtataggggtatgaatgtttcctatgaccccattattatgcattatttggaatgatcaattacaaaggttggaaaaatgccgagggtgtcaatctagtatgcgagttcccctttgtttactctctaaaaagaataagtctggggagagaaagaacaccaaagaaaaaaataataaaagaatggtcgatttatcatggtatagtacaggaatgagtctagaaagatcttgaatgttagcttgtttgatgagatccatcgatgaaagcctggtggatattgttgtggaccttaggtatggaatctagaatgttgtttaagcttgtgaagaagtacacgttggttaggatttgattagaactgctaggcatatggatttggttagaatggtcatggcaatagactagagaatgttgggagttcctgtgttttcaaaccccttccacgggttcggcttttgtgttttgcttgagggcaagcaaaagctaagtctgggggagttgatatatcccttttttactgtttttaactatgttttaggtataggttttagagtctaattgttatttctatagtcttttctagtccttttcaggtctttacatgtttgagatgcatttggagattatggagcattctggagatcaacagacaacttaagctgcagaagcaatccggagacgaaaatgcacgtaggtgtcgagtaacaccaatacctgacggcaatttcgagacgcaacttattgatgttttgaagatttcaaattcggccagaactttctcctatgtttaatt

SEQ ID NO: 15248 - DNA, 702 bp, Arabidopsis thaliana
ccctttaaaacccaaaattttgaaatcatatttatactcgaccaacagaagctacagagacttacagtgagtttatcaagtttacaaaggattacagaaggttctagtcaaaagggaacaacgcttcaggacaaacagacagagcgtggcccaccacctctccattttggttcccccatgcgtttctaaggataagaaaatcccttccctccttctcaaccactcgaccgagtctctagcttcgacctctcaacaactcgaccgctcctttgctgccgcctacaaaccgccgctgttttctagtgaagactactcaacctcgtcggatagaccggaaacactcgaccacaatccgcctagaaacgaaagcccgaagccacaatttcacacgaccggtactcgacgggtatactcgaccggtttactcggctggtttagtgtttgggtttattggaactaacttattgatatttagctttgagttgcatctgttttcaggaagtatcatgagtaactacagtggcgaatcctctatggatgcggattacaacgttgatgaagctgagtcttggtcaactagacctgagaaagagcaacatgcttatgagagcttcagagttgatacccaacgctcagtagctcgacccaatgagaggagagctgagattgctagaggaaagagagcaatgacaagtagatatg

SEQ ID NO: 15249 - DNA, 536 bp, Arabidopsis thaliana
taataagaataagtcgtctctcatgtttttgaccccacaattatccaattttattacaaaacatcacccaacttctcatcatccaacaataacaatgaagactcttcatcttgtccaactttcctcatctccaaactcgtcagtctcattgccttcacggcttccccttcccaatccgtcctcgccaaaaccgcatacaatatcgaaaccacgcaagccgcttgagctgaaagcaacccaaaccacaacccactaaacccaattttcaaccaaaacgctagtccaactgccacgggagtcccaacgaaataaaacgacccgagattcacatgtgccccaaccgcaggccgacctgtccctctaagaatcccgcagcccgtggtctgtggacaattccctagctcgcatagcccgacaattggcataaccgaagcaaccaagaccttgagtggctcatagccagtgaatagtccagcccaacgctcttttagaataaccgtccaagccacattcaatgctcctactacaaacgcgca

SEQ ID NO: 15250 - DNA, 830 bp, Arabidopsis thaliana
cctctctcatatcatcaatgcttcttcaaccacatccactctgtttttcataatctcacactctctctctctctctctctctctctcacacacacacactcacacaaaactcattaatccactgaaacaatcactattcattctctttccttaagtgtcaaactcttgaaaaaactactttgaaggaaaaaatgtctaagaagaagaaaggcagcaacaactttaagcttctctgtttcttcctgtttttgggtggtttggttcagacagatgcttcttttggagtaggaggcggcgttggagtaggaatcggcggcggcggcggtggcggtggcggtggtgtttgggttggcggtggatacaacaacggtggaaatcgtaatgctgttccaggatcatcagctccaaacagggtagcttacaatgctcttcaagtttggaaatcagccatgagagaggatccatcaaatgttctcaaaacatgggttggatcagatgtttgttcttacaaaggtgtgttctgttctggtcaatctataacctctatagatcttaaccatgcaaatctcaaaggcacacttgtcaaagacctagctttactctcagacctcaatattctccatctcaacagtaacagattctcagggcaaatcccagattctttcaaatctttagcttctcttcaagaacttgatctaagcaacaataaactctcaggtcctttccctttagtcacactctacataccaaatctggtttactcgatctccggtttaatagtttaacaggtttcatccctgaagagcttttcaacaaacggttagacgcga

SEQ ID NO: 15251 - DNA, 535 bp, Arabidopsis thaliana
ttgcttatacctagcagcagagaagaagtaaaccgccatgttcacaaggctaagaccagccaagagccagaagaagtaatcgagatgacctgaattgagattatccgaaatccaaccttcttgcccatttcttgttgtaaaataagtcacgagcgtgaggatcaacgagctcaagtagttaccaagtgcattggtcaaaagagccaaggcactgcacaagcttctcattgcatctggagattggtcgtagaagaactcgagctgaccgatgaagtagaatacttcggctgcaccgagaatgaagtactgtggaatctgccacaagacggatatgggaactggggctcctgactcgactaatccaagatcgttggccatatggagacggatgatttcgacgatagctgcagctgccatacagagaacagagacaaacagaccaattcccattctttgtatctcagtgaatcctttgtctactcctgtgaactttcttgctaagggaacgatgaaccggtcgtagagctgtacccag

SEQ ID NO: 15252 - DNA, 515 bp, Arabidopsis thaliana
taccgtttcggttcaaactaaccgaatttgcacccctaaattaaattctgtttccaccaccgtgaagccagaggttaacgctaccgggaaaaaaatggagcaagcaaacgaaaaggaagaagaagagcgacacgaagaagcggcgggagagaaggaaagttttgaagagagtaaagagaaagcggcggagatgagtcgtaaggagaagcgaaaagcgatgaagaaattgaagaggaagcaagtgaggaaggagattgcggcgaaggagagggaggaagcgaaggctaagttaaacgatccggcggaacaggagagattgaaggcgattgaggaagaggatgcgcggaggagagaaaaggagttgaaggactttgaggagagtgaaagagcttggagagaagctatggagatcaagaggaagaaataggaggaagaggaagcgacgtcgcaagaggaagagaggcgttggaaggatctagaagagttgagaaagcttgaggtagtgtgctttgttg

SEQ ID NO: 15253 - DNA, 998 bp, Arabidopsis thaliana
cacaaagctatggatctttgcaaaagtagagcaacaaccaccattactctctcatgtctcatcttctttgtttcttcattctacacaatctccaccgctaaatctgtcacgaatccgctctatcaactccttctgttcatcggcttcttcctcgctgcagccttgtcgcttgttttactggtggcagcagcacgagccaccatggttgcgtggataacggtcctcgtcttactggccttttcgggtacacgtcgccgtgttttagcgcggagggggaagacgatcacggcggacgtggcgatgagcttgttcagggttctgattagagaagcaaatcctcgtggttagtctcatgaagattgtttgttgttagagagtatttacatatcacttttgtatataacaaaaatatatgtatttttgtgaatgatttttccccttttgtgtatttatttattcgaattttaattttaatatatacataatgtatgtgtgctttaaatgtttattcaatacttctatagttacaattttctatagaattaatctttagatgttaaaaaaatgttttaatctttctaatacgaaaaatatttattgagttatttcatatcataatcggggattctgatcgcaattttgatattaaaaatggttaaggaaataaaaccaaaaatgatcttaatttcctgccactgcatatttcactataaataaatgggatcagaaagtttacagttttcttctctactatactacaaaattagtttagctttctaaaataaaataaggaagaaaaccttaagtaaaaccaattacatgtctaaaatatacttacaaaagatcctcaattataaattttaaaaaggttgttgtaatatctcatatccatttagatgacgtcacatacaatttgctacctcttgtcactcatttaaacatacaatacgttgtactacgttgcgacactttcactagactggtgagatatttagaac

SEQ ID NO: 15254 - DNA, 645 bp, Arabidopsis thaliana columbia
caacggtaccaattggtttgatggattaggttgatccattcgtcgacaacttcgtcactgggaccaacgattctaaaacccaatgagaacgttggtcgatgagggtagcggagcagctaggcttcatggatctaggcgcaggtgacaggttaagctcgagatcaaccattttcgcagatttagcttcaagcatctcgccaatagcacaacgggataggtttcatcaagagtatccagcagattagaggaccaaatgggagaagaggttctgggcagcctgaaaagtggatctctgaccaccaaaaccgaaagcaaaaaggaagcgctgtggtggtcgggagagtgacaaaaggggacaaagagtttgcgagatgcggaactgagacaagagaattggaggagcttaagtacatcccgacgccggcgagcaaaagctccaccggcgtcggaaaatagattcatgaggatgtcttcgattttcgtgcttgggagagttcacgggtttttacgtttgagttattcgtttatatgtgtaggtatcttgttacttgtttttgttttgctgtttgcattagggggctatatctattttccaatttgtcgctacgttttgtaacctcacatacatctaataccacacaatat

SEQ ID NO: 15255 - DNA, 873 bp, Arabidopsis thaliana
tcaagaaccatcatacaacaattagaagccaggtgacaaaacctgtagattttctgatgactctgccatctcagcgagtagtttctcccctgattcacctgctaggtaaaaatcaaccaagttgtcccaatcagacgggctccctgaactcgtagcgccattttggactttcgcatgcttctcggctgatgaatttggctttggtgccttctgacttgtaccactattgtattctttgttcctcctaacccggcaaacaaccatagcatcatcctagaatttacataaacataatcaatcaactcaagccaaagacaaaactcctaaaattttactgtattcctcttagagactcaaaaagtagccaaagtcaccacctcttatgtaatggttaacaattaatctataagaaaaaacaaactctcgagaacagttttaccagagatactcctttcacgcagtactcgtgcataatccagtcagttctttcgccttttggtgcacgaccaatatggaaaacaagcgtcctctttgttccaatgacctcagaaccagacttcacatcacgctctttcccagttgctttccagtatcccatcttcgttgctctcctgttctgtgaaccatgtggatactttttcccacgcgcacagaagaagaaccactcgctatcagatttcacaatcgacttatctgcaaagaacaaacacacaaaaaaaattgtcaattccaatccaagagccaaaaaatagaaactttatatcttaggcacccaaaatagagatctctcctgaagcctgaagaacaacaaaatcaaattccaagtagaagaaagacacaaaagaatcaattggttcgaattcgaagacaaac

SEQ ID NO: 15256 - DNA, 588 bp, Arabidopsis thaliana
gcttattctgatttctgtctctcagaatctccatccccagaatcttctttgttgctcccagatccttcatctcaaactcagcactcagcagatctttcaatctctgaatatcacacatcagtttggcagctattagcatgtcatctacatagagtaccagatacacgtaggattcatctttcagcttgctaatgtaaacacaacaatcatacggacttctgttgtagcccagctccatcatatagctgtcaaatctcttgtaccattgcctgggagactgcttgagtccatatagagacttgttcaacttacagacgtgatctttctttccaggaacttgtaaaccatctagttgagtcatgtatatttcttcctctaatatacaatgtagaaaagcagttttaacatcaagttgttcaagttccaggtcctgatttgccacaattgctagcagcatcctgattgaagtgtgtctgaccacaggtgagaaaatctcattgtagtccaccccttctctttggctgaaacctctcgcaacaactcgagccttgtacttaaccctttcaactggtgatatccattccttta

SEQ ID NO: 15257 - DNA, 395 bp, Arabidopsis thaliana
catgtgtcttctagaatcgttgtttattgagatgtttgttcttcattcagagatgtctctgtacggagaaaaagagtggtacatcttctcacctagagatcggaattacccaaagcggttcgcgtccctaacccggatgagcaaacaactacgtctactgtttaaactaacgatctcataccaatactgaacacaacaagctcaagatcagctaggaatataggcttcttaaaactccccaatagcagcaagtttcggtctttagattctttctctaaaccctgagctgcgactattccatactaggagcctcttctgttgggttggactcaaccacatcttcagagtttgtactctctgcttcctcaagtaggtcccgagcttgaatcgcctct

SEQ ID NO: 15258 - DNA, 1101 bp, Arabidopsis thaliana
cctcaggtacttgaaaatccttttcacagccagccaatgttcttttcatgattgtcccatgaacctattgacatcactgactacaggtgcaagatctggtcttgtacagacaatagcatacatcaaacatcccacagcattagcgtaaggaacacgagacatatactctttgtcctcttcagactaaggagcaaacatggtgagaggaatattagcagcaaaaggagtatcaacaggttttgctgataacataccaaacctatccaacgccttctgaatgtagcctttctatgacaagaaaagcttattctgacttctgtctttgagaatctccatccctagaatcttctttgctgctcccagatccttcatctccaactcagcactcaacaaatctttcaatctctgaatatcagacatctgtttggcatttattaacatgtcatctacatagagcaccagatagacgtatgattcatctttcagcttgctagtgtaaacacagcaatcatacggactcctgttgtagcccagctccatcatgtagttgtcaaacctcttgtaccactgcctggagactgcttgaggccatacaaagacttgttcaacttacagacgtgatctccctttctaggaacttggaaaccatttgattgagtcatgtatatttcttctgctaatataccatgaagaaaagcagttttaacatcaagttgttcaagttccaagtcctgatttgcaataattgctagcagcattctgattgaagtgtgtctgatcacatgtgagaaaatctcattgtagtctaccccttctctttggctgaaacctctcgcaacaactcgagccttgtacttaaccccttctactggtgatattcctttcctttatcttgaagatccacttgcaagtaacaatctttcttcccggtggtcgtttgaccaaatcccatgtctgatttttacagtgagattccatctcatctctcattgcaggaaaccatttctcagcctcaatcccagaaaaaacttctcgataagtggctggctcatgagtatctacctcttctgcaacctgtaaagcataccctaccatatcctc

SEQ ID NO: 15259 - DNA, 1023 bp, Arabidopsis thaliana
gtcaaaagataacaacagctaaaagtaaggaaagagaatatttcgtatggcagttgaaagaaaaacttcattacaatcttccatatcaaaatttttttagcaatgataatatacacaattaggttcaaccccttctcatattcaaaccccagtacaacactgcctaatctgtttagataactggccattaagaacataatgctaatactgtctttcccaggatgacaaaaataaaaaaaaacagttgtaaacaagttgtctatccagacaacagtacctactgtgcattgctgtagcatttcacagtctactaaaattgtaaggaccatttcaatgtcgtaacttaaagattgtgctctgataatgtactacagcagagcttatcaagacagtagcacattagcgatagagaacttaccgcctccactaaagccttccactccacgaacattatgtatcataaagccttcatttgcttttgagccatcactgaccatttcagaaaatgcagaggacgtatatggactaccatttgcaaagttgtcgacgtactccgaaaaagaatgaggatggagatttggcatgctttggatccccatatttgaattatcaaaatggtggccatgctcctgaagtcctacaggcttacttgctgagatgccgtttgccgaaggttggaatccaataggaatgctgagactacgatgtcgttcaatgaaggaattcacaggtgatccaatagaattatgtataacccgcatagatccaccatcactggaggttgaagaaatcattcctgggaaatgtctacctgaaacagagatatttaactgcaatgatttgtgtcccagatgattgatgattgaagaaaaaagaactataaaccatagatgtaaaggcatacctatgtgtcccgatgatgtattactataagacgttttaggtagcacccttcagtatcatttgcagcacactgcgacgtgtatctgaaaaagataatgaatcatacattaatacagttga

SEQ ID NO: 15260 - DNA, 732 bp, Arabidopsis thaliana
ctttcaatttctttgcagactaaacattgagatgttgagtgaaaagtggagggatgtctccaactctcttcaagtgttgtatgatagccaaggtacgttgtcactgtattcacaaatttaaaaaggtcgttttactctctacacttcctttgacaggtgaaatctgcaacgcatgtggtctgaacatcctaccggctcaaatatagcatatgattgactatatttttgtaaccatgacttactcactaatactctatctagcttcttgcatatggtaccctcttgtcttttattacaccaagtgaatcttgtaccttgatagcttagatccgtgagttcacagtataagactatatcctgaaaatctcgcatccctgatggaataaaaggtgaggaatcatatagagaatgatcatcaccttccaatatttagttaaaatccccacatataagccaagctttgtctttaaacataggagaatcttgatggtttcttttatcactccaaagcgctttcctttcaactacaaagtttgatgcataaacaaaagagacaaagaattcctcatgtctaccttcgacatagactgaacaagtgataagtagtgcaatcttataaagcagtgtgagacttacattgtgtctccaaaccagccataacctaccaagtcgatgctcttcataatttgtgagtaaagccaatctttgaacacataattaattatccgatct

SEQ ID NO: 15261 - DNA, 1050 bp, Arabidopsis thaliana
ggtacatagcatccaatgatttatattttaaaattttctagataatgttttctagaaaccctaattcatctaccccaaactcatcatctataaatattgttcgtgttgtattgctacaatcataacgtttcgtctctttattcatagttgtatgtgtagttgttagggttatagacttattgtgttatttttacagatattataattagattgtccgcttattaactctctttcgtttatgttgtatacacaggaacagttccaaaagacagcaatcatcctcgcaaaatgatgtcttcctgttctgtatgttcttcacgagcttcgacgttttattctattactttctgtaacaacccgtcccgtgggacccgcccacgtggccactctctgcaacgttgcgtccagttggcgctgcagcgatcaaccctaacctctctccttgggccctcaaggctcacatgtaggttattggtgcgcttggcgttccttaaacccaagtcatcacccttttacaacctttccacaggacaagctattaccaattaatctgagtaaaatacagtgttatcagtttgcatgtgtcgcggaccaaagatgctatttaggtgatcgtggaccgtcttactaagtcaacacattttctggccataaaaaaaaatgatggagcggcggtgttggctaagaaatatgtgagtgagatcgtgaagttgcatggagtacatgtgagtattgtgtcagacagggattccaagtttaattctgcgttttggagagcctttcaggcagagatgggcactaaggtgcagatgagcacggctcattatcctcagacagatggtcaatctgagaggactatccagacacttgaggatatgtttcggatgtgtgtcttagattggggaggtcattgggcggatcacttgagtctggtagagtttgcttataacaacagctatctagcgagtatttggatggcgcctttcgaagcgttgtacgggaggcaatgcagaacaccgttatgctggacccaagtggggaggggagagg

SEQ ID NO: 15262 - DNA, 1013 bp, Arabidopsis thaliana
cccggagacattgccttgtgggaaatcagcatcgtatagtatagggcccgtagatgaagagtcgttagcgtgctagttttagctttagtagtttccgctgcatatactctgtaaagagtattcattgcttgtttgtttgtgttgtgtgatttcttgtcgagtatactcaattgagtatactcgtactgattgtttgattggggattgggattgggatttttgttaattgttagaaacccggactcactgtgtaatcttagattactcaagattctgcttttgtcttacaggtaaccttagttggggagacctaaagggagcacggacgttggggaaccggtgtagagtttgttgtctttgtaaaattagatttgtaaattgactcgatttgagcattaggctcgggatcgcaatacattgtaagtattttaatgttttattgaataaagaaggtttttcttaaaatcgttgtgtacttctgatattagtcttgtccggactaacataacttacaaacatggtacgggttgaaaagccttaggcagtgttcgtgaggaacgatgttcgaggatggcctgaccttggtgccggatgtgttctaggaactcggtcggatcgtctacgggcatcaaaagtaacgcttccggattcgtttttagtcctagaatggttcgggggtgttacagttagggtccaatctcggtaaacttgcacgaccaggactttcaagtaactcatccagagtcatgtcgataggccgagaagctaaaggagtaccatgattgacagaaccgttgggggactaatttgcctgttgaggagacgcaccgcctgcttgggggttgacattgataagcggctgaggtccgccggtttggccattaccctgaatcgcagaagagttcccttcactgagaggcgtgcttggacgctgttgagaccggaaccttgaataatcgtttacaatgaaaaagaaatcattagtagtcaaaaaataatcaaaccctaattag

SEQ ID NO: 15263 - DNA, 839 bp, Arabidopsis thaliana columbia
tatttgagtgtgaaagcataaacacagtaaatggagaaggggaaagaagggatctcttcactgtatatcgatttgaatgaaactctgagaaaacaatcgatgaatagcttatgtctctcacaatagggtttgcaaagaacttgataaaagacttgataaaagaaacttaggtctaaaaacaatatatatagaccctaaaaacgtccagagactaataatgcaaatagggaagtcttctagggcaaatttgatcttctataaacttgaaagcgtctacggtttttgcagggccgaaactggtgtcgatcgacaccaagagtgtgtcaatcgacactcctcgctgattcctgaaccaaaatcgtacttagcttcctttttcttagcttttgctccaaaatgtctccttatctccattgttgtcccattgcatagaatacctgaaaagacactaaaaacactcgagaaataacataaaaactcaaaatcttatacctaaaacatagataaaagcagtgaaaatcaggttatatcagtgtcctttaactcttgatttctccatggaaaacctaaaaaaaacatagtaaaagtgggcaaaaatacgatgttatcactaggcagtcaagatgtgtatataagcaactaagtcaagctagatgtgtaatgaaggtgggtttctagtaataatccgaaatcaagtttcaaactataaaaatgtgaactaaagtgccctactcgatcatagggtcgagtagaaccaagcatgcaacatattcaagtactaacaggtaactcaaaaggatgaaagtaaataagaggtgaatgacatgcataaaagggtg

SEQ ID NO: 15264 - DNA, 600 bp, Arabidopsis thaliana columbia
ttgtaatatcatcggcagctgcacaatgaaaatgtaggtggttttatggtcaggtcggtgaaattctttcgtaaattagcagcaagaccagctgataagaaagaaaacaagaggaactcactttctgaggcaaaagcttgatatttttttctactcctgcaaacagaaacccctagagcaagcagagccatgattatgaccattgcaacgacaatgacaatcccaatgatagttcctgtatgaatcgttttttcatctgtgcaagaccaaatcacctagctcttcttagagttgaatacaagaagggttatttctatcatttatttaagtaaatcacatacctttgttggtcactggaggtggggattgcagctgagatgagggtggaggcgctacggtaagaagatcaaaggcgccattgaaagggtatagatccaccggaaaatgcaactaggccgatacacatagccgccttgcttcccatgacaacaaccaacatagtcatcaacactttgttttaaacaagtgttacagttggaaggagagacgtctggcgtgcattgcatcaaagcgtagacgatttgagaatttgcaagtttg

SEQ ID NO: 15265 - DNA, 555 bp, Arabidopsis thaliana columbia
gttggagacatttccgaatctggctatgacggtggatctatcgtgtacaactgcattgcacacggctgcttcacaaggacacactgatgtggtgaatcttcttttaaagacggattctcatttagctaagatagctaagaacaatggtaaaaccgcacttcattctgcagcgcgaatggggcacagagaagtggttaagtctttgataggtaatgatgcaagcatcgggtttagaactgataagaagggacaaacagcgcttcacatggctgtcaaaggtcagaacgaagggattgttcttgagttggtgaacctgatcctgcgattttgagtgttgaggatagtgaagggaatacgccgttgcacactgccacaaacaaaggccgtattaaggtatcatcatcgctaattccccctcccctcagtttctcaatctacaaggattctgatgaactgcattttgcctttgcttgcagatagtgagatgtttggtatcatttgactggattaacgttaatgctatgaataaggctggagatactgcacttgatatag

SEQ ID NO: 15266 - DNA, 849 bp, Arabidopsis thaliana
cagatgacgatgaaccagaagctgctcgaggaaggatcttcacaattttaggagattcggctttctgtcaagacacgacggcatcaatcaaagcttatcaaaggaaggccgactcaaatcataactggacgcggccatttagcggatcagatgacgaagtaacttttcatgaaagcgataccaacggtttggatcgtccgcacaacgatcctttagtcattacactaaccattggtgatttcaacgtcgaatgagttctggtcgacaccggaagcacactggacatcatttttctgacaaggctacgagaaataaagatcgacttgacgcaaattgtaccaactccgcgaccagaactggaccatcaagttaccagtccgagaaaccactatgactctcaggaccatcaagttaccagtccgagccaaaggggtaacaaaaattgtcgatttttctgttaccgaccagccgaccgtttacaacgcaatcatcggcacaccgtgattaaatcaattccgagttgtcgcttcgacatatcatctttgcttgaaatttcccacgagcagcggcgtgaaaaccatctggggaaaccagaaaaatgctcgaatctgcttcatggcagcacacaagctaaggaaccccgtcacaaagtcaacggccgacgcgaatcgtaagaaggctaagcttggtcgagccgaagagaaaacaatttccgagcaattatagcagttaaagatcggggaggctcgggaatccacaaaatcaatccccaatccggtaatctctatctgccttgacgatgaaaacccgagcgatgcgtagaaattggcggagatctaggagaagaat

SEQ ID NO: 15267 - DNA, 487 bp, Arabidopsis thaliana columbia
agtgtgctgtaaagatagagagggggggggggcttagggtttcgtgacctgcaccaatttaatcaagctttattagcaaatcaagtatggaagctgttacataggccaataagcctactgtacataatgcttaagtaagatattttcaacaaggggtcttcctaaatgcgtcatgaggaacacgaccctcatatggctggagctcactcagatttggatgcgagttgttaaaacttggggctcaaaagaatatcggagatggagatggcacaagaataggactagacccatggctactgacaaacccaccacgccctccaatgttagtgccaatgacagatccagaaacgttggttagtgatcttctcgacccgacgatatctcaatggaatgaacaaaaccttgcggagttaattgaaccgataaaccaccctattatcagaaaaatatatgtcctccgatccgatcacctgactcatatgtatgg

SEQ ID NO: 15268 - DNA, 550 bp, Arabidopsis thaliana columbia
  unsure (1)..(550): unsure at all n locations
tcacgtttggtctcgtacccaatttaacattttaccgtcactttaagcatatgtgtttagcttcgacaaaacgttgacattgagctagttagccatttgatctacaaaatcataaaatttgactgcaaatagtcaagcaaagtgtcccacgtgattacatcaacaacttgctatacaaactttgatagatctatttattttataatctctacttgttgatcatataatttcctataccctcttaccttaatataatccattaggaaagcttaacatgccatatacatcgtgaaccaacgacttcaataaataccagactagtttcttattgtcaagctcatcgcatccacttacttgacatggctatttctaaaataacccttgcaatcatcgttttacttctagggttcactgagaaattatctgccttgtcgagtagttgtaattttccggcagtttttaactttggagattcaaattctgacaccggagctatctctgcggccattggagaggtccctccactaatggagttgcattntttggaaga

SEQ ID NO: 15269 - DNA, 523 bp, Arabidopsis thaliana columbia
agtgtgctgtaaagtggaggttttcgtcataaacgtaatcaagatcgatatgcattatccgttgtggtgatttttcctgtacggtaataatttgctgggcaaactcttttaatgagggattattggcgattaatacccgcggaatggaatccaattgcgacgcatttgccaaacctgattcaagggtgaagaacatgtcataaccgagtttttttaattcctctatcgctatgccattcgcttcgccataaggccaaacaaaaacgtgtggatttacctcaacctttgtacgcaggtattccgtcatttttacagcatccagacgaattctttcccggtattctgctgcggtttcataccgtgcgtggtcagtaaaatatgcacgatttacatatacaggcaataagctgccggtgcagttagcctgaataccgtagtgagaattccatgtatgagaagcgagctcaacgagccgggaacgcgcaacttctcgcacttgttgccacgtgcaaaatattctcga

SEQ ID NO: 15270 - DNA, 416 bp, Arabidopsis thaliana columbia
cgagagctccaagtgggccatttttcggtaagcattacagcagcagaccgtaaccgaggtctttcttcatgctattgaactggtcacgaaccgcctggtcggtagaaccagaacgcagttgttcgagcagagagtacgccttcatcccgttacgaatgcgttcttcatgctgcaccatcagctctttcatgccgataaccggggtatccacggaacgcgttgcaatgatgcccattgcgtaagggatctgaatcgcaaatttgttcgtctcctcttcctgatcaggaatgccgaacagagtaaaggcagcaggcgcaggttgcgtttcccactcggcttcaatagcagtcagtttggttttctgcacgtcgcccatttcgtagccggattcatcacccagaacaataacagacaga

SEQ ID NO: 15271 - DNA, 1021 bp, Arabidopsis thaliana
caatgggttctgactcaagagtagaatctagattcgaagttccgggtagggggtttgaagatttatgttaccattatcaagacgatgaggcaagtgacgatgaagcatgtaacgaagaagctgctgacgaagaagtaggtgacgaagaagaagaagatgatttttctagccggtttgatgttttcgacgactctgacggtgtctcatcagatgatgataactttactgtatacggtgagcctcagaaataaagatgaagattcaccgtaacttcctcctaagaagagaacttaaaacattgaaacgatcagatcttctaggaggtcggttgattcaaggttggagctgactacgctaacactcgctgtaggccaacgatacggtagcaaacgagttggagtatcgactcaaacttcttgtgataaggaatggatttgattttgatgtaccaatatcaaatacgactacaatggtttacgattgctgggttgatggatgtcgctggagagttcgtgcatctacacaaggggatgagccttatttttaggtttgtatatatgattcggaacacacatgttctgtgacggaatgttctaatcgatcccgacaagcaacacatgatattttgggagttctttacaaagactatcttggtgacgttggtccggatgttagaccaaaacctgtcagaataattatcaataagcattttagagtatagggaattccaatgtttcggctgacttactgattattgtttggccgacttatatatatatattacggctgacttatagatatattatcgctgacatataattacattctggttgagttatgacccttttcggctgacttaacatcactttgtggctgaattgtattacattttgcctgagttataaatatattatggctgacgctaaggttattggaagtcatacaagacgctaaggtttcaaggaagctcaatctgggacccctgatagtagtttgaagactgcgtcttactatcatgata

SEQ ID NO: 15272 - DNA, 482 bp, Arabidopsis thaliana columbia
attcaccattttttgctgccaatgtctctatctcattgagcaaggcatcatcaacccatttaaaagtgtgttcatcattccttagctacatatgaacaatgatctttcaaaattagaagaatctaaacatcaaaacagaagaattacattcattataggattaacattaccctatttagtgcagctaaaccacaacgatagtatcgtcggcaaggattcgaatccgatttcgaaatgagaacaacgactgcttccccacaccaacatctctttggcactccaaccactcttcctcgaccacgaggtcctgtagatcccgacgaacttgatgacagattgctcatctttcaactgaaaatcaaaaaattgggaatcgatttagggttcttgagttttgagtttggggttttagattttggatttgggattcgacaatggatcgggttttataaggaatccgggtttttttggtatggttttga

SEQ ID NO: 15273 - DNA, 412 bp, Arabidopsis thaliana columbia
gactctatcccctgtgatctattattatattacatgaaacacatatgaataccagtggatatatacatttaactacaattacatatgaaaagaaagaacacaatgatttaccttgtaacgataccggtgccactcgtgtctatctttctaaatagtacagaggaaagaaaagaaggcagcttgcagacttctttagtaatggatttgaattctgcaattgaacaatagcaagaatgtgtttgtaagatcaactgtttgtcaattcattacagaacgggacttgtgactgtaaaagcgtgtgttttaacaactcccatcccatatgaagcccgtctatatagttactaaaaaattgatcaaccatggatatacattgctcccttagttccttcgcaggtggacgtccatgttg

SEQ ID NO: 15274 - DNA, 546 bp, Arabidopsis thaliana
catttgtcttgtgaagctgcaggaatagattgtgaaaatttgcataatgaacatactttctactttctatttaaatgatttgaaatgaataataatgtgtgtcaagagaaaatgaaccaagagatgtataatgaacatactttctccactctcgagttcaattcgtttagcttcttctcggtttcactagtctgagcttctatcaattctttctccttgtttttctgctccagaaatttcttaagtacctcaacctgaattcacaagtataatgtagaatttagaaacttacgtgcatataaaagatgggttctcaaataatgaactcacctgcttctctaattcagtagctcgtgcttgagctttactcaacagttccacagaatctgatgaaccttttttctggaaacaaagattgatatataaaggcaatctatatctgaacatggaagcaatttcagtgagacactaaaagatgcatgcatacccttagtgaagaacctcagtctccaaagaagcaactttgtcttgtctctcttgaagaag

SEQ ID NO: 15275 - DNA, 1057 bp, Arabidopsis thaliana
gtcaatccgatcgcccctatatgtgatgggtttttaaagggatactgttccgaagagacgaggtaaggattccacttaaaattggcatctaatacgtgttgacatgcatatccacctttcctttgcactgctagtgactctcttagtgcccttgatcctatctaattcttttgattacttcagtagcatattaagtatactaataccataaggagtataagggaaagagatccctctctggctttatgtcatacattttttttctccatctcaattcgcaaacacatgatgaagattgcggattgtctctacataatggtcacagtgtcggaagaagcattcctacaactgcccggttttcgaagccactggatcatgctctcaaggattgaaatgcaagctccaccaccccaagaaccaaagcaaaggaagaaagagaaaaagaacaaacgaaccatcacagaaaaatgcccgtagcgttactttagttcacttcacaacatcctttccgagtctgagccaatggtattcaataggcgttctactgacagtgaagtttttggaatggaaagcctcgattttataacccttggcactgctgagtatgaagccggtgatgacaatgatccagccaccgtgcaatctatctccagtgacagtgaatcactaatctcaatatacaatctaatcacaccagtagctctgatgcagtaagaagcatcagtttgttttggtgagtacaaaggtaagctcaaggggattcagattcgtcacattcaaggatgagaaatccatgaaggatgtgatcgagggattggctggacaagagctcgatggtcgcagcatcactgtgataatggctcagttacgaggaagtggtagaggtagtgaggatacagcagcagtggtggcggttactcaggagaaggtggttgtggctatggagttggtggtggttctcaagaggaggtggtcgtggcggtagaggcgaaggaggatacagcggcagtgttggcggttatcaagaggtggtggtcgtgcgcagagcgaaggagga

SEQ ID NO: 15276 - DNA, 508 bp, Arabidopsis thaliana columbia
ggatcccctcaacatgcggaactctggtattacaattcaaaagtcaaaagcagacctttctttgtgggcgattatgttttgaaacgtgtgttcgataacaagaaagaggaaggagcaggcaaactcggcattaattgggaaggtccctacattgttatcgaggtggtctggaatggtgtttacaaattgaaagatttagaagacagacagtccaacgtccttggaatgtggtgaacttgaagaaattttatgtttaaaaacacacacgcattctttgtacatgaactacggtgtggcttgatctcgaaatgggtatgtaggcatctcggaaacgagttcagctattaataaaatttgttttattcatgttgaagaatagttcgattatacgtacgaataaaaataaggagttcgactatgcgaacatacaaagcaggaagcaaggataaatttattcaaagagaaaacaaagaaaagacgctgaaatcttagaaacacttcggattag

SEQ ID NO: 15277 - DNA, 1058 bp, Arabidopsis thaliana
tccccaacatcaataggaacttggtgaagaggagaaacaagtttacaatagcaaagctgctgagttaatggaagcttacaagaaagaagtggaagagtacaataagaccaagacttcgtcgtagagaaagaaaaattagagaatgttcaagtttgctcatattgaacatctctacttatgcaaaatgactctgctacttaaatcgctaggcgctaatcgggattatattaatctcaagaatattcaatactgtactacttaaatcgaattgtggaaaaaagtggggaagcctgtgttaatctcagccgttggatcaaattgaaaattaacgtcgaagattggagaacttcctgtggaagtatttgttgagatcaatccagtgaaatccgacggaccagaacttcccacgtggtggtaaaacgttccaccaccgttgatggactcgtaagtgtataacggcgacgtgacggggaatgagaaagcttcgcttccaagtccgccggtacgtacggtaagactggccctgagattctggtaatttactgctactgtgtgttttggtttggtttctcgtttctctggaagtgggatcccctgtgaacaagtgtgtgttcctctgtatgttacttcgaagatcgttggatcaccgtccgatctttggacttgtttcgtagcccaacagtactgtgtgttacgaaatgtgcatctgtaataactcctgcaataaaaacacaaattagtcctaaattagtaaaactaaaactaattttttcttcttcttaaagccacgtaaatttagccaaaaaaaactatctgattatatacaaatccgaccttcatatagcaaactcggataataattttaaatatctaatttatcttgtattataattcagaattattcattacatattcgatatttaaattatgcaaaatagtttttaatatgagaatacactttgaatagtaattttaggtatatattactcatataattatactcaacatttatccgctgctattaaccaatcttttaacaaatgtactattcgtaaaca

SEQ ID NO: 15278 - DNA, 598 bp, Arabidopsis thaliana
atacatctcgcaaatgtcgcaggagcattgcatagaccaaatggcattttgcgatatgcgaaagtaccatacggacacgtgaatgcagtcttctcctcatcatctggatgggttggtatataaaagaattctgagtatccatcaagaaagcaatagtacttgtgattagctaacctttccaacatttgatcaatgaatggtagaggaaaatgatccttctttgttgcactgttcagcttcatgtagtcaatacacatcttgtggctcgtaactatccgtgtaggaatcaactcattcttgtcattcttaaccactgtaacacctcctttcttaggaaccacatgcactggactaacccaatcactatctgaaattggttagatgatcccagcttccaacagtttcattatctccttcttaacaacatctttcagatttgggtttagtcttctctattgcttaactgagggcttagactcatccttgaggtgaatcatatgcatatacaagtctggagagatacctataatatcatcaagagaatagccaagagctttgcgatacttgtgcagcttggttagcaataaagtgagctttg

SEQ ID NO: 15279 - DNA, 685 bp, Arabidopsis thaliana
gctgtaaagcttgggcagtaccatcttttactaatgatcgatgcgattttggagaagttttctgagtggttcaacaaacatcagaaagattctgcatctacatcgaacacaagacaagtgatgcctgttgtgaagaatatattacacatctgttgtccaattgctgcaaagttaagtgcaactgaactaaacagcttccgacaagaatacatcgtaaatcgaaaagatggtttctcttatttcgtggacttggaaaagaaaacttgttcttgcagatgttttgatatagataaatacccatgcgtccatgcaatagctgcaaccataaagcgatctaagatggaataaccgttcgatcttgaatgtaagtatctatggtctttgctcgaaatattacttgatcgagacgtgggcattagcatattacagaacgatacatgtggtgccgcatcaggctcactatgtggagaagatcgcaaaaacgccggattacactctaaaaacagcaaggaatcaagaaacccggtttccatccacaggtgagaagcgccgaaagaagactaataacaaagctacgcctgtcatcaacttggagaggtggttgcagctcctaccaatgatgattgagattagctcgtcaactagtacaagaagttcaactacgaacaagtctttgtgtttaaat

SEQ ID NO: 15280 - DNA, 736 bp, Arabidopsis thaliana
ccagatcggaaaacgacgccaccaccagctcggccaacgacgccaccaccagtatggccaacgacgccaactccagccggaactcctgtcgcagttccagccgcagctcatgtcgcaattccagccgcagctcctgtcgcagctcctgccgaactcggagaaacaacttcacgaagaaccaatcttgacgaagtcatccgatctttcctcgaccgactcgacttacagaacacaagaactaccgaacgcatcaacgtgattgtcgctgcccagaaggcatcgtagaatcagatcgagcaactccagtcctccgcagctcgcgccggtcgacagctcagcgatgacaaaacagtcccgccccagtaactcttttcatggaaagaccggtgaaccgacgcaataggcctgcttctatcgttgttgggtccatcgacgagcacacccgtgaaaatgcgctgaaccgtgacaaccggccgaacatcgacactcgaacataccgaatagaagaccactatatcggtgcgagcgatcgtgagctctaaaaattacaaactactatgaaggatataactctgctcagcaccaaagttagacctttcttcaactgaatcaaccaacatgatgcaaagacggccgagcacctcaacataaccgttgaaagagtagggaatcaagcatacccctcaagccgacccggttactcacctgcacctgctatcttccttcaaaggctgcc

SEQ ID NO: 15281 - DNA, 888 bp, Arabidopsis thaliana columbia
cagttttatgggcatatcgcacaactcctaggcgctcgaccggagaaaccccgttttcattggtgtacgggatggaggcagttgtcccagccgagctcaatgtaccaggacttcgtcgaacagaagctcctctaaatgaagaagaaaattttgcgatgctcgacgactcgctggataccatcaacgagaagcgagatcaagccttaatccgaattcagaactatcaacatgcaacagctcggtactacaactcgaaagtcaaaatcagacctttctttgtgggcgattatgttttgaaacgtgtgttcgataacaagaaagaggaaggagcaggcaaacttggcaataattggaaaggtccttatattgttatcgaggtggtccggaatggtgtttacagattgaaagatttggaagacagaccagtccaacgtccttggaatgtggtgaacttgaagaaattttatgtttaaaaaaaaaaaagaataaagacacgcatcttttgtacataaactacggtgaggcttgatcctgaaatgggtacgtaggcagctcggaaacgagttcagttactaatgaaatttgttttattcatgttgaaaaagagttcgattatacgaatgaatgaaaaaagggagttcgaatatgcgaacatacaaagcaggaagcaaagctaaatttattcaaaacaaaaaacaaggaataaatgcagaagtcttagacacgcttcaaactaggaaatcctcctcgtcttgaagaacacctcgacaccttgactggcgatgtcgagaatgggcatcatacagtccgggatgcgggcaaattctgcgattccaagttcgatccagtctccggggtgagagttgagggtgtgtaactcccttgata

SEQ ID NO: 15282 - DNA, 600 bp, Arabidopsis thaliana
taacggccgccagtgtgctctaaagtaagtcgagcaccgtccttgaattatattgcagtttcaaactactttcatccagtcagagccattgagaatgttcgccagggcttcttgtccccgttgcttatcgcagccggctatatcacgaagcgtgcggcgcttttcatgtgccgccgcacgaagaaatagcgacaaccagggccccttggctgggatcacggtagtcagtcttgaacaagcaattgccgccccattttgtacccggcaactggctgatatgggtgcgcgggtgatcaaaattgaacggccgggcgtgggcgattttgcccgtgggtacgatactcgagtaaacggactcgcatcgcatttcgtctggacgaatcgatcgaaggagagtctagcgttagatgtgaagaaccctgaagatcacgaagttttgatgcgacttgtcagcaaagcagatgtacttgtgcagaatctcgccccaggtgctagtgctagattaggcctttcattcgagacgctgaaagaagagcatccgtccctgattgtctgtgatatatccggatacggacaagatggtctgtactgagataaaaa

SEQ ID NO: 15283 - DNA, 720 bp, Arabidopsis thaliana
caaacatcatatattaaaaagatcaaagattgacaaaacaaaccataccgattggaacatccggaacataaagaaccatggcagaactcggatcatcgggctcaacaaactcgagcacaaaaccctcaggctcaacaccatcggtctcaacatcatgggtctcaacaccaccggtctcaacaccatcggtctcaacaccatcggtctcaacagcctcgggctcaacatcatgggtctcattagcctcgggctcaacatcatgggtctcattagcctcgggctcaacatcatgggtctcattagcctcgggctcaacactagcctcgggctcaacactagcctcggtctcaatagccacattcacgttcttctccttattaccaccatcttccttctccttattcacatcggaatggaccttcttctcaaatggaggcacactctcaccggcttgtctcctttcaatggttacaagcctttcattgtgttccgccaacatcgccatcactctcttaaagccttcatcaatagcttccttcaaagagcaagagctactgctgcccggaacatccggaacatgtctcggaacattctcttcctccatttgctcgccgccgcttcgagcccggacatccgcttcaaacatatccttccagaagaatctcttcctctctttgatcaaacggtttctccagctatcgacaaccggatcaacaaacc

SEQ ID NO: 15284 - DNA, 819 bp, Arabidopsis thaliana columbia
agcccatgatcgattcttctcatcttgattggtcttactaccgcagagtgtcgaatattgtctcttaatcttgcatggttattagtttgttgaagtttcgtattctcaataattctcttcttttgcttactattgatcacattaaaagtctacttatttcagttctaataataaagttgaataacttctgtttcattatttgctaacctatttcctaagtttgaaattttggcaatgttatatgttgaaacaaagagaagcaaatgtgaacgaaataagttttattttgtccattggattgtaaagaaaccaatgagctgaatgtttaaaaagttcaaaagaaataacatcgaaaatttaacaaatgaagtccaacgaaaatgaaaatgatagcaaagatcatccacagtttaaagaaacttttatgaacttaagaagtccaatgttttttgatgagattacttgtcttgctccggtgtagagctgtaccaccctagagtcagaaactgagaagggttaaactcatcgttcatctcctcagaatgagaaggtcctatcatctctggtccggtgaatgaggaagccaataagttaggtatttcaggtgtaacaaccgcagcttgggactcattgttcctcttctgagaatgagaagggcctgtcatttctgcttgacgttggacttgtccagtgaatgaggaagccaatgagtttggtattgctggtgtaacaactgcacttgcgactcatcattcctcttctgagaatgagaagggcctgtcatctctggttgacgttggacttgtctagtgaatgagg

SEQ ID NO: 15285 - DNA, 591 bp, Arabidopsis thaliana
ttacgggtatgtgtttcattattcatagtttgttttcggttccaatattgtaaccctatccttttcttgttacacgtgtcgcctcgatgaaccgaatggtgcattcgtacgactcggctatgcggaataatatggaggcggttagcaagttagccgaggcggggtcccggattcaagccgccgagcgagagaaaaatgaagcgctctccgaagcaaccacgacgaatctggcaagggaggaggctgagcgggcgacctttataaacaaagagaacgccatcaagatggccaagcagaatcttaaggcagattctgagatcgttcgtctcaagcggatgtttgcccaggcgagaggacttcgtgatagtgaggtggcttgggccattcaaacgacgaggcgagaggtttcagaaacctttatcgccaagttgaaagctgccgagcacaaagtgtcgctccttgatgaggtcaatgaccaattcatgtacatgtcccaggcgcgagccaatacgcagctaatcaaggtgctcgaagaaggcggggttctcgataaagagaaagatcaagtcgatgagtggttgaaggattttg

SEQ ID NO: 15286 - DNA, 649 bp, Arabidopsis thaliana
tatgcatgaacaagcttggttatttttttcttcaatcacaatgaaatataaaacaaaagacaacttgtgtttccttgttcagggtgagtctcacgttcagatccaagacattaagttaaaaaacatatatggaacgtcgaataacatagtggcagtgaatctacaatgtagcaagagctttccgtgcaagaatgttgaactaattgatattaacctaaagcatactggactcgagaaaggtcattccacagcgatgtgcgagaatgttgacggttctgtacgtagtaagatggttcctcaacattgtctagattgactcaatggtccatcgaaaaaataaccttttgagttatacatgatatttttagttacatattattgcctaatttttgtatatattttatgttttatgttcttgtttatatgatatcatgatcacacatacaaattcttaatgaatagttctttctacaacaaaacaaatctacgacagaacggttaaatttttaacttctgaatccattagctaactaacaaactaaatcaagctatccctagacaatagattcaaaaccagatcaatccactttcatgacaatgatcctcataactttatcacttcctaatctcaactttcattgatgaaaca

SEQ ID NO: 15287 - DNA, 706 bp, Arabidopsis thaliana
gagtgatctaacttgatgtccatttctcttgatgcttcttcttatgcttatctaatggttcgtaggaaggaagcatggggctaatgaaaagtgtagaaaaattcaaaccgcaatccggatgcagattcgctacttacgcttactggtggattcgacaatccataagaaagtctatatttcaaaactccagaacaatccgtttaccggtaactacaaacttgttaaagaattgatcagacctgacattatctctactaaaggatctacttttaaagcaaggattgctaaaatctactcatgttgatacaggagaacgtatacatgctactaggcaaagtatccgaagccagaaaaacttgcgtgcaggaagggaattaccgaccaagtaaagaggaactcgctggccacgttggggtttcaacagagaagctggataaactgctgtacaatacaagaacacctctttcaatgcaacagcccatttggtctgatcaagacaccacctttcaggtaactgtctttgaagatgttctgttgactgagcaaaacccggtaataaccgtttaataccacaggaaataacaccagacagtgggattgagacccaacaatgagcgtggggaagcagctgatgaggaccatgtacggaacgcctcaatgtactgagtcaaaggagagaaggacatcaagctgagatttgggattg

SEQ ID NO: 15288 - DNA, 572 bp, Arabidopsis thaliana
tcatagcaatcgatgtgagacctaagcaagttcacgtgaagggtcacccaatgattacctccggtttggtggataatatacaagtgatccacatctgttatcaacttcttccgtgttgccacttctcttctcataccgttaatccactattgatacgcggtgtctttgaaaaaaaaactcttctgttagatcttgaactgattgtaatctgtaacctaataaatcgtgaaccacgggtctagaattatgacgcgttcgttgtggtatgggcagggatctcgctggagcctccgggcgaggactttcatatacgcagcaatatgctgtacaaaaataaaaccaacccagacaaaaaaaacaacaacattaactcaccattatctactttaactcaggcagaacaataccataacttagacataaccaactacaactcagtctgcacaccagaataaaccagctataatttatttaactcagcctaaacaacacgataactcagccataaaatagacaacctcagatagaatataacaataacttacttcatcacccaaccatccataatttga

SEQ ID NO: 15289 - DNA, 815 bp, Arabidopsis thaliana columbia
ggatcccctacattgagcaaaacacaactaaactcagctaaagtccaaacacgcgattttttttttttttatatagtgaattctatccatcatattacatggaaaatatctgtaatttttccaaacttatccaaccaccaaaatgcactttaaaactgatgaaaagtgcaaccagactagtgacacacattccatcgaatgaagagaaaagaaaacccaccaaaaacagattatccaaaagtgatcaaatccaacagattgttggttatcccgacacgccaacaaacttgtccttggggattgcattttaagagaaaacggtttctcataaccgttggaaattatatatagtctatatattcatatgatagtttctaatatataataatattattatttcatatttacattataaataagagttatctgacacatgatgtgaaagtcacctaaaaagatgtttaaaaaaaagggtaaattgcgcacagtagccgttgactcacttttaattttagattttgacattgtgggctgggcctttcatttcttagccattcagccaaaaactgatcaaaatgcccctgacgaaactgaacccggtttgtacgtacggaccgcgtcgttggaatccaagagaaccggatttgtacgtacactgttcatcgacgagaaatgcattaaatgttttctaggtttcggcgaatttgacacttgagattgaaattaaaaattttaaaaattggttgggctcagaagtttttcatgctaaaaagttttgacaaaactaaaactcatgattacctattataatagag

SEQ ID NO: 15290 - DNA, 670 bp, Arabidopsis thaliana
aagaatcatggttaaatccaatgtacaaagatactaggcaacaggaagacgtataacctgcgcgtacctcaagtgatgatctggcaaacttctgatatccctctgccagaaccaggtcgtcgggactcaggaaaccccacggttccggggagcatcaagttacgccaaagatgactggcggcctcctgatctctcacaaggaatttctcgccagaatacttgaacgtaaactggtcagaattaagagtctcacctcgtgacaggcgaaacgtcttcggagcagcagcttcatctagaccggcttcagaagccgacctcttcttggattggctagccaatcctttccctttctcctcacgggacctcctggatgccccgagctccgcaaccttctcacccttgtcttgatcaaggatggttaggcccgtgttgacctcttcgctttctggcgcggcggcataaacgacgacggagcggtcgccggtaacatttcgaacttcaggctcgacaacctgaacggattgactttgctcgcactcggcgatctcttgagctggaatgacctcggccccttcaagacacgtcttgtcttgagaatccggattgcccgtctcttgagagacttgatcaacaccggaagggccagcactaacgggaggatttagtgcag

SEQ ID NO: 15291 - DNA, 410 bp, Arabidopsis thaliana columbia
  unsure (1)..(410): unsure at all n locations
nnnnnnnnnnnnctaaagggatttcatcggtatgccatgactgggcgatcaactggcgcaggcgacgcatcagctggttgtgttcgtagtcagcgatatctttgttatcgagctgttttaaacaggcgttcacttccaccattttgtggatcagtgtacgacgggtaatttcggttgggtgagccgtgaggcccagttccagcgacagacattccactgcttttttgatggtgtcttcgctcagttccggctggtttttcagtttacgcagggtgcgggcgatcacttccgggttgctggcagcttcgcctttcggcaaactgctgtggtattgctcggcggtgttggccaggttcaggaactgactatacgcacgcgcaacgggcagcagctcgtcgttcgacaaattt

SEQ ID NO: 15292 - DNA, 345 bp, Arabidopsis thaliana columbia
  unsure (1)..(345): unsure at all n locations
nnnnnnnnnnnnnnnnnnnnctaaagccagtccacacggagggcaaccgcaaactgttgcaacgcgccttgaaactgccgcaggtcagcgacggcatgattcaggggaaatcggtacgtctgatcctcaaaaaagaggccacaccagacgatattcgccatgccgacgggatgccggaaatcaacatcaacgaaactacgccgcgttttgaagatgcgtttattgatttgctgggcggtgccggaacctcggaatcgccgctggggcaatattacatacggtagaaggcacacccggcgagacggtgatcgaagcgaaagaactgaccaagaaatttggggattt

SEQ ID NO: 15293 - DNA, 541 bp, Arabidopsis thaliana columbia
cactttgtagaggcaatgtcagctattactcctgctgcccatagagggtctgttgtgcaatccagaccactctctccggttgtgttgccatgtttacatcgacacctccttgaatccatgagtttaatatcagatatttttccctcgtcagccacgtcatcggagttgacgaagctgtcaatacttacatttggatctgcaattcctcttgtttatcgacctcgacttttgctgcttggtggtgaaggagttggactggtaattgcttgtcgtttcttgtgattatgtcttaaagctttattattatgaactgaattcacgtacttgttagtcgaacaggatcatcttgggcctgcaattttacatgagctagaaaagttccctattcattctctgggacttccatctctcctttcggatcctggtgcaaagacccagaagaagcgttagtacatatatttagtgaagctagaagaacaacaccttcaatactttacataccaatgttcaataattggtgggaaaatgtaagtgtgttttt

SEQ ID NO: 15294 - DNA, 536 bp, Arabidopsis thaliana columbia
  unsure (1)..(536): unsure at all n locations
nnnnnnnnnnnnnnnnnnnnnctaaaggatctgccgcttggcaggcagtatctgaaaatcaggttgatagcgatactgatccagatcgctcagattcgtgcgcgtattctgggcgtgaacgtgaacacctgccgcaatatccgccaatgcataaccaatcggcaggccatatttgatgacattggccccttttgcgatatccgttaacgcaaatttatgtccacgagcaacatcctggcgcacggtaacagtctggttatcgacactgacttctgtgccttcagccaaatctgctaaagcgaccgcgacgttatccagcgcatggatcttgatgtattgcatatcaaccccagaccttagttcagttcaatggcgaagtagtcacgcgcattgttaaagcaaatatttttcaccatctcgcccagcaggttgatgtccgccggtgcttcgccgcttccacccagcgaccgatcatctggcacagaatgcggcggaagtattcgtgacgggtgtatgacaggaagctacggctgtca

SEQ ID NO: 15295 - DNA, 543 bp, Arabidopsis thaliana columbia
gtgtcaaacagaattatgacataaattttataattgcaaagcatctgctaaaaataggatctaatgatgcgtgaagtcttgaaaggatccaatacttgggggacatttcaaggagaacagttactgagaatcttctaagattcaaacaaaagagaagacaccattaatttgcagaggagaaagaaatagagagagatgaccagaaggcagaagaagacggcgaaggtggtaacagtggtaatgggactgtgtattgtcgcatatattgcaggaccgtctctgtattggcatctcaatgagaccattgcagattctctccactcctcttgtcctccttgtgtatgtgattgttcttctcagcctctcctctccattcccgacggtaatcatcatcattatcgttgtctttcctttcttctttccctggtcacaaaacccaacgttttgaaacgtttgattcaatgtttcttctgcaggattaagcaatcacagtttcttaggtgagtatttttctggtaataactttttatatatttagtaaga

SEQ ID NO: 15296 - DNA, 503 bp, Arabidopsis thaliana columbia
taacggccgccagtgtgctctaaagaatccttttaaatatactcatgcaccagacattagatatactctttgtataatcctgctattctttataaaatacaatatcgaaacccattgcaattaatgattcaacaacgcaacccattaataatttgcatatgtatacaataatctttgctttaattatattatttgtgttgtaactccctatgattatttattaccaactcctgggtcaatgcattaccgtctatgcaccgacatgcaagtcctgagcaattagaataaacagttcgttatcttacacaaactgtgcatctatgtagtgctgacaatattgataatctgagtaggtccgcagtatatataaaagaggtctttgtcagtagcggtgtctgagttacctcgcaggactgtcacattacgggtggtgcctacataaacattgttgctgattatggtcctgcctatggaccgctgattattattggtgcgcattatga

SEQ ID NO: 15297 - DNA, 719 bp, Arabidopsis thaliana columbia
ggcatacctattatctaagatcaagttctagttagctactctagaactagcaataagaataatcaagatgaagaactctacagataacctagaaagggggcaatctactaaatcatctataaccctaatgagaaaccctaaacctaacaagaaaactactcaagcatgatgaatgaagcaaacaacatgattgaataagaaatcaatgaataaaacaagaagagattaaggtttagaaggatcttctctaaagggagtctccacagggttttgctcccaaagtacaaaagagataaagagaatagcctctccaagcttaggtctaaacaatgacctttaaaactatatatatgacctaaaacacgtgatgggccttctttagacataggagaaagttttgggccgaatttggaaatcttcaaaacatcaataagttgcgtcttcgaattatcgtcaggtattggtgtcgctcgacaccaggggtggtgtcgttcgacacctacgtgcatttttgtctctggattgcttctgtagcttaagttgtctgttttgctccataatgctccattatctccaaatgaatctcaaacatgtaaagacctgaaaaaaaactagaaaagactctagaaataactaaaggactctaaaacctatatctaaatcatagctaaaaccggtaaaaatagggttatacactaaggaaagatgaaagtgtgact

SEQ ID NO: 15298 - DNA, 920 bp, Arabidopsis thaliana
agtcttaatcaagcatcctttagtttgtgttccaatttgcacaataatagagtagataaactaaattagaatatatattctttatattgtgccataatagaattaaattatagattcttttgttaacaatatattttcatatatattgtttcctaatttgtaatcactttcattattaaaaatattaaaaatatttattacttatttctctccataattattaacttttcttaaaattttgttattaagtgtctcaaacattatagtatcctgtgattgttactaatttatccacgcagttaagacaattggtatttatataacaactccaattaatataacgataaaatattgatattatttcctaaaatgtaagacccgtcaaatttttaattttattaataattgagttattcaaaatatattacagaatattcaagattacgaaatgacttgaaacatcatgactattattacttttttaaaagttgcatctaacatgcctctacgatgtatttctctctcttatatatatatatcggtatcattagcatctcataaaacgaatacaaaaaataactaagaaatttcagcgaaaagatggaatcgtttcatcctcttacactgttgaaaccgtctattacaggatggtgtattcgtgtgagagttgtgaggacattcttagttccgctggttccatcttcaaaggttatgggtttgcttctcgtcgacgaacatgtaagtattgactgttttgtaatgataattttaggtttgcatgttttagagttttgattagtatgtttgatccgtagggtatgactattgaagctactgttggatacaagatgtcagatcactaaaaagattttattaataacagagaatgggcaacgataacaaggtttggagttgatgag

SEQ ID NO: 15299 - DNA, 524 bp, Arabidopsis thaliana
ccaacaaaatcggattaacaatatccggtggaagattaaaagaatggaaacctaaaggtctttaaaaaacatagttcgctaacccatccgctagacggttagcctccctatacacatgtgacacacggactaaccagtcccttgataaaaagccatagcacaagcgtactaggaacgacagggggtgagagtcactgatccctgaagttaaaaaccccaccacaatctccgagtctacctctagctccaacctcgcgacccgcctctcccaagctatgtaaagtccatagtagaccccccacagttctgccaaaggagctgtacaaatcccaatattaagcacaaagcctccaatccaattaccttcctcatcccgcaacgcaccacctgcagtcgcctctccagggttcccatgcgacgccccatccgtattcagcttgacccagccctcatttggtttctccatgagacttgtcgctctacctgcacaatctccttcgtattcgcggagagctttaagtgag

SEQ ID NO: 15300 - DNA, 588 bp, Arabidopsis thaliana
tcaaacaaactataactgatttaatgagccattcgcagtttcacagtctgaattcgttcatacttacacatgcatggcttaatctttgagacaagcatatgactactggcaggatcaaccaggtagcattcatcgatcacggcaattccccgccacatcctctcaaacgcaatggaaagagagaaaggacgaggtcttgaccgtcatcttttgcccgaaggacggatgagctttggcgggactgaatcacttcgagtcaccgtcgacaacttttccgcatccgagatttcaacccgcaactcattcaccaatgcgagcaaggcaacaaatgcgatgaccgtggagaatctgctgtaacatgttcttcaagtctgaatctggagttgttgaagctggttgttgttgctgctgtgtgaacctaggtggtggaagttgctgctgatagttgccctgatactgctgcttaggaacataaccctgaccttggttgtatggaacaaagggcttgggttaattttgctgctgtgaagggtagacttggtcctgcgggtttcaacatttgtacttttgtaagacagattgggatgg

SEQ ID NO: 15301 - DNA, 730 bp, Arabidopsis thaliana
tcatctacgcattcagggaggcagagaccatgatcaataggcacaagctcagcggtcccaagtcgattataagcttcctttttgtcacatctcttcactagcatatttccagcatgtctgtcaaggttcaggagtctcacatcaagtattccaatcctatgaaccgaagtagccgtgaagcttcctggacccaattctcctgcatcaaaatcatgacccacaaatcgctgcaaggaagcaaccttatagggcatggaggagaaagagaaggcatcactgacatggaatgggacatgtgagatactaaccaatgctgttggtggaacaccagaaaagccttggtaatccaaaaggtaggcagctagttctctgatacccgtctcgccaacaggaattgaatgtttcattcccggttgcccgagcatcaaatttccagactttttaggattattgaaagctagaggctcttcatcaaccggtttagccacagcaatgttatgtccctttccggtttgcaagagataagcacctcccatgccacttggtaaaagcaaaggctgagctccagaaaccatagccatggtcacctcagccacaagagcacgaacggtgggcactctctgtccaccaagaatctcaatccgtggagccgtggttgctttgagatcttcctccatattagcagacgcagctatggaaaagcaaggagaggaaacactacgatggatgt

SEQ ID NO: 15302 - DNA, 1009 bp, Arabidopsis thaliana columbia
cacgcgtcaggaagcgagcgctgccgtcttcacgttgctaaacaccgccgtctccgatcaaccaccgccgatcagtgcgatgggtagactgttccttcctgccgatctccactccaatcaaaagaagcatcgaaatcatttaccggattaaaaggtagagctgcttcacaaattctttggaatcaccagtttcgggagactccaccaccgattacatctatcttgatgtagtctaaagtccatttttgctcttgcgtcttgagcaatcggaggtgacgaagatgttaatccacgaagaaatggagacaacaaagatcttggaagaaaacgttgagatcgatgggtgagcaacaatggagataaagatcaagttccgttaaaaacggagaaaagaccggtcatagtcggtaacagaagatccgatatgtaatcggaaattattgatctcgcatagagacgagaatataaacaaatccggatcaaactggagacaaaacgattatcaagctctcctctctgaaagattttggagagagaagagaggagagcttaagataaaaattttaaattgtaagtttgtaaccactgacgagaaaatgaaatttgaaaccacttaactccaactcgtaaactacaggtctatcttttacagggtaaatcgatgacttgacgttgatattgaaataatatgattgattttataatgcataaattggttatgaaccataaagtaaagtagtttgttgtcacatcacattgtagacatctttagctctggaatcatgcggctgatgtcaccccacccattaaagcacactgattgagggtgtgatttttacatatctattggtcctcaaacaccatttatattaagttatcggaaagatactttctggtagagagagccattcaggaaccaatatgcttacatggaagaaaaggctattacgagcccgaactttcttagctaaacaatctgttcgagtattagaactacgaggaagaaatc

SEQ ID NO: 15303 - DNA, 1045 bp, Arabidopsis thaliana
ctcttcaacgtatggacaattcctatttgaaaagtagccactgacgatagccactgactataggaatcatactatggacaatttctcactattcatgctttgtttgttcacaaaaaacgatgagttccaataaaccctattaaataacaagtagaactagttccaataaacccaaaatgcaaggacaagttgttcaaaagagacgactagatatagttacagaaaactgactataatatttttcacgtttcaaatattttttgtttcaagtattttttacttttcaacgtacacaattatgcaatcaaactattcacgctccaataaaccctataaataaccagcagaagatgagttaaaaatcacaaatcatacactttcattttcatacatgagcaatattcaagaaatggaaatgacattgatggtttctctgtgcttaacgaccctcttaacccttctcttacttaaaaaattcctcaaacgaaccggcataaaagtgaacttaccaccatctccatggcgaattccagtgattggaaacctccaccagctcagcctccaccctcaccgctccctccactccctcagcctcaggtatggcccactgatgctgcttcattttggccgtgtccccatactcgtagtctcctccagcgaacagctcatgagatattgaaaacacacgatcttaagtttgccaaccgcccgaaatcaaaagccgttcatggacttatgaatggtgggcgtgatgtggtttttggtccctatggagaatattggagacagatgaaggtatttcattactaagccctctttcatatatatgtatatttatcttttttataacttgcacccacacatatatatgtaccacaaattctcatatatagtatatatatcctttaatcaactgataatgattttttgttgtggctttggatgaagagtgtctgcattctcaatctactcaccaacaaaatggttgcatcctttgagaaggtaagagaggaagaggtaaatgcaatgatggagaagctagaga

SEQ ID NO: 15304 - DNA, 559 bp, Arabidopsis thaliana
gacttgtgaagggaacacttgctttgaagggaggctactatgacttcgtcaagggtgcttttgagctttggggacttgaatttggcctctccgaaactagctctgtatgaaccaatccatcatcatcatcatcatcatgaccatccatcatcatcatcattattatcatcgtatataatatatatctaccccatatgtaatttgtaatgtgcctttgactgtgatgagttatctctccctctctaccaactttcttcatatatataaaacaaaaaggaaaagcagatgatatagatctttcgtggtttaattatgaacaattgtctttattatttgtgtatcaaatcggttgtatttatggtttgattttattttctatgttgtttggtaggttaaagatgtggctaccatactacattggaagctgtaggaaactctttgaagccttacccgatttcacattgtcaattcaataacaccaagttgttgtttacatgcagatcttgatgaaactggtttttgattttacagaattaaaatcttgggggacagaatttga

SEQ ID NO: 15305 - DNA, 946 bp, Arabidopsis thaliana
gtgtgttgggctttcgatatcgtaagattacgaatgagttttaaatcgtagtagaaacaattgttttgtgaacatgatattgagtatcaaaattttcttttattcttatctcgaaattgttaagtacaaatgaggtaaagcaaacgatgatctgatgtctggtcacctagaaaggacctgcttggtatcgagggatggttgaactgttaggtgagcagctaaccttctttgatggaagttgtgatgtttgttttccttgttgaagaaaaatgtttcaaacggaagagttaagacggtggctgcgttcgcggagggaactgcctacatacctggttaggggattaagccttatcgtagttcgattgaagtggtggctgcgcttttggggggctctgcctaggtaccttgccaagggatcaagccttatcgtagtttgattgtttttgagtacctattcgtggtatttcttgagatgcatgacattccaaggcctattcgtggtttttgagtacctattcgtggtatgtcatgtaccacctcgatgattcgatagggatcttcccagttggtttccaactttccggcgtttagatctatggtgttgctgaacacttttcgtagaacgagctctcccacttcgaatctccgaattttgatattgtggttatagttgcgggcggcagcttgttaatagttttgaactcggatcattgcctgatctctgcgttcatcgatgaagtccatgttttcctgtaacatttgcgtgtttaggtccgagttagcaggactggcggtccttctcacgcttggtactatggtttcaacagggattactgcttctaagccataggggagagagaacagtgtttcttgcgttgatttgcgaggtgtaattcggtaggcctagaggactgtgtggagtacgtcggaccacattgattttttg

SEQ ID NO: 15306 - DNA, 537 bp, Arabidopsis thaliana
tctggtcgcaaatgttttctaatatgaatgtatgaatattgcaggaggcagtgaatgtgtcactagcaaacctattgacatatccatttgtgagagaaggagttgtgaaaggaacacttgctttgaagggaggctactatgactttgttaatggctcctttgagctttgggagctccagtttggaatttcccccgttcattctatatgaactaacacatcaccatcaccatcgctaccaccaccatcacaaacatcatcatcgtcgtcatcatcatgatcagcatcttcatatataaatgttttactcttatttaattgctacttgtaatggtatacatttacttgcgatgagcttcttttccttcattatccagttataaaataaataaatagatcatgtttactttcacagatatcgttttgctgaagttgctttgatttacaacacgagagaataacaaaatcgtataaattttatttatttgtcacacgaaatttgagaaatggaaatgttattttgctatttcattgaatgt

SEQ ID NO: 15307 - DNA, 841 bp, Arabidopsis thaliana columbia
ggtagacgtcaagaatgaggcgtctacctcgggccctgaaccggcaatgaaggagcctgttctcgagcctctttcctaaatgtcccccgaacctgagtatttttcccttttttccgtttagacttacttttgggcttcggcccatttttatttaaggaagctttcctcttttccttgattccacaaatattcgtttcggagatattctttgaatgcaaggcaattagggcgacgtgaatacttccgcgaatcactccacccttgaatggaatcgcatctttgaaagttacgagtccttctataaattgcttctctaggttttctttatccttcatctaactttcgtttttccttttttgtagttatggctttcaacctttgatgctcggagtccatgccagacttttccagggtcgggatgattgatgaggacatcccgaacgtgatggacagagggcgctccccacttcgtaatttcagatcccatatccgagctccgtgtgcattgatcaaggatctttcaaacagagatcaagaaattgtgatggccttcatcaaagctcttgcggctcaacaccaaaagcgttcatcagaaaagaagaaacttcaaaagaagatcaatcagatgctgcaaagagtcaccgtgatatcaagggagctacacaccctcaagtctcatcccggggactggatcaaactttgaatcgccgaatttgctcacatcctggattgtatgatgcccattcttgatcttgccaaccaaggagtcgaagtggtttgcaagacgagaaggatttcctagttcgaagtgtgtataagacttcaacatgtttttgatagt

SEQ ID NO: 15308 - DNA, 927 bp, Arabidopsis thaliana
ttttttttggtttttctatgcctgagatgaatgcagactcaaaaatatacccaatgcaacacaaacttcctgagccctcccccaaacttaaatcacacagtccactgtgtgaataaacttggaagaaagtactcaggacaaatccaatcacagaaacaaaatgaagaacaactcacaagagatgatataatacaatgatgaagtgaggcgcttacctcagtcgaagaatgaacgaagttgtttgtcaatggctgcctgtgattgctcccaggccatagactaaccgccttgttccgtatcagcaccaccaggagggtactcgacctcatcagctctgtggcggcaagcactgccctgaggatactcgaactcccttcatttgctgtggccagcaccgcgttcgagtgatctacgagactgcagaagtcgtctgctcctgctgctagattgagtgagtgtggtcctcctcttccttccagattcacgaggctcgaatgatgaatgcctcgcagggacatgcggaatctcctgctctctaggcttaggcctgcgccgacttggctcgggcgcgtcatatctcctcgaaggcatgtcctgagggagctgtccctgcggaatagctgtagtggaggaggaacaactcagcttatctgtcagaaacttgatagtcttgaaacacttggcgagcagcttgtcctgctttttgcaccacttctgcagtttactattgttcctatgagcttcactcaagctcttgctttccctcgatggaggtatatgctcgctgaaatgatacatgctcgtgtcaaactccgcctcatctatatcatctgtctcatcaacatcttctattgtagctgcttcggtgtgactaacctcctcagttggcggactgccctcgaaataaagatcttcaagccaagcttg

SEQ ID NO: 15309 - DNA, 920 bp, Arabidopsis thaliana
atgatcttgcaaaccgcttctccttccacgcatgtcattaagggtccggataatcgccacttgtaaagtttttcatctactagaacgaaacgtgcagcctgagctttgagtttcagggctttccatttgtccgagggcaatttcccttcggatatgtagcttttgatgggttctatccattctgagttgcagtcatctgggtcgtccgggtcgtcttgatccgcgccgatttgtattgggaggacgtgttcttcttcgccgagctcaatacttggcttctcaataaattctacttggatgactcttctcaggctcgggtcagatgtcgaggctagagcacctagggcgtcagatgatgagccgtctacgtgcagtagccaagttgtatcgagtggatttcccgggcctccataatgggcagttcgacgataaaatcggctaggacctgggattttgcacatgttttgttccgatactcgatgtcatactcgctgagtttgattgcccatttagctaggcgtcctgattggcttggactgtgtaagatggcgcggagcggcatggatcccattactatgatggaatgggattgacagtagggtcgcagtttccgagccgacattatgactgctaaagcgagtttctccatttgcgggtagcaagattccgcaccggtgaatgtctgtgagacgtaaaagatcggtttctgttcgcctctgtcttctcggattaacactccgctaactgcggtatctgatacggcgatatacaagtatagtggttctctgattacgggttttgcgaggataggtggtgttgccagatacttcttgagttcctgaaaagcttctccgcatcgggtcgtccattcgaatttcttgtttccccgaagcacatcgtaaaaggccaagcatttgtcg

SEQ ID NO: 15310 - DNA, 639 bp, Arabidopsis thaliana columbia
gtgctctaaagatgcaagcctgggggcagccgacctttgaaggaacgcgacctaccggaagatttccgacccgaagcgggttattagggctactcggggcttgtcttgggatccaacgtgatgatacttcttcattacaggcgttatcagagagtgtgcaatttgcagtgcgctgcgatgaactcattcttgacgatcgtcgtgtgtctgtaacggggttgcgtgattaccatacagtccttggagcgcgagaagattaccgtggtttgaaaagtcatgaaacgattcaaacatggcgcgaatatttatgtgatgcctcctttaccgtcgctctctggttaacaccccatgcaacgatggttatctcagaacttgaaaaagcagtattaaagcctgggtatacaccttacctggggcggagaagttgcccactaacacaccgcgctttttttggggacagtgtcaggcatcggatcctcagaaggcgctattagattatgagcccgttggcggcgatatatatagtgaggaacagttacagggcatcatttaaaattacggcgcgcgacgaactgatgatcccttgcgtcgacaatttgcttcccgagaatggtatgtgattaaaggaggaatggatgt

SEQ ID NO: 15311 - DNA, 652 bp, Arabidopsis thaliana
cttctcctcgaagatcacacacttagatagacccaccctcaatgtcgaaacaccagtctcagtccaacaatgctcatcatctccaataagatacctgttgtgatcagtagacagcgttgtcttcccggtacctaaaatcatcattcatagaaaacaaaaaacacaatcatcaatctcaattcacccgctaaactcaacaaagaggcaagcagttctcaagtcagttcagcagtaattgtattgtatcatttgatttatcgttccttccatcatcacccaacaccatagttggtactgtctctactatacctaaaagtccaaagaagagggcaacatctccatcttttcccatattgcatccagaatgatgggagagaatacgacgcttaggcataaggtaatgcatcacactgaaaagacccttcttcatttccccagcatactgagtaccaagtataaccatttccctcctagccagattaaggtctacgctagtggacgaagtcatgtaatgagtgtaacgattacatggaaactgcccagcattgtatatagtaaaatccggagtaccaaagctctcaagctcctcctgagttggtcggatacacctgacaccctccccagttactaatttgttgttttctttcaccac

SEQ ID NO: 15312 - DNA, 459 bp, Arabidopsis thaliana
gaaatctgcgcttaagcaggcgatcgggttgcttccggagaatgcattggttgaggtttgtctcgtttgggaccgcaggcgcatgttcacgagctcgggctgttctgatctgactacagtttatgtcgttagggcgacgataaggagatctccacagatcaagttttggagcagtcagggctaggtgcttctgggagacgaaacccgagttagctggtatctccaatgaggagagggagaattctgccaagatcggctaggcgggtgttaatagattcttgttggcacctgctgactgcgaatacgcgactgatgagcgtagttcagcccacatatgtaggattggagcatgagaaagttattgctaatctactatcatgtgagggaaaagaggtagcgcaagatacaatgaacgctggagatgatgagcaaagaacggagtaagatgaacaggagtgt

SEQ ID NO: 15313 - DNA, 516 bp, Arabidopsis thaliana columbia
tcgaacaggtggcgcgcaggtttgactcggccaaacttggtgtacatgttaatcaaagtgttggtgtgcaacacactcagacgaactaatcccttgacacaaagcgcatgcacagctctccccgtagtctctatagtgatttgagagaaaccaatttgatcgaaacaagatatttccgggttccaatggtctgagagcgagaaacatccactcaatctggtaactttttttccttccactcttttcaaacattgcaatgtcgagattcgtcgcgtcttgaactggcgggagacagatccactgagcaaacgagaatcgccgccctgaaaaaacaggactttgcgtcgccagctggccagctctaattcgtcggtgttcaacggtggttcccggaaagatcaacgatttgaaaccaacctagaaagcaaaaaagactgctcttttaaatcaaaaaccaaaataaccggaaaggcgtaccagaaaccggaatcactggactatataaaaccgttttgt

SEQ ID NO: 15314 - DNA, 518 bp, Arabidopsis thaliana columbia
cgccagtgtgtgtgctctaaagcagatccggatcgccctgaatgtaatgctcgacatacgctttttgcgcgttgttcaccacctgcacggtcggatcgtcctgcaccagcgccagatagctatacatattgtcggcagatttaccgattggcttgctgacgaactggcgtgtggcatcgtgatcggctttgagtgtttctaccagcttgctgtcttccgccgcgagggattttttattagcgatgtcgtaaatcggtcgtgcttccgctttcgcctgcgtcacctgccatttaccgctgtcattactgagttgtaagtcgaccacaccaagatgatcgccccacatgcctggcattaccgccggaacaccattcagcgtgcctttggcgatatcagccccttcgatatcagcaaaatctttacctgggaaaacggcgtgagactggccagacataatggcgttaacgccgtgaatttcactgaggtaataaactgagtgttcgccatcactttatacg

SEQ ID NO: 15315 - DNA, 1277 bp, Arabidopsis thaliana
tcatcaggcatttacctttcatagaaaacagttcaaaaagcaatataaagccaaaaaacgaaaaaaagattatcctgaaattaatccacagtactggttttttttttttttaaaaaggagaccgcgtttctacgctgactttcaaatcagtcgcgtcggtattattccacacgccttttttctcgtccccatcctctatccacatttctctctatatatactctcctcgtatcctaaactcatcctcaaattcaaaatttaacacacaaacacaaacacacacaccaaaaaaaacacagaccttaaaaaaataaaaatggttgatatggattggaagaggaagatggtatcatcagatttaccaaactcacctaagctttcttcaaagcttcacgtaactattccatcaccgttcaaaatcgtccctgtttcatctccgatctcatgttcagcacctgctctttgctctgcttacgagctttaccttcgtctccctgagctaagaaagctctggtcatctcgtgattttcctcaatggacatcagagccgattctcaaaccagctcttcaagctttggagatcagtttcagattagttttcgccgtttgttctgatactagaccgtacatcaaccaccgtgaatggaaccggaggctagattctctcatcacgaagcagatccagcttgtagcagcgatctgcgaagatgaagaagaagaaggtatatcagcggaggctccggtcggcggtggacggagttcgttgagtttgttaccgcagctagctacgtggaggagatcagaggctttggggaagaagatcttatatacgatcgataacgagatgagtcggtgtaagtacacgctcggactcggtgaacaaaacatcgccggaaaaccaaatctccggtacgatgcgatttgccgaccaaacgagatctatagcctcaaggataatccatacgcagatcatatcgataatcacgagaatcaaactctctatatcattcaccagatcctcgaatcgtggatctacgcatctggaaatcttctgaatcgaatcgtctcaagtatcgaagaagagaaattcggaaaaggcttcaaacgatgtttacttgctggagaagatctggaaaattttagcggagattgaagatcttcatatgttgatggatccggaagattttttgaaattgaagaaacagttacagatcaaatcgacgggtaaaaacgatgcgttttgtttcagatctaaaggattagtggagatgatgaag

SEQ ID NO: 15316 - DNA, 419 bp, Arabidopsis thaliana
tggcacgaactcgtcttcggatttcaactcgacattttcccttatgaccatcactctcttgttgatacattcattagcatagtgcccacatccatggcacttgaagcatcgaagatcacgagttttagtagtggtggcgctatcgggcctggttttgtattgcccctgtgatagtcggaaaatgttttaggcccgcctttaggaacgaaggctggttgggcttctctaggataacttggccggttaaagtcataggtcggccgggatgatctatcataggctggccgggatgatcctttcctcttaacttgttgttccactaggatagccttgtgtagcatttcctccaattcttcataatgttccatctcgacatgaccatgaatttctcaatttaatcctcccaagaaccatgacat

SEQ ID NO: 15317 - DNA, 952 bp, Arabidopsis thaliana
gatacaaggcagtgttacatgtgtttagacatccaaggcatggtgtcttcccacctctattcgatcatatagcagaatttgggtggctttgtgctcaaagttttaaggacaggacaattggagatcttggctcatggccacatccaatcatagtccgctttctccctcgttgccgcacttgggcgagcttgttaaatgtggcggaccattgctttgaggagttcctatacgctgtcagtatacgatccatcacattcccgcatgaagaatgcattgagagtaacagctttgtcttcaggcaaggtatatatttagatcaacagctttgtcttcaggcaaggtatatatttagatcaacagctctgtcttcaggcaaggtcgatgtgacactcaagccaaaatcgattagtaccagctgattaaatcagcctgatttgtccacttctgactaacatatgtgatgtggtcaaatcaccgtgagccaagccaccatcatggagcttagcgatggccgtcccaatctgagtagcaacatcatctaaccgttcctcaacaaccccattcgccccaaaagtcaaggagaatgtctttaacagagacgccctcaatgtactcaagtgttaaagagtgaagcagagtatccacagcatagatgactggagtacaaacccctagctttcttgcctttgtcatacaagcgtttgagtgtgagtttggcatccaaaatcgggtggcgatatttcttcgagaaacgttctttcacaatggatcttcttccagaaaatgtagactccaataccctagcttctgctccttgttttatcagaactagcgattcattcccaacgttttcctcacaatccatcctatttttcatttagacttgtcacctttcccaccacgtttgttcttagaatttatctcaaaaccgccttgttcaaattatggcttc

SEQ ID NO: 15318 - DNA, 947 bp, Arabidopsis thaliana
ccagctaatcccctccaatagaagtcgatgaattagatgatgaagctattgatgatgatagtgtttatgttaggaatgattatgaaggcttgttagtagtagattgatgtataggtttttgtggtttttgtaaacaatgaaatttgttatggttttctaaacatttaaatattaattttaatttttttttaacatttaattgattgaaataaaaaatatattataaataaaaatgatttgtaataatttttaataaataaattttgaataatttaacaacaaactaataacacgaaacatttgctatctttgatataggtcaaaatcaaattaatgagttttaataacatttgaatcatgttattaagaatattaacaattgcagaacagaaagcgctatcgttatataaataactatagcacaacaagaatccgctattaaatgtgtccgacctacgataacaggcgatctcagagcggttaaggaaacactattatataaaactaatagcgtttaacgcccgctattaatacccacatttcctgtagtggactgataatgacttagtccgagtcggcacaacatttaaatatcacgagggttggcaagcctaaacgatgtttaagtgggagagtggtcgtcaatacaccagccaagggttgggatgggttcccgaacctcggttggatattgatgatcaatctcaatgtggcgttttcgaggcgcccgttacttgtccggtcatagagcgtctcgggggtgttacagatagtcccaattaggagctcgaacaataggagcagatacaaaagcttccttgatggtgtgaaaggatttgaggcagtcctcatcgaatttgaacacggtctccttacacaatagtctggttacggcttggttacttggagaagtcttaataaatctctggagacccagcatgccaagg

SEQ ID NO: 15319 - DNA, 521 bp, Arabidopsis thaliana
cactttgtagagattctcttaacaaccctcaaacaatgatccataaactgaaaaattgtccataaagaccaccatgaagtcctcaataatgtctgtaaagatagacatcatacctctctaaaaaggttgtagaagcattgcaacgaccgaaaggcatcctgcgataagtgaatgtaccatatgggcaagtgaatgtggtcttctcttggtaatcgggatgaatggggatttagaagaaacccgaatatccatcaaggaaacagtagtccttgtgattcgctatcctttccagcatctgatcaataaatggtagaaggaaaatgatctttcctggtagaagcattcagcttccggtaatcgatacacatacgatggcctttaatcgtccttgtaggaatcaattcatccttgtcgttcttgaccactgtaacacctcctttcttaggaactacatcgattggactgaccgaactgcaatttgaaataggatagatgatccgtgcttcgaacagcttcatgat

SEQ ID NO: 15320 - DNA, 797 bp, Arabidopsis thaliana
tcatagcttcagcatcctttccgttgtacaaatatctcccaagtcttgtaaaaatttgctcgtatgccaagacactcttttgcccttggtccaaactcataaactgcagctccagacaatcacgtgcctccggtggaaattacttagactcaaactccttcttaaacatttcccatgtgataggctggtcgcgatatcgtgaaacaacgctatcccaccaagctcgaccatcctcatctaaaacgtttaccgctatctggcccttaaagtcttccacgcaccttgtagtttcaaaattcatttccaggttcctcaaccacttatatgctaagacagtattctactctcctttaatcttccgaacacctagatcgttcatcatcataaccagctttaagaacttagtcgaaggagattcggcacgctggctttcctgcatctattgttggtgttgctgttgttgaatcatgtgagtcaacaaggtctgaatcatccccaacgtatgttgaatctccggcacattttgaacattacggccttccccatttcctttattaacttcccttggtagtgacggatctgggtgtacggtaggttgattcacaggaacatgtggtctcgtcccggagtgtgacccttcggatgtgctatagtgcacagtctttggtaaggagtattctggtgtggttccggggacatccctatcaggcgctccaaacatatttggataattgtatccctcatctccttctcctccaacatacggtaccagtctcccagaccgaaatgatgactcc

SEQ ID NO: 15321 - DNA, 501 bp, Arabidopsis thaliana
caaatgctctgttttgaaaacagagtccatgaattaatgctatttgtttgcatatatgcagtggatatatggctcctgagtacttgaatcatggacaaatctcagctaaatctgacgtttatagcttcggtgttatgcttctagagatgattagtggtgaaagaaacaatagcttcgaaggagaaggacttgcagcttttgtaagcttcttcacaattttttttttttttgaatatctggaagttttgggccgaaacccgtaacctcccccctgacccgaaaccacagcatgtaatattagtttcgtcccaagcgttactcgaatcggcgacttctaagattcgcctaggatctttaccaattgagctaacgacgtttggtctttctaatcttagttgatggaacattgttttaactttctttatgtaaaaatcatcttttctcgatgtagcattttgttgttattgttggtgttgttgtaatgtgatattccttaaacaa

SEQ ID NO: 15322 - DNA, 1186 bp, Arabidopsis thaliana
tcttcatctagtaaagtgtaatataagggatgatcgggatgacttggatggacaaacggctcagagattgaaccgcacccaacatcgaatgtaatgcccgaatactggtaactgaaaccattggaaaatctattacaagcttgacactgaaagaaatcatactcgtatgaaactagagtaagacgttcattgtgtagcacatgccatctctttctaggaaatccagcgcagttttggtggagaatgaagtcacaatccatacagccgtagaaagattggagacatatgggatgagtgcatgctctgcaccgcttcttgtcgtcacaaagaacaccattaacgtggagtcttaggtaatgttttttgtggctgaaatgttgtattgtgttgttgtctattaccacaaatggtttgatatcttgtgtttcttcaggtactccttcgagttctttcccgttccacacatctttgttggtagcacattttgaatgaacgacgtagccggagcacctctgacaagaaaaacgtccacaagtccaatccaccttccggtgacaaagttcacacacagaattcacaacaccaagaacagaagttcgcgaaacacggtgatcatgccgattaatgtttatgaggcgtggaagggaaagacagtcttgatggatcatgaaaccacattgaaaacacacgtaagggcttcgatctcccttcagcccgcaagcattacatgtaaaagaatcaagtcttgggagaagggtgagttggtgatcatgagctttcaaattcagaagagattgttgtggtggatgtagaacacaacgcatatccaaggtgaagttgcaagaagaacaatgataaaaatatctatcatcaatctttcttgcgcaaagacgacatgctccatcagaatagtccggtcgttgacctgtgtggagcttaagagggtgcgaggggtggtaagagtggtttacctctaaagggtgatatacctctgacggatgccatacgcaatccacatggaaggttaaatcacactcttgacatttgtaagcaaattcattaccactaatctttccacatttagcatcacaatcgaacgccgcgatccgctccttgagaagggtgagcttgtggtgatgccctcggaatttcaataactctggcggtgggtacatgccagtgtaga

SEQ ID NO: 15323 - DNA, 406 bp, Arabidopsis thaliana
gagaggaccaagaggaagtgaggataaatagctaaaagagatcaaggctctgaatgaacagctagaaaagctgctgctggcacagcagcagcatatacactacatcactgtatgaagagcacttccatgtgcacgcaggagagggagtgatcagaacagatgagctgtgcaacatgcagagccatggagggtacaaccagggctagaacaactacaagcccaacccgaacctctcgtagaggagcactgatgtagcttacccccaagatcaagtgtatccaccgcaacaacctcagtctaagccatctgttcaggacaaccagggtgatgtcccataaaccacagtttaatggaggctagcgatagctgaatgcaccaccagggtatactcaacaaccacaacaag

SEQ ID NO: 15324 - DNA, 657 bp, Arabidopsis thaliana
atcttcatcattacaaacactccttagcggatttcaatcaaaaaactcaaaaaaatacaaaataaataaaatgacgatgccataaaatactcagagaattacactagctaatgaatggatgaaaggatagatcatacttacgtttgattcttgattttgattttgattttcgttagtttgggtagatgccataattgagagaatagggtttcaatatattgattaggattttctgataagaataagatatatagggtttgggtggaagacataattattttagttaattaaaaaaaaaaattaacctaaccgctaccgcccgcaaccgcaaacgcttgcgggaaggaacttttaaaatatggcgatttcgagcggtccaaagcggtatctaacggtttttatgattggtgtcaaacgctaacaactgctaccacccgcaaacgcagcgtttgcagtgacagagggagaaccaatcaagctctaagactaatcggaccaatgtagcaacttgtgtgcttcgatgtgttggactgggctagattgggcccaaatagccggttttaacattcccaaagatccaaacaattccttcttccttctttcgaacaattccctgtagatccgagcgaatctcctaaattactaagatgcacaatt

SEQ ID NO: 15325 - DNA, 588 bp, Arabidopsis thaliana
gtaacgtccgccagtgtgctctaaagtgtctcgttatccggatcttgatgccaaagggcgtgacggggcgatacggaaagatcttggcgcggtattccttgtcgggattggcggcaagctgagcgatggtcatcgccacgacgtgcgcgcaccggattatgatgactggagcaccccgtcagagctgggccatgcgggtctgaacggcgatattctggtgtggaacccggtactggaagatgcgtttgagctttcctccatggggatccgtgtagatgccgacacgctgaagcatcaactggcgctgaccggtgacgaagatcgcctggagctggagtggcatcaggcgctgctgccgggtgaaatgccgcagaccatcggcggcggtatcggccagtctcgtttgactatgctgctgctgcaactgccgcatatcggccaggttcagtgtggagtatggccagctgctgttcgcgagacgtcccttctctgctgtaataatttatcgccgccagcgtctgagcaggcgggttcgcatcccgggtacaaagcgccagatatgatcgaaaatgcgcatgatgctgggtt

SEQ ID NO: 15326 - DNA, 1092 bp, Arabidopsis thaliana
tgacttagtggcttgtgggcttttgtggctggcttgtattttcgcagtggattcctggagggaatctagctccaacaccgttgcaatcgagttcaccgtcttcttccctcaagaatcacttgatttcatcttgtagacttgaccaccactcgaccaccgattcaagattccaaacgttgattccggttcactaagaagtcactcgaccgttggtgctagcattcagcagagccactcggcttcaacagcttttctcgaccaccgatttctgttctactcgattcaaatcgtgaaagaagaactcgggacggtttagtttactcgagtactagattgtactcgaccaacttggttcattccgtagtcttttgataacaattccagttttattgttttctccgagactaacctattgacgtttgagctttgagttctaaatctttttcaggtctatcatgagcaattacagtgacagttcgttaaaggatcctgactatcacatggatgaggctgaatcttcatcttcaagaccagaaagagaacatagagaatttgataacttcaggagaaaagctgagatagctcgagggaagagagcaatgagagagaggtatgagctgatagatgaagagctggaggacgggtaaatgcctgagcatactcacaaagccacaaaacttatgcacaaacctgatgttttgccatctcaggagtatataaggctcttcaagctaaacgagttctgctcgactacgctggcacagcttggattactagaggatgttcatcacatgcaccagagttgtcacctggacactctgatggcttacccataaggagcctatgaagaagaaacgattcaattcctctccacactgtggagctttaccagggtatgacctctgatgatttggaaagtgaaggattgggattcttgcgattctctgtgtatggtcaggattatatgctatcaatcaagcccttagaaggattgtttggtttcctagtggaacagatactcgctcaagtttgacagagaagagttaaagatttatggatcccattggcagctctgtacgctgaattatcaag

SEQ ID NO: 15327 - DNA, 942 bp, Arabidopsis thaliana
tgacaaaaactactagtgaagcattactcctcattaccaatgctttaactagtctttcgacacaggaatttgacactgaacgaagaatttcagctgagatagctaccgcaagcaaagaaactcatgtttcagcaatttttgaccctatccacgccccccccctccaccctcatcggagaccagaatggaatctatgcttgcgcaacttcttgcaggcctaacaaagctcgaaagcaaacatgattctctctatagcaagattgacaatctacgctctcatacatccgagctctcacctccacctctatcaatatagtcacactacctagtggaaagcaactaaacccaatccttcatcgcgaatgttcagcttagacttcatttcgtccagttgcaggaaacgtctcagtgtcgatcgatacatcagggtgtcgatcaacgctaattaatcttgacgacactgttttgactttgtcgagaggaccaataatttcacagaggaggaggcgcttattcccgatggtgtcgaacgacaaccacctcatgtcgatcgacaccagcaccaaacagacaggccagtgttgacgtttgatagagcaggattgagtctagacagtggtgtcgaccaacactcacctagtgtcgctcgacactagactcagactccacctatctgccttgaatctccgcctattgcttacacacaaaacgtttattgtctactgcctcgacagtccaagcagaaattcgtgatatgcattgcatgggtatcatcgatgagactctacttcagttgcctccggttgatatagagaagttgtcaccccctcttcagagtgatatgctacgagatgatgctccagagaagcaagttgacaagacaacgataagggttgtctcagaacaggtactcagcaacagcaagcgcgacatcaaaacagg

SEQ ID NO: 15328 - DNA, 525 bp, Arabidopsis thaliana
cgtaaacaagtgaaataagattattctcaccagtcaccaacccataagaatcttcaagaaaaagaaattgaaagaggaaaagaacaatacccatttagtggagaacatgccgatttgaagagaagctggtttgatgataccatgaacagagttaaagccatagagtctgggcatatctgggaggtcgtcgacgaacatcttaagctttcctacttcgaatagttggtcctcgagctctccgcacgtgctacggagccatgtcaacgctattattagcaccatgactctctttatcctcctccgacacaacagagattccatttctgacaagtcaattcagttttgagtgtgtgtgtgtgtgtgtgtgtgtgtgtttctgactgaattattaacttcgggtgagagaaattaagttcttgattagattagatacttatatataggagtgtgtgtgtgagtatttgagagaacgtggttgtctttggttcacacccatgagtctttgttatagtatcgtacaaattt

SEQ ID NO: 15329 - DNA, 970 bp, Arabidopsis thaliana
tgaagaaataatatgtgtacaatgtcccacatcgcttaaaaaaattggacaatggttcagacccatattataaaaggaccaaaatgattctaattacgaataagcaggaagcttgatttatcaggcgtccaaaattaaaatagttatccgattttactcggattttttattttaaagaattgaaactttaaaatgtttcaagaaattataaatattataactttatcaaaagttaaatattataattttaatttttttttataaagtttatctttaaaaaatgctttaaatatttataattttaaaacttataacgttttaaaaattataaattgaattttacaagaaatttaaatattataaatatataaaaaatatattaatacgagacgatatattacaggaaaaatcttaaatataacaatcaaaattcaatgatgaattttgggtcgatattgtatttttttaagtttcaaattttataatattgaaatttataagaaaatgacaaaattatgtttcgagctgacgagcttcttgagaaggacgaggtgacgagcttcgtgagacgggcgagctgacgagcttcgtgagacgggcgatctgacgagctacttgaacggacaagctgacgagcttcttgaggcaggcgagaggacgagcttcttgagacggacgagctgacgagcttctctatgtctctgcgtgtcagacggaatcccccccccctgacaggacatgctatttcgtatttagagagttcctacaactcatacctacagattatgaaggtgtttcagtggagaaaataagcggtctgttccttttcgctgcaccgaaaccgatcaacaaatgcttacccgtgttgtctcagcagaagagataaaaaaggtccttttctctatgcctaatgataaatctccaggccctgatggtttcacgtctgaattctttaaggagtcatgggaga

SEQ ID NO: 15330 - DNA, 1413 bp, Arabidopsis thaliana
tttcttgtcccaaaggaatcctttgtttcctttcagaatctgatataaaggtaaagacttgtctgttgatcttgaaataaaatggttcaaagctgcaatctgaccggttaaccgttgtacttatttgaagaactttggagatgacatgtttaagaaagcgttaatttggttcagattggcttcgattcctctttttgtcacaatgtaaccaagaaattctccggatgggactctgaatgtacatttcgccaggttcagtttcatttgatattgattaagaatttcaaaacattccttcaaatgcctgatgtggtcttctttcttcaatgacttgaccaacatattgtctatgtagacttccattgtttttccaagatgctcgtagacattttattgaccaaccgttggtaagttgctcctgcattctttaaaccaaaaggcattaccttataacaataaatacctctatacttgacaaatgacgttttttcctggtcatcaagatttatcattatttaaatataacaagagaaggcatcgatgaaagttaacaactcgttccctgtagtagattccacgaggcgatctatatgtgggagtgagaaatatcctttgggcaagctttattgaggtctgtgaagtcggtgcaaacccctggctgttccaatcgtctttttcaccacgacgggtatttgccactaactctggataaaggacctcccttatagaccttatcttcaaaagtttgtctacctcgtcgtttaccgccttcgctcattctactccgagagttttcttctttgttggtttacaggcttgaagctcggatccacgttcaactcgtggcaaattatgcttggatctataccaggcatgtctgcttccgaccacgcgaacgatgttttctttttcctcaaaagttcaatcaaggcttcttttattttttcagttaaagtagctccaattcgaactgtctgatctggtttatcttcttctagtactactttgattacgacgtcatccactttttgatctcgggattattccttttttcgcggggttccgttaattgctattggatcttcaaacgatggctggctagataacatgttcgtgaagcttcttgatccccgcgtattgtttccactccacttggggttggaaattggacacactgatggtaagtggatgggacgccttcatttgataaatccaaggagtcccgaggatgatgttgtatgttgccgctttatcgagaacaacgaagtctacgactttttacatttttctggcgagaaccggcaatttgattgttccgagagacatggctgactcgcttgtgaacgccaccaaaggagatggaggtctattatgtttgcccgctaattccattcatccaaagtacaagaaaga

SEQ ID NO: 15331 - DNA, 1098 bp, Arabidopsis thaliana
  unsure (1)..(1098): unsure at all n locations
acatgctgcttgcatcgtccacctcaagagaaacattgaggcatactttaaagtcgaacagttaagtgccttggtatcaagtgcagctagagcttatcggctaactgacttcaacaagatttttgctgaaattaaggctacgcatggatcgtgcgctgagtacctggaaagtatagggttcgaacattggaccaggtcacattttgttgggaatcggtacaacttcatgacgagtaatattgtcgagtcgctaaacaatgttttaacggcagcccgagattatccggtaatctcaatcttagaatctatccagacaaccctcgtatcatggtttgcgtttcgtaggcaggcagcccagttagaagacaatatcttgccgcctaaagtacataacatggttatcgagaattttgagaagggggcgggttttgttgtgataaagattggggatggtctctatgaggttagagacaaaagaggcggagggtttgtagttaacctattggagagaacatgtacatgcagagagtttaagcttctaacgattccttgctctcacgcaatagtggcggccatacaagaaggactccgagtggacacactggttggggttcatcacaccacgccacagctacggttgtgttaccaagccctaataatgccggtgcctgacacggagactcttactccgtcaccaaacgatgtaggggggggagaactggctccaccgtatgtttcaaggcctccgggaagaccaaggaagcgatgtgaaagctttaaattattgaacgctaatcaggatatctgatatacaataactatacaataataacttctgttacttttgtaaaagacttcaaggaaaagatgttcgcgctgcaagtcgttgggccataacagggtaacctgcaatggaccaataacggtaagaattataatatcgcgattacatatatgttacttgatatttaaagggtggaattgtactgcaggagacataagagaaggggaggatcacgttttnttgcgctgaaagttgtgggatggatgttcccagattacagaatctgcatgcgatgtgaataaatatcgggggaa

SEQ ID NO: 15332 - DNA, 1169 bp, Arabidopsis thaliana
gaaagaagacacatgtcacatcttagagcatgtgtttagaagaaatctctctattatctaaataaatagtaatccataatttttaacatttaaaagaaaatgacatttacaaaattttaattaatactagaatcttctataccttctaatagttaaagtaattttgtttttcattaaatgattaaaacaaactaggagaaaagtatctttacttgttataaagaattatgccacaatccacatgttagtttctcatatcatgaaatcttgtatatattttcaagtttccagtcttccaggctttaatttgttttgaagttgtttatctgacaagcgataacaacacagagagaactcgtcgataaatttcaaagatggagaaaactgagtggtctgatttacctgaagaactcctagatttaattgcaaaccgttattcctccaacattgacgtcctacgtatccgtagcacctgtaaatcctggcgttctgcggttgcgatgtctaaagagcgtcttcagtttcgctttgaacgctaccttcctacctccaacaagaagataaaggctcatctctctcccaccactttcttccgtataactctcccttcttcatgtcctaacaaaggatggctagtaagaactagacaagcctccaaaatgtatcgtaagattactctcttgtgtcctctctctggcgagcgcatcacccgttcccaccaaaccctagaccttttgaaggttggcgtttcagagattcgccaatcttacgagattcaaatattcgatggattgaaggacgaaaagataccattagattcagagatattctctaattatatcaagaatagtgacaaaataccatcaggtgtattctttagagttgctttcctagacaatattttttttgcagtcaattaccacgataataaaatatggtgttgtaagactagagaaggaagtagaagttggacaaaaattaaaaaccaagtcgaagatttctcggacattatacttcacatgggacgtatctatgccgtggacttaaaaggagcaatttggtggattagtttacacagcttaccattgttcaacagacatcttcaactccgttggactactatagatatgatagttgcaagacacgaggctcgtggaatattgtggaga

SEQ ID NO: 15333 - DNA, 611 bp, Arabidopsis thaliana
ggtattagcgcgagatagtccactaaagggatatcctttatgtgcttttccaggagggctctgtattttgcaaccagaactttcttgaaacgacaagggaatggaagcagaggtttgtaaggcggtggcacgaagtctatgtctttggtctttgcagcttccggtttttcaacaaagggagtagctgggggagcttgtggtcgagtgggttgactggtgagtatgggctcttcgattgggttgtcagccaacacatcatcttgataaaaattctccccctctagaattacattgtcctcagtgtttgatgtagggacatatcgagttggcagctctcgatcatgtgtgatagtgattgcatgggcagtggcatactcctttggattctggattgctttccctggaagcaggcatgggttgttgttaacagatggtgaagcgaggatgccttccacatatctcatcctattgctcattgattcgaacttgctgttaagtttgacgccttgtcggtcgacgttgttgtttacttcagacagcttctgagcgattccattgctcctgatgcttgtccttgaatgagctgctggacacagtcattatgtcgtgaa

SEQ ID NO: 15334 - DNA, 583 bp, Arabidopsis thaliana
taattgttggattcttctcctttgaggcggcagcagcatctcgatcacaatcctcacaatacgacaaaagaatgtccggcatcggagccagaagctgaaaaccattcttgagccaatggcgaggatgcgactctagcatagccatttttcgagcgatatcagactttcgttcgtcatagtacctcaacatctcgcggtattccttatgccttgactggacacacgacaagaaaccctcggcttcacgtctttccttcgagctcgcctggaataggagagtccagggaactcgaaggttattgaagaacggcatcccacgttcaatcttcctattccaggcctcagcattcgggaaagtcggaacatttttgccaacaaaggaagacgatccaacactctccatcttgcaaataggaggaaaagtccggtgaagcaattgttgatcaacaaagaagtatttatagaggcaaatacaggaatcgaattggaaattttctcaaatgcgatctggaaattctcattttccttttccgagaaacactaatatttgcattttctccaaaactgggaaaatgggaattta

SEQ ID NO: 15335 - DNA, 1371 bp, Arabidopsis thaliana columbia
gttgtattggcgtcgtagctctgacaagaaacttgatcggtagaaaatcaaaatgcagcggcttctttttatcccgccgcatctgaatgaacctcactaaaagatctggtccttgtggaagtcactttttttattagcacacacctttaatacttagttttctactaaaaaagcagtgagcacacagttttatttgaaacaacacagattgcatgtataacttactacttcatctagaagtgtttgcgcctcgtaaatagttagaaattcagtattctccattacaacgccatcagcctgaaaataagatctacatggtaccatataccagcaagttagttgcgaagcaaataagttcttctgaaaatataggggctataaatacttacactctccgttctatttgtttaagaaaacatttcactctctctgcacttggaacagcgaatcggtcatatggaccaatggtggtggatttggaggtatcttctccccttttcctggcctaacaacatgaactttagtcgaccctctaacaggtgtttgtcgctgctgtaccggaatggtaggccgactctctcttctgttgtacatgacaggactgtccctaatccggtcgctcgaccgcaacactatgacttttgtggggaatgtcttcttcttaccttttggaggtaacctgctgatgtcagcaacaatttcttgcgttaggccaacaaaacgtttggggcaataacatcacaatcatcttccaagttcttttctgcatcaatatcctgcatacatatacccatgtacatagtttagcatatatacatcatttacctatagtttaacatctttgtcatggcttaccgggttggttgcatgcaattcttctttgtttctaatctgtaatattcaattagagaaagtaagtgggtttcattcaaaaaatataagtgctagtggattaaatatacagacggatatagtaataccttactgcttgacacctgctccttctctttagctcttttaggtggccgggtagattgggcgtccatatcagaaatggatttttttctccgtcctttttgagaagcagcgtcacctcagacctagtagtacatcacatttctatgtcatatttactcattaaaacaaatgagtaacagtctttaccgtatgctaacctccttaagagatactcttgctgccatctgacacacttaatccatcagttatgccacaaacacccgctacactgtcacttcctccaggtagccaaatatcaagttcatccggctgggaccaacatgcgtatgcttggctggtcagagcttctatgttcctatttcatgaattgcaattgtaacataagtatattat

SEQ ID NO: 15336 - DNA, 399 bp, Arabidopsis thaliana columbia
gggtactatctatgttctcaagtaatataaatgtattatattatatgtatgtagttaagtacgtatccaagattaagcaaaatcttttccccaacaagtactctcatttttgtcttttaattctctatcatcccagaagtaacatgttcttgtcggtgttttcttatcacataatttaccaaaaatctacccaccttatcttaacttaatatacttccacttatataatctaatgtatgcgtttaagaaatgaggtacgtagctcacatttttgtaatgtggaggttgaagataggagaagggaacggagatgatccctacttattcactactaacaacttcgccggacgacaaacatgggagtttgatcctgacggaggctcgccggaggaaagacac

SEQ ID NO: 15337 - DNA, 422 bp, Arabidopsis thaliana columbia
gtaacggtcgccagtgtgctctaaaggcgctgtcgctgatgacttccgcacaaggcatccttccggccatggcggtttatgctggcgggattctggtggcatgggtttgcgggtttattttcaccacgctctttggctgccgtaacgtcaatctggactgatatcatgaaacggacaatgctctatctatatctgctggctgtaagttgtagcgtcaagccgcaaaaaaccctgtactaacagaaagctcgccagaaaaagcagggtttaacgtcgaacgtcttaaccagatggatcgctggattagcctgcaagttgatgtcggtaatcccagcgtaaacctgctgatcattaaagataatcagattgtgtatcgcaaagcctagggagcggcgaaaaagtacgatggcagcgtgttgatg

SEQ ID NO: 15338 - DNA, 544 bp, Arabidopsis thaliana columbia
gcttcttcattgatctgtctaaggcgcaggttttctccgactggtaaggatcctctcatagctttccacatgaaaaatttcatctttggtgaagtgttaattttccaaatttctttggtccacttgaaatcagtcaccggagacacatgttggggacttaatggaattgaacttatgctttcatagtagccggagcgtgctgagtatgccccattctttgcagggagccacgcataagaatcctctgctccaagcttacttagatggatctcaaggatttctatatcaaattcagggatggtttgctaaataagacctctgtcccactcaagtgttgtaggagaaatgagctgcgatactgtccacttgtgtgatgatgcaggaggaggacccataggggtgataggagattgtagggatagccacggttcttgccacagagaggtttgtatgcccacccaatgactttaccaagcttccgttttagtagatctctccaatacatatgcttctccatccatgtgaaatggtcgcaggtggtttc

SEQ ID NO: 15339 - DNA, 508 bp, Arabidopsis thaliana columbia
ccctctacaatacctaacggttcttgtgctccgatcaaatacattctatggtccagtctataaggcctctgcctacttaggctttccaagcatgcggatcatggacatatcgaataacaacttcgttggatcattgccacaagactattttgccaactggactgaaatgtcatcggtatggcaacgacctatgctcacacttgattacaaaagaaatatagctataccagggtcaaactacatgggagatgataatcatcaagattcaattgatttggtgtataaaggagtagacacagatttcgaacaaatctttggaggctttaaagtcatagatttttctggaaaccgattctctggacatatccctagatccattggtctattgagcgaattgcttcatctcaacttgtcaggcaatgcattcacaggaaacatcccaccatctttggctagtattacaaagctcgagacgctagacctatcgcaaaacaacttgtcaggtgaa

SEQ ID NO: 15340 - DNA, 557 bp, Arabidopsis thaliana columbia
tagagcctctaatctttctaacgccgagattttctccgtcaacactcctaataaccgtttcttccacggcggaggaggaagcggtacccttcagttttataacggtagtaacgagatcatgttttgtaacggagatttaggcgggttcggatttactcgacccggattaggtgcaagtcctagaaggctctcgggttatgcttcctccgatgcttactcgttgcagccaacaccacgtgcctcgaactttaacgagcttgacgttaacggaaacggtacgccggtttggatgaaatctcctgccgccgggagaatataccggcaatcttcgccgaagatgatgtgggagtctgggcaaagacatgcagccaaagatatcaatggtacgttttctttgaaagatgtgtcgttttcgtttttcgttagcactgacacgacggcgtttagtcaattttcttctcttttcgtgttttactttatcattggttcttttaaaagatttaatgcatagaaaaacattgatagactacataaaatgcagcttttcagaaataaaa

SEQ ID NO: 15341 - DNA, 643 bp, Arabidopsis thaliana columbia
tgctatgtcgatctagtcacatttggaggaggaagaacctgcagaatcaatcaaaggattaaagaaactttaaaaatagtattaataatttcagaagctcaagattttctcaactcaatttggttttcacaaattaagtattcgagaagacaataaaaagaaggtcgaatccagaacgagcatgaatttaagaatcggattaggccttacaattacaaaaggtggcttggaactcttagcatccgccttaaaaaggtcagatttctcccaccaagcataccatctgacccaattacagaataacagagattatctagaggaacttcttgggataaatgtcaaagaaaaagatctacacacttacgatttctccacggtagcagggctgtattgtttggccatctgtgaagaaagccttttcctctctccaagaggagtttcagggtccacaaaatcctcaggattctcttctgacgcatcccgtttggaactcttctttgcgctctttttagggacattagttccatctttggcctgttttgctacacgagaagcacccatgataaatatttcaagttacagggaaaattaaggatttggctggcacattacacatacatatgaagcaggacccgaaatgaat

SEQ ID NO: 15342 - DNA, 587 bp, Arabidopsis thaliana columbia
caaacaagaaaaggttagatgttaaactttctccattctcagagaaaccaaagttgtctcttctctcttacgatgttgacctatcctctgttttgggagatgaaatgtatgttggattctctgcttccaccggtttgctagctagttcacattacatcttaggttggaactttaacatgagtggagaagcattttctctgtctttgccatctcttcctcggattcctagttcaatcaagaagaggaagaagaagagacagagtttgattcttggagtatctctcttgtgttcccttttgatcttcgcggttcttgtcgctgcatcgttgttcgtggtaagaaaggtgaaagatgaagacagagttgaagaatgggagcttgattttggtccgcatagattttcttacagagagctcaagaaagctactaatggttttggggacaaagagcttctcgggtctggcgggtttggtaaagtatacaaaggaaagctcccgggttcagacgaatttgtagccgtcaagagaatctctcatgagtcaagacaaggtgtacgagaatttatgtctgaggtctcaagcattggt

SEQ ID NO: 15343 - DNA, 522 bp, Arabidopsis thaliana columbia
caaagcttccaatattcttctcgattccgtacggtgtcgtttttcatctctagctccttcccacgtttaaagcaaaaaaaatgctgtttctagaagatatgtcctgctttttagtaacatgttctttgccatttttatagaacttccacgccaagctttcagacttcggactagctaaaaatgggcccattaatggattctcacacgtgaccacacgtgtcatgggcacacaaggctatgcagctcccgagtacatggctacaggtaaataaaacgtgctaattatattaagaaacatgttttaattgttatcggtattttcctttgtctattggattaacttaaagtgatgttataggtcatctatatgtgaggagtgatgtttacgggtttggagtggtactcttagagctcttaaccggtttaagagcattagacccaaaccgaccatctgcgcaacaaaatcttgtggaatgggctaaaccggggttgaccagaagaagaaggttcagaaaatgatgg

SEQ ID NO: 15344 - DNA, 403 bp, Arabidopsis thaliana columbia
  unsure (1)..(403): unsure at all n locations
gaatatctgcaacttgatgttctgttagaagatgaagcagattgataatatgtttctctaaattttgtatgaaggtgtgacaatgaaaataaatgtgtttggttagataatgcaagaggacattaaaagcgatctcaagcgacgaagtaatatcagcaaagagtatacggatcgagattacaatagtaaaacatgacaacaaagtcgctagggatangatttcacaagttgaacgggatagcggttgataatgagattatgcacaggatagcgagatagttggttgcttctttgaaccgcaagatatcaatgacgaantgaacaccatagtgaagatcgtcgtagatgttatacctatctaacatgatgcagaatcagagtctgccaaacgcctgagtgtgag

SEQ ID NO: 15345 - DNA, 591 bp, Arabidopsis thaliana columbia
tcaagaatttgaacagagtatctgccttaactattattctgatttgtaaacttcgaaacagggaaaaagttttaccttgaatattgtttcgtactagcttaatggctttagctcgtaaaacactaacttgcaagtttggtgactttgagttgattcaagggtttctcttaatcttgttttttcttcttttcaggagcttgtaaaaatgctaatactgtttgagacgccaggtggttttgccatcttcaaagtattaaacgaaggaaagctctctaatgttgaggttactaactaaatcattctcctttgttcatttatcttaaccttgtttctgtgtgtggtttggttttttaattctaagtatgtcaaatttgtgattgtaggatttgggtaatgagttctcgaccgcaaagttagcccgaaaggtgatttattttgttctagacatagttcaaattttgtatctggctaataatatttgtttctcatagcaatttttggtgtgttgttacagatggtgaagctagtagcttttgacaagtttgacaacacagctgaagctcttgaagcagtggctaaattgcttgaggg

SEQ ID NO: 15346 - DNA, 536 bp, Arabidopsis thaliana columbia
actgtcacaatgacatatcatcaacaaaattctaccttttcttttgcttttgctttcttacatataataacttttttgtaacgaagtggtaacgaaatatccttaaaacccctaatttcctaactagtacatgccggattgccggttaactgattggttttgtgacctcacttgcttccctctttcattttagcaaccacaattaaatttacaaaaaaaaaaaataacgtattaataacaagttaaacagttataaatcatttatcatcaacaataaacagttttacactaaatagcccgttagtgaatacatgtaataaataaagtagatccgtttctagttttcacaagtgaaacaatccgaaaccgaaatttatatattgcagatataaaataaaaacaattaaagaacttctcctcttaagatgatgatgatggataccaaaaccatagtgacaaaccttctcctcttaatcctgctgcaaatctccaactaccccacaattgtcttatctatggaggcgagatataggaaa

SEQ ID NO: 15347 - DNA, 550 bp, Arabidopsis thaliana columbia
gatcatctctcatttcattcagttcgcgagtcttgaaccattatgtttcttaagcttgctcaaattatcggcttgcttattctaaagctgagactcttttcttattcttttccagctctgcaaaacggcgaaagaacaccctaacatcttgttccttaaagtaaactttgacgagaacaagtctctctgcaaaagcttaaacgtcaaggtgttaccgtatttccacttctaccgcggtgctgatggccaagtcgaatccttctcatgctctcttgccaaggttagttcttcttgtcccagctttctttaatttcaaacgtcacttgtctatcacgaaaccagagaatagttactgcattgtatagtcttgatggcgacctctaagtctaataagcgtctgcaaacatttatgcagttccagaaactgagagaggcgatagagagacacaatgtaggaagtatcagtaacatctcttcttcagcttctgagaaagttgaagattcaagtgaataatcaatgcctggttcagattgatcacagattattttg

SEQ ID NO: 15348 - DNA, 699 bp, Arabidopsis thaliana
tggtgaagttatgcctggacaggtctctttctcaatggagctctggtaatatattccgttatttgtttgtcaatcctctgatgttattaaaacgtttgtgcagtgggagttccaagttggcccgagcgtaggaattgatgcaggtgatcatgtttggtgtgctagataccttcttgaggtaattcaaagtctttttttgtagagatctgtgagagtgtttagccctcgtaactgttgttatcttcttgcagagaatcacagaacaagctggtgttgtcctaacacttgatcccaaaccgatagagggtgactggaacggtgctggttgccacaccaattacagtaccaagagcatgagagaggaaggaggatttgaagtgatcaagaaggctatcttgaacctctcgcttcgccacaaggagcacatcagtgcctacggtgaaggaaacgagagaaggttgaccggaaagcacgagacagctagtattgaccagttctcatgggtatgtatatgctgtggtagtctgaatgatttcacatataagtgtgtcactctactcatttgctttaaaacattttgactacgcagggcgtggctaaccgtggatgctctattcgtgtgggacgtgacaccgaggcgaaaggaaaaggtactgtttcaaggatggttacacacatttttggtatgcaatatatctg

SEQ ID NO: 15349 - DNA, 585 bp, Arabidopsis thaliana
gttctttcaagattcatctgaacaatctctattatacagattaacagagagatagtgaagatccaaagagtaactgcgcctgcaggggaattgcagctgaagagcttaattgaagcacatgtggtaagtcatctcaaagatcaaagatccaaagagctagtggcttgtctttgatggcatcatatataaactctattttgtttttggttcataggaaaaaaccggaagcagcaaaggcgcaacgattctgaatgagtgggaaaagtatctacctctcttctggcaactggttccaccgagtgaggaagacactcctgaagcttctgctgcttacgtaagaacatccaccggggaagtcacatttcaatcggcttagagatcattcaagagcaggttgtggcagttgaaacacaaggattgatatacatcaatggtggaggactatggagagcagattaatggaaaatcattatcattcacatgtagatcaaatgtgtgggacaatattcttattgtcttgtgatctttacaacaataccatggttgctataactgtacagtaaattcagtaaaataactgctttc

SEQ ID NO: 15350 - DNA, 366 bp, Arabidopsis thaliana columbia
gatccttcaatgtatattgtttcgttggtggattggttgtgggcgagagtagttgcatttttcctatggccattgcatatgttggctgaaaagcttgtacacagaaaaattcgttcgtctattgggataacaaaggtagtattacaacattctacttcattttcagttacttgttttaaaatttttttaccttacaagcaatattgtaagactgacttgcaatctattctctgtttcctccaggctggtgttagtggaggtggtagtttacctatgcatgttgacaagttttttgaggttagatcgccaatattgtttcttgaaattagagataaatggttttttttgcattcaaacaaagtagtc

SEQ ID NO: 15351 - DNA, 525 bp, Arabidopsis thaliana columbia
gttaatcgtttgtagaaattcaaagtcacaagatcttgacctctatgtgaaaggcgttcattttcatcttaacaaagtaagcttttgaatccgatttcgctgagatttatctctttttgtggtttcttctgatttcgagggtttcgatatttggtgttggtgtttggttaggagactttagctaagagatcggcgaaagtgacgacattactcgagagtaacaagctccatgaactgcgttggatcatcagagacatggacatcaacccaagtatcttccacctcgtgactagattctgttatggatacaaaatcgaattatcagctgacaatatcgtctctgtgttatgcattgcttattacctagagatgagcgatgatcatagctctaacaagttgttgaacaaggcagttacgttcttggaacaacgagttcttatgagctggagtgagaccgtgaaagtcgtttgtatctgcagcgataagattttggacaaactagctaatgttggctcatcgaagttt

SEQ ID NO: 15352 - DNA, 621 bp, Arabidopsis thaliana columbia
ggacaattctaattcatgaaacaatgggtgcatagatggtaaagctatgtaatggaaaaataaatatttagctccacttaaagacaaatggacgaaattatttttggtcactacactcataggatatctatcagcaagaaaagattgataaactattatccgctacgaaattagatttaaaaggtaataaaaccaagaagcgctcaaagattttacaaatagaactacagggcttaggtgtttacctgtactgaaagacaaagcagtaacagcacctcgcgaggcatgttcaaatgttacgatctcttcgtccaattttatgttatgtacatggatctttccatcagcacaaccaattgcaacaacatccagggcaggggatgaaacacaactggtgacagatgaaccccaacccttaaactgatagagcatcttcttagtattaatattccatagctgcagcggaccctcttggctccctacaagaacctaccaatgtggttccaagtaagagaaacatgcaaagagttagaaaggcttgtcaacagaagacaccaggggataaaaaactgaaatcatgaacgaagtatgactcaccttgttgagataggtatctgggtg

SEQ ID NO: 15353 - DNA, 620 bp, Arabidopsis thaliana
tcagagatggccaagtcgaagaatcacacggcgcataaccagtcggcgaaaccacaagaacggaatcaagaagccaaggagacaccgtcacaccccaaccagaggagtaagtctcttattacagttctaacctaactgatttcagattcgggttatagtgttggaggtttgattattgcgtttatgtgaaatgatgtttcagatggaccctaagttcctgaggaaccagaggtacgcaaggaagcacaacgtcaaggccggcgagaatgctagcgctgaagaataagtgttttgattatctgtgagacattttgaagtttttttttaatgaatttaagactttcttagacaaaggaaccaatttactttgcgcttttgatcatgtttacgcaattgtggtttgtgtactctcttatcctggccttaatttaatatcagcagttttctatgcatcttctcttatctgcaagttacttgattcgttaccgattcttttattgtttagcatatatgtttgtgtgtacctgaaatctgatagccgaatttgatctcaaattagatgttaagcatataatccgtacttgatctacaatcatctttgattgttaacatatatgttt

SEQ ID NO: 15354 - DNA, 553 bp, Arabidopsis thaliana
  unsure (1)..(553): unsure at all n locations
tgaagcattatattgacttaaatattgacctatatattaatacaaagaagtatatatatatatatatatatatatatatatatagctcgtttaatttgtaccctgggcggttgctaagctcggaagcagaacgaaaggcaacgcagacgttacgaaccatatagttancnatacntgaaatgcttcacaccagctgattcaggtgtaatcctattttcttatagtccgagaattctctatccatcctgttcatttatttatatacattcgtcatcattcataacatatatatacgtatacattttggaaccaaacaacatacaactatggaacacattaacaaaggaagaaactcacaacaataatctaaggttgcggagtaacttctcggattcatcaaagtagatattaatgacatcatacacaaagtttggtgaagtctcatcttgaagctgctgaagctgcaagaactgctcgtccagcactccctggtggaaaagagaggctaggagcaggttgatgtcggcttgaagcggtccacatccaccccaac

SEQ ID NO: 15355 - DNA, 718 bp, Arabidopsis thaliana
catacaactaagagagtagaaaatagatgacaggaaaacctaatatcataaatcgccgagtgtgtcgatcgacaccagctggatgtcgctcgacaccaagaagaaatcagagcagatggtcgtcggatgactcttggcgactacaacagaccgaatatcttctattccaatcggtctgcagtccgaccacctactttcgaaagaagcaatttctcgataaaccctacattatatactcttgtgagtatgcaccctttccatggtttagcacaagaacaacctatggatcatattgatcggtttgaaaacttggtttcaagcattaaggcgagggtgtttcttatgactatcttccctgcaaactcttcccatattctcttgatggggaagcatcttcttggcttaaggagttgaagcctggatctctgacaacttggaaagaaataaatgtcgcttttctcaacaacttttataatgatgcaagatccgagaagctgagaatgaagatctttaccttctctcaagaagcagctgaagcatttaaagccgcttggatcagatttagaggatattagtgagattgccgcatcatggttttagtgaggttcagttgttaggtatcttcttcagaggagttgattggcactatcagatggctttggatgcagctagtaatgggaattcaagtcaagatatccagaagatgaacaatgttgat

SEQ ID NO: 15356 - DNA, 1017 bp, Arabidopsis thaliana
ggctccattgtcgtcacaataaagatccaccagaccagaaatgctaggaatcacaccaatttcagcaatgaacttcctaatccaaacaacttcttttgctgcttcagaagcactaatatattcagcttcggttgttgagtctgccatagtgctttgcttgaagcttttccaactcaccgctcctccattaagacaaaagataaatccagattgagatcagaaatcatctttgtctgtctggaaagctggcatcagtgtaaccactcacaacaagctcatcatttcctccataaaccaagaacttatccttagtctttctcaaatccttaaggatattcttgacagttgtccagtgactttcacctggatcagattggtatctactcgtcatgcttaaagcacaaacctcatctggacgagtataaagcatcgcatacatgatagaaccaatatcaaaagcatatgggattttactcatccgctctcgctcattatgtgttgaaggacactgagtattgatgagagttatgccatgagacatgggtaagaaggctttcttagaataatgcatgctaaacatgtgcaagaccttatctatataagtttcttgacttagtccaattattcagtttggtctatctttatagatccgaattccaagaatatatgcagtttctctcatgtctttcattgaaaaacaacttcatagccaagtctcaacagactgaagtaaaggaatgtcatttccaatgagcagtatgtcatctacatacaatacgagaaatgcaaccgcgctcccactagtcttctagtaaacgcaaggttcctcttcgtttctaatgaaatcaaactctttgatcggctcatcaaaacgaagattccatctctgagattcttgcttcaatccataaatagaacgttaaagtttgcatactttcccaggattctcaggaaatgtgaaccttaaggttgtttcatgtcacatccttttccatgtttccattaaggagagctgtt

SEQ ID NO: 15357 - DNA, 1001 bp, Arabidopsis thaliana
cttagtagttttccttcctcatgcatctgcttgaagaacttctggtgattgcatagcttttctagtgtcgcaagagacatctggaatatttctcctaatgaggcttgagcaactgttgcatttttgaaggataacaaccgtgaagttttatttccaagtggctctggtaatgaattcaaatacgtctgtttgagattgacatcgtctatactgtttaaagcgtagaatctttttaacatcctctcataatgtttttctagatcctttcttttgaaagagcaacacttcatgttgaggtattcttctcttgcttgaatggtgtagtgatcccatgttctctaagaaattcattgtggatgtgtccaatcaatgcatcaatcgaaggagtttgacattcttcttatggtaatgagaaacttattttagtagataatatttggaagcatttttatagaagaggatttgcgcctggatattacatatgatttttacatggggaagattttcaaacttagtactaaccaaaacaatggagatgctgaaaattgtgaattggaacttggaaataataatagtactgataaggaagagaatacaactagagattcaaccggtgtaatacagatggtaatagatgcttttcgcgaaaagactgaaagtggaactggagaacaaaacttagatgcgaaaaagttttttgatatgttagatgcagcgaagaaactaatttatgatggttgttgatatgttgcatttttagtgtcttaggtccctttgttttgagtcatttatcatgtcgtagtccgtcttttgcgtttttttcgttgtgtcttgagtcttttgcaggttttagatacttctgacaggattggatggtttgaacttgctcaggtcgagagagggtgagaaaatctcaagtggggagaaaacggtgtagaccgattggccctgataggactgatcggtctatgcctcgtcgattgggcagagacggttggacc

SEQ ID NO: 15358 - DNA, 764 bp, Arabidopsis thaliana
cttaccatgttattgttaatgcttctctaagtcaagcaaagctcaccttattgctatgtaggctgcgcaagtatcgcaaagctcttagctattctcttgatgatattacatgtatctctccagacatatgcatgcataggatccaccttgaggatgagtctaagtctttaattgagcatcagagaagattccatctgactttggaagatgttgttaagaaagagatcatgaagctgttggaagcagggatcatctatctgatttcatataccagttaggttagtccagttcatgtagatcctaagaaaggaggagttacaatggtcaagaacgaagaggatgagctgattgctacacggacaatcataggtcatcaaatgtgcattgactacaagaagttgaatgctgcaaccagaaaggaccatttccccttaccgtttattgatcagatgttggaaaggttagcaaaccataagtacattcacttgcccatatggtacatttgcttatcaaaggatgccttacggtctttgaaaagctaatgcaaccttacagagacgtatgatgtctattttcacagacgaatggatgatttctcagtttatggatcgtcatttgaggttttctttagagaaactctacaaggtattggcaaggtgggaggagaaacatctagttttgaattgggaaaaatgtcactttatggtgcaggatggaatagttcttggtcaaaggatctcggaacatgatatcgaggttgacag

SEQ ID NO: 15359 - DNA, 434 bp, Arabidopsis thaliana
cgactctagatagtaacttccgccagtgtgctttaaagtctctcgcaggtgatttttgtataagtgacgttgtttcgtcgatgtgatgagtatcacgtttttttacgagagataaaatcgaagagaattgaccgccttgttcaaataaattgattgatatctaacctactgataaaccatttatttgtcgtacttatgaacttgttttataccgcgtggcagtcacagcagcgttaaaggcacggaatgacacgcaacatacaaattatactcgctatgcatctcgccagttgtagttaacgtaactggctgtctttcgaacctctgcgattatatcctgtataagctggttttcgtaaatctttctcctgctgacaatgaatacataagcgcacgccaggaatggcttcccgacgggcctgcgggatgggggc

SEQ ID NO: 15360 - DNA, 838 bp, Arabidopsis thaliana
catcgtactgtagaattaaagatcagattcaggttcaatttgatagggaatggtataagatcatgacagtgtggtcgagtagagcaatctaggcatggttcagttttatttcaaattcattgactacgcaacagacaactagcaacgagggcactgagtttatccggtgaaccaaagtgcttacaaggctatctcatcattatcccctgtgcatatgcaataatcctaaatgaaacactctagactcgatcctaaatgtaatgcaactacatgaacactcttttttttttttgtgaaatcattttctgaaatttttcaaatttttttggtttttttatgtcttagatgaatgcagactcaagaatatatacaatgcaacacacacttcctgagcccacccccaaacttaaatcacacagtcaactgtgtgaataaacttggaagagagtactcaggacaaatccaatcacagaaacaaaatgaagaaacaaatcacaacagatgatataatacaatggtgaagtgaggcacttacctcagttgaagaatgaacttagttgctcgtcaatggctccctgtgatttctcccaggccatagacgaaccgacttattccgtatcagctccaccaggtggttactcgacctcatcagctctatggcggccagcaccgctctgggaatctcgacctcccttcttttgttgtggacagcaccgcggtcgagtgatctcctcgagtgaatgaggcgtgatctgctgctagatcgagtgagtatagccttccttcttctcttgtgctctcgcgactcaaatgacgaatgcctagcccggacatgtga

SEQ ID NO: 15361 - DNA, 576 bp, Arabidopsis thaliana columbia
  unsure (1)..(576): unsure at all n locations
aatgttacctcaaaagcagatctagagtcgtgcgtgctagcggatcgagagtcactcgtgcagataacgtgttgaatattatatattcttttttttaacggcaaatcaattatattatatcataaaagttgacatgatacataaccaaccaaatacaaccattgcaacaaataaaggaaattgaacacaatttcgatgaagaagtggaaatgaccctgctttccgaacggaagccttacaggcaacataataaatcttttaagtcccctcttcatacactcgcaagagactaaggctaacatcttatagatgaaactcctaaatgctttctgcattactgtaaaaaatctgatatgttgttagatatggttttgaaacatgacttctgaaatgtcgttcgcatctttgctgtttagtgaccatggtttctcttctcatagaacctaaactttccgaccaagcgaaagagataacatcatcatcaatggatcgtgtcatcgaaaagaggaagccttcgccttcgagataaaaataggttgtcgnactctaaacagattaagactgaagataagtaat

SEQ ID NO: 15362 - DNA, 2288 bp, Arabidopsis thaliana
cgccagtgtgctcatgatcttgtgttttagaagcctcacgaaccagctatacgcagaggaaagatattacattatcacaaacaactactctcacattctatgactgagagtctgagactataataatatacacagcgtaagggaatcaaccaaaaaagttcccaactataactactactcttacatgtaccccgtagcaaaagtacttccttctaaacctacccggaccaaaatcaaaacattcaatgccactcatgaagagggcatcatcatcattagaggaaccgggagttcgataacgattaggaaataagagcgttcgaattctcttatgtactgaacccctccgttcatcagcttcaaaatctttctgcaaacgcttagtcctaatccttctggacttgtccatcggctactatggaacatgtcttgcactttctctggcggcacaccttcccctgcacacgccattctaacaaacattgacaaaatgagtcagaaagtttgctctgtttttagttatcattcataagtttcgcaatgcagatagcaaacaaaaaataaaatttatccgcagcagtcagatttctgaaaatgaattatagcgatgtatttgctgcctaagtcaactagctaaatagagaattggaaagacagaactagaatgatggaatgtacctgaactccaaacgtacagcggagaatccgtcagccatttggttcagagtcgggcatagatggagctctaccgagccttccatgggtgcataacggacaatacttagcagaaattctgcgagaacctgttggagccttatctggtcaccgtagacagccatggatttgacctccgtgggaatgttacggatcagctggagatttctctctctcaccaccaacatgacttggcttaccactgcatttgtgacattgccaatgaagaactctgttctctctagcagaaatgaactgatgagccaaaaaaaaaatagagggtgtttgtttagcagtgagaatgaggctttatagaacaatttaagtgtgtataaagaagaatcaaaactctcacccgtcatctatgcttttgacgtccatgtctcctacaatctttgagatctgcttctcacatgaaacactcgtttcaagaagctgcttctgatcctcgtttaaatccatgtcttccagcaatgaatttgtgaaacgcaatccactcaatggattctttataacttggaaaatgtaagccaactctttcctccttgagaaatattcactctcctgcctcctctgaacttctagagcttgctgcagctcgggactcggtatctgcaaaaaacagaaagccccaatgattttgccatcgatgctgacccgtttgttcaaagtcaggagagcctgaatgaattcccctttgcgatcaaagaacgggaatgggaatttatcagtatcttggccaccgatcgcgttatgcaagacgatcatgaacttagttaacgcatcaggaccctttagtctgcaatagctcccaaatacttccctaacaagtaattttccaatcacttcgctgcgaggccagcctgtgagcttttccattgcagtgttccactcaaggcagcacgtattctcatccgctgcaaagattggagggatcagagggttcgggctatggatgatggccttgtaatcaccttgtatgttgatgaacttgtccataacaattttatgaccagttacatcttgtccaacaaagcagactccaacgatgttgtttaagtagtccttgcttgaacatgcgttgacaaccacaaacattgcttttccttgtagctcggaaccaaaagttttcagcttgacctccacattcttgccttcatcccctgcataattgaaaacgaaacacattatcagaatttgtattttagagtgatgcacagattgaaaatctaaataattgcataaacctttgagagcacaagaaagaagcctatcaactgtttctttgtactctttgtatatcaattcgcgaaccagcgactttcccatagcgtcttcaacagaaagaccggtcagctctgcgatcttggcgttccacccattgatgcaaccgtctatgtccacagcaaatataggaaccgtcgcagtctcaatgagcctaaccatctctcttgcaactgcacctatctcctgcatcccttgctgtaccatatcatctccatgtggctgaaccgccccagctgcagcagctttagagtccatcgcttcagactctttgaaagagtctcttagaa

SEQ ID NO: 15363 - DNA, 239 bp, Arabidopsis thaliana
tcttcctcatgtgccatgcgagtggaatcgcgtctctgctgacccacaattgcggcgaggttacgatgcgtaatttcatggtttttggttaagttgatcaagttcatgatcattgcgcggagtcggccaattcgctggcaggtagcggggcgacctgattagacatgttggccgggttatctccgtttggaggctgtatcgtgacatttcgttctccgccccttgtttgcggaagggga

SEQ ID NO: 15364 - DNA, 756 bp, Arabidopsis thaliana
cgacacaacttggcttctccacgtagacggctcgtcatcgaagcaaggctcgggtgtaggcatccgtctcacctcaccaacaggagaggtcctcgagtagtcatttagattaaacttcgaggctaccaacaatgtggccgagtacgaagcgctcgttgccggacttaatctagcttggggactaaagataggaaaaacccgagctttttgcgactcccagctaatcgcgaatcaattcaacggagaatacacagctcgggacgaaaagatggaagcctacctgattcatgttcaaaatctagcgaagaatttcgacgaattcgagttaacaaggattccacgaggagaaaatacatcggctgatgccctggctgctctagcctcaacatctgacccgagcctgaaaagagtcatcccggtggaattcattgagaagccaagtattgagctcggcaaagaagaacacgtcctcccaatacatatcagcgcggatcaagacgacctagatgactgcaactcagaatggatggaacccatcataagctatatatccaaagggaaattgccctcggacaaatggaaagctcggaaattcaaagctcaggttgcacgtttcgttctagtagatgcaaaactttacaagtggcgattatccgggcccttgatgacatgcgtggaaggagtagcgatttgcaagatcatgaaggaaattcacggtggctcgtgcggaaatcattccgggggaagagctttagc

SEQ ID NO: 15365 - DNA, 776 bp, Arabidopsis thaliana
tctccatgttgtcctgaatgttgaagtacccaaaaagctggtcagaaaaaatataagaaatatttcctacaaattatgaagtaaccacaaaatcttgtccaataacacaagaaccgcaacccataaaatgatacttgttgttattgtacaccttcaaaggaccaccgtcgatgttgacttctggttgagtctgtaacaatgaatgagatgctgcattgccctatggagaattgccctgtggagaattgccctgtaaatgtttttttggacaaggactgagagatgaagcatctctctccagtgtccaataaatcaaggaactagttaaaaatgtatacctccatagggtcatcgggttgcggctccaccactgattgagatgctgcacccgcctccaaagtgacctgaatgtcgaagtacactcctaagtatccacaaaatcctgtgcacaataactatgcacatgtgccattatttagtttaaggattgggatgcagcaaccatctccgatgtgttacatcaaattatatattaacttaccttcatcataggatcatcgtcaatgttttcatcgggttgtatctccaacattgaatgagaagcttcaaccgtctccaaggtttcctgaattatgaattatagaggaagatggcgtaaggacaatgaacctctggtttccggactgggatgcagaccccctctccgatgtgttccaacacatcatctccccgcttacctcccgcataggatcatcgtccatgttaacctcgggttg

SEQ ID NO: 15366 - DNA, 503 bp, Arabidopsis thaliana columbia
  unsure (1)..(503): unsure at all n locations
ctccaaagattaagatgttcttatggagaactttatctggtgcattagcagtttcagattgtttacgagctcatggcatgaacattaaccttggttgtgatctgtgtcaacatgatagggagacaattagtcatactcttttccattgctggccagcccgtgaagtgtgggagatgtcagatatgcctcggccaacacaagggttcacaaattctatttctgacaatttggaatttgtattgaaagctatggagaatgtaagcataccttccaatgtgcgtatggcgattccttggttcctatggggtctatggaaacaccgcaacaaaatcttatatgctggacactaaggggatttgacggtaatggttgctcatgctattgatgaagctacattgtggaataaactgcgagatacaccaccacagtctttcctcttcggctcctgttttgggtttattagtaacagatggtcanacctcccttcaatgtgatgaaatgta

SEQ ID NO: 15367 - DNA, 547 bp, Arabidopsis thaliana columbia
taaaattcatttcagtaatttattatcaactaaccaaaaatgacggatattttgtcaactaatttaagtttttcataaacaaaataatttattaaaaaaatagtaagaaaaggagaggtgttgagagattgggaagctaaaatatccaaccatatataaaagagagcaaagcttcacctatttttatcaaacctcaacaaaaatactctctcttatttcagacttttcagacaaaaacagagagaaactttttgtgtttatgtgttttaagatctgattgataaaaaagatgcaagttatttctccttcgtctccggcgccgagattcgccggaaaagagagattttcagaagtttacggcgaactaaacgacgattttggctctaaactgaagattagttctaaagaggaagaaaacagagatgatgattcatggtggaatcagaacggaactgataaagatgatgaaggaagagaagaagatttctcattcgcaagtgtaaacgcagataattcaccgataaccgcagatgaagcattcgaagac

SEQ ID NO: 15368 - DNA, 444 bp, Arabidopsis thaliana columbia
  unsure (1)..(444): unsure at all n locations
ctgccaaggtcttcaacagaaattttattctgttgtgcagggtacttaatgaagaaaagtgcaaagacaaatgcggtggagtagccaatggtttgtcctgaatgaaaaaactggaaaggtaagtgttgatccacatatttcgaaaaagaaagctgtaatcgtaatgctagaagtatactaatcctcacaatgttactatcttttttattgttgttgaagtgatctacctttgcatctacctttcttcagcttggtgtatacaaaaaactagaagaaagaaacttccgcgggactgtaactttggaggtatcatttcttgcagttcttgcttttctttggtcaaagtcganaataactgaaataaaaagagtaatagtagggtttcatatttacattgctcttccacccggtcctttaagcagagtgattgttactgtaattgtg

SEQ ID NO: 15369 - DNA, 458 bp, Arabidopsis thaliana columbia
tctagaggactgaagaacgaacaaacggacgggaacaaagagatgatagcatttggtcttatgaacgtaattggctccttcacttcttgctatttgacaacgggtaaatagttacaaatatattgacatacttccaccaatgtatagttgtggtgttgatgctaactaatcatggagggaattttcagggccattttcaaagacagcagtgaactacaacgcggggacaaagacaccgatgtcgaatgtagtaatgggcgtttgcatgatgcttgtgcttctcttcctagcgcctctattcagctacacaccattagttggtctctcagccatcattatgtcagccatgttgggtctcatcaactacgaggagatgtaccatctcttcaaggttgacaagtttgattcctcgtctgcatgtccgcctttttcggtgttcattccttagcatggactac

SEQ ID NO: 15370 - DNA, 1090 bp, Arabidopsis thaliana
tcaacaggtgtccggttccggctgacgttgatgttcgcagggtcggtccgtgtataaaacgggctttggagaaattaggctactctggtcctctcaccatcactgccgttgggatactaacagacgtccctcatgacttcctcagacaagtccattcctctggaatcgctcttcatcacgttcccaccggtttatatcttctcatccttcattttctaaaattagggttttgcttctatttgccctttttgtttttgtttttaagtcttatagtttccgaaacagctctctcagggattgggtgggctgtggttaagtggacctggtataatcaacctccggctaatttaatgctcatatcgtacgagcatatctacttgaccactcttgacatgctaggtaggatcggatacaacactgttcggtctattcttccagatgatcctcaacaagccgcatcctccgcctccccttctacagggtctttcctctgggaaagcttactggcaagcttaccagcagcaggtccttgtcctctctctctctctctcacactcagtacagtgttgaaatagttaagctgtgtctgacctagttatctccacggacgcagatgatatggattcaggggcacatcaggaggacaagtgcggcgagatgggtgaacctgccttgctttgtgagcaatgcagatttactgtccaaggctttgaaaacttctccacgcatctcaagagtgaagaacatgcacatgaagtaagcatcctagccaaaaacgcagacttgttgtgtccatttgagtcaacaacctcttaccgcgagtttccctttctcacttaattcttccagttatgttttgcctaaatttgaccccatatgttgttttgtcaatgagcagtctcaatactaccgtaacgaagatgatgaaaccgatggagacgactacgtacgagactctgaagacgacgaagaagagtagtaagagttgtgtgtgtgttaatgttatcttaagctatctaatcctttttatgttcaacatcttctaaatcctcgtaaactctggttttctttgtgtgttaactgataataa

SEQ ID NO: 15371 - DNA, 1066 bp, Arabidopsis thaliana
tattctggttcaggtaaaaccaattttccaatactaaattgcacaattttaccattcatttcacatttaccataactatttgtattcatgtacgtagaatattcacctttccatactttactgggtacatagttagtagtgtacttacattattccaaaaatcatgtcttaccttctggttaagactcacaaatgattgaatgacttaattattttccaaatgatcgatgcttttcaatcaagtacatattcattagtgatactcacgtgcagaaaaggatactcaggttgaaagtgactgaaaaattacagttatacatttcatcggatttcttcgtgtatatatatttaatttagaatgtacgtacacaaattatttagtggaacgtatatggtacgaattctaataaatatctaaccaccaacaacaacaaatttaacatttaaatatatatatatatcacgcggtttcatgtatttttttcatctgttgttcatacatgatttgaatgttttgtttttttggtcaaaaaatatttgaaacgtaaatatacaaattatttagatatttacgtacatatctatacacacattactaccgtgtacatacacagtactatcatgtacatatatattattactgttacgcacataggtatatatgatattgctaatcgtgaattgtcttcgataataataaatagaatattatttaaaatagttattgtaaagacggcatacacaatatttattaagtttgtacattagaaacctttggttatttcgattagatgagatattttttgggttttttcccataaatctattcttttttttttttaacagcaactttcatattaagatgatgaagtgtgattctcatggaggatgtgtacaagaactctaggaacatgaaaatgatttgaaaaagcaacatcattatatcttctgttttttgctaaacaatctcctgctttgttgccttgtcttggagtctattgaatcttcacatttgtgaacctttgttgccaactcttatttcttgaatcagattatgaagtgtgaa

SEQ ID NO: 15372 - DNA, 1098 bp, Arabidopsis thaliana
tgcccctatggtacatttgtttatcggagaatagccttcggtctttgtaatgctcctgcgacatttcagagaggatcgatgtctatcttcacagatatgatcgaggatatcatggaggttttcatggatgacttttcagtttatggatcatcatttgaggattgtttagagaatctctgcaaagtgttagcaagatgtgaggcgaaacatctagttttgatttgggagaaatgtcacttcatggtacagtatggaatagttctaggacacatgatttctgagcatggtatagaagttgatagagctaagattgaggtcatgacgagtcttcaagcgctggataatgtcaaagcagtgaggaatttccttggacatgctggtttttataggagattcatcaaagacttcagcagaatcgcaagaccattgactgctttactctgtaaagaagtcaaattcgagtttacacaggagtgtcattatgcatttcagcagataaataggccttgatcagcgcaccaattgttcagccaccagattgggatttaccttttgaggtaatgtgtgatgcaagtgattttgcagttggagttgtctaggacagaagaaggataagaaacttcatgcaatctactatgcaagtagaactcttgatgatgctcaaaggaattatgcaactaaagagaaagagttgttagctatggtttttgctttcaaaaatttagatcttatctcgttggatccaaggttattgttcacacagatcatgctgccttgaagtatttgatgcaaaagaaggatgctaagccaagacttttgagatggattttgcttcttccacaatttgacatagaagttagagataagaaaggagttgagaatggtgtagctgatcatttgtcacgcgttaggatcgatgatgatgtcactataaatgattttttgcgtgaatagaacatttacatgattgatacagctgaagacaatgactacaaacgtgacaggttgcaggatcgtgcttcagtgtcgatcggcactgccattatgtcgatcgacactcacatttcagaggaagttgatattcgtagttgcgcgata

SEQ ID NO: 15373 - DNA, 955 bp, Arabidopsis thaliana
ggttgcgatgcgcaatttcttggtttttgcttatgttgattaggttcaggatcattgcgcggacgtccgccagttcgttggcaggtctcggagggagctgattagacgggttagcccggttatctccgttaggaggctgtatcgtgacgttttgttccccgtcccttgtttgcaagggggggaggatttggtcagatccagaagaattcgagttttgggagatgttctccgcatcaatgtcatggatagcatcaacctggattccgaaagagagatccgttgggaggtgcccgtccgagacgttatcgtttaagacttgaactggtacgccagatcttgttgaatcggataaattgggatccatgatcgttggtcacaattgatgtgttagttttggtgttgtaatgatctatttccgtccccacagacagtgccaaatgtgggttctgaaatccacagtagagatttgtaactgagattatgagaaaggagggctagatcttcacatgaactttgagagttatattgctaagaacgaagagacttttgtattgatgatagtaaagcttttacaatgtggaatgagattacaagtgtaaaagtgtaagtgtgaatgtaaagctgcattgaatgtgtcttccaagtcgtccttgcttccttatataggtctacacacgtggtagctccgtccaggatctgcggagattctcctggatatttggcaggtcagttccgagatatcagggctcctccgcgaatatctccccgttagttcctaggttgttactcgcttatctcccttcatcaggtgaccgggcttatcaggctcaagtacccatttgcgtacgtgggcacatcagttgcgcaggtcctctacttggtgggcttagtgggctggcctggtattttcgcaggtggattccttgagggaaatccagctccaacacattccttg

SEQ ID NO: 15374 - DNA, 459 bp, Arabidopsis thaliana columbia
actctaccgaagaaattggtcttggcaccaacatacgggtgaagggtcgttacggatcggtagttagagagccggcgatctttagaataaacgaattatagacactaatattagtgacagtaccatatatccattgctcgaaatgcaatcaacttttagctttgccacggtctcatcatcttgcaggctttgcatcttctctgttgaggtcttattcccaatgaccgtatccccatctttagacaccaacaattcaacctcttcagccttcaattttaaatggcgtgcacatactgttcaacattcagataatacaagaatcaagttccatgtcactgcaacaaatttggtttctaactctcatctccacaagtggagactccagaattataataccagagggagagaactcacttcgcggagttgtttaaactagcaagtgggccggaacaaagatat

SEQ ID NO: 15375 - DNA, 630 bp, Arabidopsis thaliana columbia
aatcctgcaggtccttcatcagaaaaatctgacccactaaattctcgaccagggaaaacagcagaagctcaaggtgcatatgaagtacgtgttactaaaccaaggagaactaaagcagaaatacaacgagaactcttagggctgaaaagaaaggctttaactttgcgacgacagggtaatgttgatgaagctgaggaagttctgaaccagacacaaatattggaagctcagataatggagattgattcaggcaagaatctatatgctgacagtgatcagccgaaaaaacgatccaatgatcttgccaccgacagtcggctcaatggaggagatgatagcgttacagaaaatgatatgaaggacccagcgttattgtcgactcttaagaatttgggatgggaggatgaagaaccaaagaaagaagaagcttctttcggctctgtgcagtcaagcggtccacggatagcagccaaaagcaagggacaaatccaaagagaacttcttgacttaaaaagaaaggcacttgccttcaagcgtcaagggaaaactggagatgctgatgaattatacagtaaggccagtgttttggaggcacagctagcagaactggaaacccccaagatggagatg

SEQ ID NO: 15376 - DNA, 223 bp, Arabidopsis thaliana columbia
caccgcaaaagctcggtttggccaatcctccaatgcaccgcctgcgaattcgtctgaactgtttgcttctggtaatggtgttacacaagattccaaatctttgtacctattatcaaaaatcatttttccgttgagtagaataagatgttttagcgatttatttctaattgttttttcaatttctagaactaactaactaactacaataaaattgaatgctgca

SEQ ID NO: 15377 - DNA, 513 bp, Arabidopsis thaliana columbia
ctgaatattgaactttctctctttcttgtcataggctgctgcgagacgttcgttacttaaaggaaccaactttaactccattatctctatgcttaaagaggtgtgtgtggtttgttttgtttacttacagcctctcttagttgtttagattacatatgatgatattacaactctcattgttgagtagatagtggatttttttttgttttggttttcttacaaagggacactttttattccaaaatttcttcaggttattcctcagttatcttgtccaattgcattgtttacatattacaatccaatcctgcgacgaggagtagagaactacatgactgttataaagaatgctggagttcatggtacattgacattttcaatttttctcccaagtaaaatacttatatgctgtttcagggctcagttgtgacgtcatttgcttccatttattcttagttcctgtctttactacgttaacattgtgtctctcatagggcttctggttcctgatgt

SEQ ID NO: 15378 - DNA, 488 bp, Arabidopsis thaliana
ttataaaactatatgattacgaaaataatcaaaattgtttacaaactaataaaaacataatttaagatgtaattattaaaaatacaaatctacatcttacataatttattaaatacgaatttaaaatcataattttcaccgaatagatccaaatcaatgaatcaaaacggaggaaaagttttgccataacgatgaatattagaaaaaagaccaacaagatcttgcttgtacggtaaatatgactttctcttgtcttcttctttaatcgctttattcctcagataaaacttctcatgtgcagaaactgtaactgaaactgaaactttcttcttcgatttggaagattcatcatcatcatctctgtttgttgggttcaagaatttaagtgattgtttaccatcacttttacttctcttgagaaagtctctcaaacgccatcgtttcgttgaccatgtagaggttgatgatgatcctgtagatttgctttt

SEQ ID NO: 15379 - DNA, 448 bp, Arabidopsis thaliana columbia
ttttgggcatcactggctctgctatcattggagttgattcttttccttgttggaacaccgagataccgatatttcaagcccacggggaatcctctttcgaggttttgccaagttttggtcgctgcaacgaagaaatcatcggtggaggcaccattaagagggagagaggagatgtatgacggagacagcgaagggaaaaatgcttcagttaacacagggagaaggatagtgcataccgatgaattcaagtaagtcaccaaaaattgcagtttcaccatatacttcaatgccatgaagtgttctaacatgttccttttggaatttcaggttcttggacaaagcagcgtacatcacagctagagatctagatgacaagaaacaagactcagtgaacccatggaggctctgtccagtgacacaagtcgaggaagtcaagtgtattcttaga

SEQ ID NO: 15380 - DNA, 669 bp, Arabidopsis thaliana
ctactgcttgtttacgcaattcttcaggactagcatccaactccatacctttattactactgctacttgccatttctttagaagcattcctgtctgtgctagacacagattcagatgaagaagatacatcaacatcagagcctagaatctcactgagaacatcatcctcattctttacagtccttttcgagctacctcctgaacaaattcacaatctctttacatcaaaaactagcagataacacaaaagtgtcataaataagatcactataggtacataaatacctttagcagctctatttttgtaaccatgacgcaactcaaaccgtgcagcttcttcaattttcttacatggttcacatatacgcacaggtgagtcaccttgtccacgtagtgacaacctttgctgagtgcaggttccacagaacaatcccccacatctccggcaatgatgctgctcgctcaaaaaaacaaagccaacagaaactaagaaaaattaagcaaattcaaaggtttttgggagacatagaagaatccagcaagtcacaagtctagtaatacacaaaccacaaaacatccagattcaccaaatttactcaaaaatatggaatctatcaaataggcacatcaccagaaaccgatcattcagtgaagttttccgataacaga

SEQ ID NO: 15381 - DNA, 904 bp, Arabidopsis thaliana
gtccattctgctcaggcgtcgatagacacaagcgttcatgtgcaattccttgctcttgaaagaatgtggctaaacacataaattaagatccattatcacttctgactgttccaactttagctccaaattgatgctcaattagagcaaataaattcttcaaatgatgaggagcttcagtcttatccgtcaacagatataatgaaacccctctctaagtaatcatccactattgttaaaaactaatgtttctctgaatgtaatggtgtacgataaggcccccataagtcataatgaattaattcaaaaactcgttaaattttattcatactcaaaagaaaagaatatcttgtttggttggcacggagaaagatatcacacgccatattcaaattggaagaagaaacaaacaaaaattgtagctagtaaccccgacaatttttgtagaaggatgacccgtccaactataccacaactcataatgattctcctcttttgttgtgactaatgctgcgaaagtgaaatgttcctactatcttgttcccgctccaatcaaagacctcgtaatgtggtcctgcaccacaagaaagtaatcagatatttgcaacacacattgatttttatccatcaattatgaaatgagactgaaactctttaacaaaaaaacactgatttcaattttaacttcgaactaagcttaaccattccttctttaacaaatactatttctctaccatcagccaagataatcgaaactggagccatatctctcacatttgtcagtatatctaatttttctttcaaatgatgagatgctcatgtatcgataatccaattggaaaaactaggcttacccggtaatttgtccgttatgaactccttgccaagatgaagaatatgatggatg

SEQ ID NO: 15382 - DNA, 538 bp, Arabidopsis thaliana columbia
gcttgaaccgatatgccacaatatgttcattgtcttttatcccattcagcaactcccggggattttcataatacttaaagaccttgtggtcatacacctaggaggataacatcacagtttagttagatgtgaaggacaaaaaatatttaagaaaggactcgctaaaagtattacctctgcaagtaaaaggctttcgtcattgtccaagcagcaagcagtgcctaatgcattactgagatctctacaagaaccgtctttaggaactgttacagtgtatggcatcggaaggtgacttccatcgccataaaacactgtaacagtcattgatcgagtgcgacttgatggcaacggcaaagataagtacatgaaggggtcaaatgtgattgagatttttccacaatctggacacaccaatgttgacttgtattgtccctgaagtgaaacacatacaacatgaggtacgtttaaaacagacaaagaagaggaagtaacttcaaatacatttttggtttactatacctcggatacttgttagata

SEQ ID NO: 15383 - DNA, 428 bp, Arabidopsis thaliana columbia
tgagttaagatgaagatctttctaataccactgttgatgcaattgctcatcggtatatctatcagcctgtaacaccctccaattggcacctacgattattaacaagtttaaaacctcattgacaatgaatcataagaaacaatggacaaacaaaacaatcctcaccgcaggtttagctctcttgcttgtaagagggaacaagcgagtcccagcaccaccacctagtatgatagacgctacattcttagggtctgcattttgagttctcaacagaggttcctgaaaaatgattctttatatcagaataggacttggaagaaataaagctaccaagggacttaatttaagaaaagaagcttcaattcactaaaccagaaaattttgattgatgacagactctcctgcccaaccaaaccttaaaagcctta

SEQ ID NO: 15384 - DNA, 1204 bp, Arabidopsis thaliana
  unsure (1)..(1204): unsure at all n locations
ttcatacaacagatttagaaagttctaagaagagtatagaaaataattctaaatttagaaaggctttactaaatccctttctaacaaaatcttttacttatgaaaaaccaaaactagaatgcgacatatttattcttaaagaaaactttattgttttacgtaacaaaatgatttaaaatgtttatttgaatgtaaataggtccaacgatgcgcggaggatacaactatcttgacaacaacgtacgaaggaaaccataaccatcctcttcccccgtcagccacagccatggctgcaaccacctccgccgcagcagccatgctcttatcaggctcctcctccagcaacctccaccaaacactctctagcccctccgccacgtcatcatcatccttctaccataacttcccatacacctccacaatcgcaacactctctgcctcagctcctttccccaccataaccttagacctcaccaacccacctcgaccgctacaaccgccaccgcagtttctaagccagtatggtcccgccgcgtttttaccaaacgctaatcaaattaggtctatgaataataataaccagcagttattaatacctaatttgtttggcccacaagccccaccacgtgaaatggtcgattcagttagggctgcgattgcgatggatccgaacttcacggcggcacttgcggccgcgatctcaaacattatcggaggaggtaataacgacaacaataataatactgatattaatgataacaaggttgatgcaaaaagtggagggagtagtaacggagattcgccacagcttcctcagtcttgcaccactttctctacaaactaattttactaccattattatatgttatcttattatatattacacacacatattatacattatgcgtatcttaagtttttttttggtgtacattatatatgaatgatatggagatcactgagagagagagagagctattataggttttttttttacaggtttacacgattttggctatcgtttttttttcttctatgttaagaacgaggggtgtaggttttatttttcctacttcttatgaatcatactctgtatatgtatacatcttaaatatatattatgttaaaaaagaacatgcatgcgtgtatgatatattaatatattacaatgtaactatataatatgactatatgnagtacattt

SEQ ID NO: 15385 - DNA, 559 bp, Arabidopsis thaliana
gtcacagtacagctatgtacaatatcatcatgtatattttcttctgaaactactccctatactacataagacattaacattactactaatacgataattttggctctactgcttaaattctaggaagtggtgttgaaatactttttaaagcataaaaccagtttagtagtttgcattttacattgacttgaaactaaataatgcagagcctaagatattgttgacatatccatggggagattatgaataaaataggacaacacacagttcaccagagtaaatatatgaatccagtattcaactttatattttatcatataaaaatttgtagagtaatattatctcatgagttcttatgagcattaaatggtaaatgagctaacattgatatacttataatagtgtcaaagagattaccatcaccacgaactattttgttaaaaaaattaagatgttggcagggtgcggtggctcacgcctgtaatcccagcactttgggaagccaagacaagcagatcacgaggtcaggagatggagactatcctgactaacacggcga

SEQ ID NO: 15386 - DNA, 565 bp, Arabidopsis thaliana columbia
gatttacgtcagtgtctagctttgcttgaggatttctatcacgggagtgaattaatctgttgttgaacttgttgtctagggatagcttctgtgaagttttgtcaaccgcctgaatagattaagtataccacactattcgattaccccatccttaggaatcgtttatccatttgattgcatgttatcatttctgctttgtcattcacttgcctactattgccatttatgcttttagtttcatttcatttctgttattgcatactaggactgttagaaccaaccaactttctgcttggcttgacttagagttttttgatcatatctcatctgtttgcatcacaccggattggattgacatcctaaaatactacaacgacaagatagtgttttagggattaattgagaaaaatcatactatcagagatgaagagatgaggttgttgagttcgggaatttcaatggggggaccaaagtgattatgggggggacaagaagacaaagggacaaaagcgtttcaatggaggcggttccgaggcgtcggtgtctcgaagagggtcctttggtt

SEQ ID NO: 15387 - DNA, 558 bp, Arabidopsis thaliana
cttgttaagagttaagacgtgactaataaaagacaatgcagtcgggatgttgtaagccaccgacggcgtgtacgtacgaagctggagtagtggacggaggaggagattgcttcagatggaacaatggagtggagatgttatgctacgagtgcgatgcttgcaaggctggtgttctcgaagagatccgtctcgactggagaaagttatcggttgtcaacattctcgtcctcgtcctcctcatcgcggtctacgccgctggttgctgcgccttccacaacactcgccacgcagctcatccttaccatccatctgatgataaccgcatgaccagagtccgtcctcgttgggactattactggtaaccttatctctctctctctctctctctatatatatatatatatatcacttaccaaatgcatgatcgtaaaatgaaagttttgtctcaaaattatacttgatccgaattgagatcttggatttttttattttttgacaaaagcatgttcttattacaggtggagatggtggcacgaaaagaaagagcagctttactaa

SEQ ID NO: 15388 - DNA, 426 bp, Arabidopsis thaliana
gatatggggcttgcttgttccctgtggcactatacgtaacattggaagctttaagatcccagctggttccctcaccgtgtttttcgttgcggctattctcataactctagctgtctacgaccgtgccataatgcctttttggaagaaatggaaagggaaacccagttgacataagattcatagattcatatatctattcgtttgtcatatatgtctctcagctatatattcacatgcattaacatttcaggtttctctagcctacaaagaatagctattggattggtcttatcaaccgctggaatggcagctgcagctctagtagagcaaaagcgtttaatccgttgcgaaatcttgttcacaaaaaacattgcctataagtgtgtttgtacttgttccacaattcttcgtagtaggaagctgggg

SEQ ID NO: 15389 - DNA, 630 bp, Arabidopsis thaliana
tacaattgcataaattttcttgggttgatttcattctctctttagtggaattggttcgatttgattcattccagttaacttttgcatttttgatataccatcgttttgtctctgatttagggtttggttttcttctacctgtgttggcagcaaaaccattagattaaaagattggagagctatatggacagtataagtttgttgcccgatgatttcctcttgcgcatactgtcattgcttcctacaaaagacgtgttgaacactagtgttttgtctaaacgatggcggtatctttggaagttggtgccaaaacttcagtacagccttatcgataagaatgctgatcatgggacatttgtgcggtttgtggacagatcgttgctacttagcatggctccggttttagagagtttacatttaaagttaggtcgacaatgcagcgaagtagatatcgggttttgggttagaattgcagtggaaaaaggtttgtgtgagctagatttcgattatgagcattataagactgagccttgcagattgcctcagagcttgttcacatgcggaacactcacggtgctaaactaaaaaacgtatcgctcaaggatgtacaattcccggtatgttttaagt

SEQ ID NO: 15390 - DNA, 660 bp, Arabidopsis thaliana
gtcaaactattttaaaatctttgtttaaaataatagcttacttacgtggcaagttgaggaatttcaataagaagaggcaccgcgcgcatgtcttttacaattcctagactgtttctctttactctgtttttttgctctgttttttttgtttgtttgttaatggccgaagactctaattcttccgaatcaatcattgttaacgtcaccggagatgataataagtcggctttgttcggtaagtacgatctcggtaagctcctcggtagcggcgcgtttgccaaagtctaccaagcggaggatcttcaaaacggcggcgaaagcgttgcgatcaaagtcgtacaaaaaaaacgtttgaaagacggtttaacggcgcacgttaagagagaaatatctgtcatgcgccgcctccgtcatcctcatatcgtgctcctctccgaagtcctcgccacaaagacgaagatctacttcgtcatggagctagccaaaggtggtgagctcttctcaagagtcaccagcaaccgtttcacagagagtcttagccggaaatatttccggcaattgatctccgccgtgagatactgccacgcaagaggagttttccaccgtgatttgaagccggagaatctcctcctcgacgagaatcgagatctgaaggtttca

SEQ ID NO: 15391 - DNA, 547 bp, Arabidopsis thaliana
gcattgaattttagctcctcatcaatgcacattacggttaaacaaattctcagtgacctccgccgccaattcctccaccaatttctttaccggctcctccgccgattcctccaatggctccaccgtcaactcctttacctgctccaccgtcaaatccttttccgactcctccctcaattccttttccgattcctccctcaaatcctttgccgactcctccatcaaatccttttccggctccaccgtcaactcctttgccaactcctccatcaaatcctttcccggctccaccgtcaactcctttaccggctccaccgtcaactccttttccgaagccaccgtcaactcctttaccggctccacctccgaatcctcctccaccaaatccaccgcctattcctccaccaaagcctccaacactgcctccaatccaaccgccacctgctccaaagccgcctccaccgctgataccaccaccaccacctaagtcgccgaattcttttttaaagccttcttgtggaggagaggatgagggtgagggtgagga

SEQ ID NO: 15392 - DNA, 463 bp, Arabidopsis thaliana
ccagtgtgctctaaaggctgatcaagcaaggtttggtgacgttgtcagagatgttctgcacagggagggaaaagcaatgtttactttgccaagtcattggacgagaggttcatcataaaacaagtcgtcaaaaccgagctggattctttcgaggattttgcacctgagtacttcaaatatttgaaggaatcactcagttccgggagccctacttgtcttgctaagattctcggtatctaccaggttagtgacaatataggagggaatgtgaacttgtaggactctgaaatgaaataagtgagcatgtgaatgattgatttggaatgatatctgctgtaggtcgcaattaaacatccgaaagctggaaaagagacaaagatggatttgatggtgatggagaatctcttctacaacagaaggatatctaggatctatgatctcaagggatctgcacggtcaaggt

SEQ ID NO: 15393 - DNA, 339 bp, Arabidopsis thaliana columbia
taataatcgataggattcaagcttctctaacgaaagaagggaagacgagcaagatgatctatcttggagatggtgctggtgattactgtcccagtcttggactcaaagctgaagattacatgatgccaaggaagaatttcccggtttgggatttgattagtcaaaatcccatgttggttaaggctaccgttagagattggaccgatggagaagatatggagaggatactaatggaaataatcaacgaaattatgtcatcagaggaaggagaggagaatgacaagatgttgagctctgaaaactgcaagatatctgttgggattgttcatgaacctattc

SEQ ID NO: 15394 - DNA, 616 bp, Arabidopsis thaliana columbia
tctcctttgaaaatagaaagtctttggagataaaggaaattagaagattcaagcctcgaagaaatagaagtttaacaaatcttttaaccgtcttaatagtgtataaatagaggggtttgtcctctatttcaaggatccgaaatttaatactaaaaaccctagttttcttcattgttcttgggcaaaaccttaactttgtctccaagcaactttgttcttctttccattgaatctttggtcactaaatagcgagagagagttaagtaaatttgtttacccctttttaaaaaatttattgtgtgattttcagaatcaacaaggataaaaataaaataaagagtctagttatgtggcttgatgaatagaaagctttctgagattagaaatcttcatcttgttcaaggtcttgatagcatcatcgactctccctaccttaacataaccattgatcattgctctgaatgttgaaacatcaggtcctgccaacaagtcatcaccgtcaacgtcggcaaacatgtcggcaaagagtttctctgcctccaacatgtttccttgttggcagagactcgcgatcatcctggtataacacgttcttctcactcgctcaaacgggata

SEQ ID NO: 15395 - DNA, 573 bp, Arabidopsis thaliana
ggccgagtagaagacaccaccactcgatcacatcactccacccccaggtcgagtgacttcatctccatcttctgaccaccactcgatcacatcactcgacccccaggtcgagtgacttcatctccatcttctgaccaccactcgatcacgtcactcgaccacgcggtcgagtgtcttcatcccattgccagaccactacttgacctcatcactctacccggaagtcgagtatcaccatcacaccactcgactgcatactcgatgacaagcttcaaagccttcttcattctgcactcaaccagacactcaagcacaaagaagaagagaagactccagctattcactcgacctctcactcgaccacatgggtcgagtacagttcttaatccgtcccaatacttcgtcgttttaagtattagggtttcggaatatttggctataagtagcatgtacttcacatttttgcagacaagaagtttttacctagttttattccgcagaccttgtgttctagactttttgtaatccggatttctctttatctattcagtattcagtattcagcttttgttc

SEQ ID NO: 15396 - DNA, 768 bp, Arabidopsis thaliana columbia
ggatcttacttatctcgatgataacgtatcgagaaagcaacaaagggatgaggatcctctcctcagggctaagaaactctttaatgtaaactgaattttattatctaaagcgtgattacaacgatgatgaatgaaggctacttatagagaataaagagataacaacgaatactctaaagctaatcatatcgaagattcagtattatctaaaaacacaagaaaaaggagaaaatgtaatagaacattctaaacgattctcatatacgtgaagcccatgatacgtagacgagaagcccatgaactcttaagatgcgctgcatcaggtcccctcgggtgggagaggattcgaccctgaatcaaccacctcattgtcaccacgaaacggagagaggtacttcacgttgaacacattggacgtccgtaaatggggaggaaagttgactctgtacgcattctcattgatgcgttccaagacttcaagtggaccaatcttgcgggacttgagttaattgtactcatgaggtgggaaacgttcacgggagagcactacccacaccaaatctccaggattaaaaagcaattcccgacgcttatgatcagctgcattcttgtacttggtcgtcgcggcttccaaattactgtgtgcatccttgtgaactttctgcaactcttcaacaaagtccacagcattaccatgcatgcgagttttatcagggagagttgtcaaatccaaaggtgcacgtgggacaaaaccgtacaccacacaaa

SEQ ID NO: 15397 - DNA, 412 bp, Arabidopsis thaliana columbia
  unsure (1)..(412): unsure at all n locations
agaggaaaccatgataaaaaaaacacaaataatagtaagaacaagaaaacattagtcaatatatcaagaaaaagaataagaaaaaacttatctaaaggaagtctccacatgattatactcccaagaacaaaaaaaataaaggagaatagcctctccaagcataggtctaaacaatgagctaaaaactatatctatgacctnaacaaatgatgggccttctttaaccctccggccaagttacgagccgaaaggccacgattcgagccgcctttcgacatcttcaacacttcactcagttgcgtcttcgaattaccgtcaggtagtggtgccacttgccaccaggggtggtgtcgctcagacaccaggggtggtgtcgtttgcaccatcgcggttttcggtcttctgatttctt

SEQ ID NO: 15398 - DNA, 627 bp, Arabidopsis thaliana columbia
  unsure (1)..(627): unsure at all n locations
catgcaaagaggtttaaaagaattgatttggccacctatgccaccaaagtgcacttatcttttcggttaaaggtcttgagagaactccacagttaagcgtgtttgggctggagtagtttcaggatgggtggcattccagaaagtgattgtcggaaccattcgagagaggacaaagcatggaaaaagatcatgtggtgatttctagggatggtaacaagtctttaaagcctcccggacgtggcccaccgatcgtcggacagaggtgggcccatggacccgagagagaatgtggggtccattagtaaagacggtcgggtcgttacaattcctattattatataaaggttaactcttcttttgggaaaagacaaattatgtctttgtaacaacaattatttttttataaaaaggaaaggaaattgcatcaaagtttaaactttaatttaaaactgtttgataagagaagtcttatttacagtaaattgccttttggtctcattatctttttcagaggtcaattagtgttgcttggttcagtntgatgtttggtcctctagtgtgtcaatccctaactgcatacatgtgttaatatgttttataaatctactactataaagaacaatttga

SEQ ID NO: 15399 - DNA, 822 bp, Arabidopsis thaliana
cctaatcctaaaacactatcttgtcgttgtagtattttaggtgtcaatcaattcaggtgtgatgcaaacagatgagatgtgatcagaagtcactaagtcaagccaagtaataacagttttgggatttctaacagtcctaagcgaatatgcaaaaaacagaaactttaacagaattactaaaatcactcgaccacaacaggctgatgccagaagcaggatgtggtcgagtaagaggtcgagtaatgagacaactgtactcgactgcacagtctgttgccagacattgggtgtggtccaataagttggtcgagtaattgcaaaaactaagaaatagacaatgagagattaagcgataacgataaaacagagaaatcagatagacgagaaattcctaaggatgggataatcgaatagagtggtatcctagccaattcgaatggttaacaagggcaatcaggctatccctagacaacatgttcaacaacagatcaattcactctcgtgatagaaatcctcaagcaaagctagcccagactaattctcattaacgcaatctaactttgcaggaggtcgaagggttttcttgaagacctatcagcaaggattaaagtcagatcgcaaggcctctactgagtgaattccagcttccttgccacagagagtggcattaagcttactgaagctcctaaatctcatggacaatttctgaaagccaattgcccaatagaacatggtagagtgaaagatccaggatcttccagcttttcttgaacgctcctcttaacagtggctctagacggaggggatcctctggcgagattc

SEQ ID NO: 15400 - DNA, 649 bp, Arabidopsis thaliana columbia
tacgtttcgagaacgtagtgatgcaggacgttgcgaatccgattataatcgatcaattctactgtgattcaccatcaacttgtcaaaaccaggttttaattctttcacataaccattgacttatcaacaaacctcaagaaagaaacttaatcttttgattcctatttctttgcagacatcggcggttcacatatccgagataatgtacaggaacataaccggaaccacgaaaagctcaaaagccatcaacttcaagtgtagtgacgcagtcccttgcagccacattgtcctcaacaatatcaacttggaaggcaatgatggaaaagtagaagcatattgtaactctgctgaagggtttggttatggtgtagttcatccttctgcggattgtctgtattcgcatgacgacaagagcttaaaccaaactgatcagtatttggcagaaactattatggtcgaaaaagaaactgaaaatgctcatgatgagctttaaggtgatcacatattttgacggtcgttgtagtgaggaatgtgcacgttatatttagttgtaattcatctttagcaactgaccttatatatatagcttgttaatgaagcatataccatgagattgaaaagcattggtagtgttataaattgatataat

SEQ ID NO: 15401 - DNA, 1070 bp, Arabidopsis thaliana
tagtatagattctcagtcttcacatccacaagtcagaaagataaaagcaaaaatgatagaacaccattgggggaaccttgcatgcatcagttactttcagtgtcccccttggtagtagttgtgaccttgaacttcttctgctgcttctgcttcttccgcttcttacgctcctgctgcttcttacgcttcttggcaagcttattctcaacagcttgtaagcatccgctacaagcacaagtctcatcatgttgtgagtttccggtttgtttgataaggattcctcgatcaagtaggcttctcgaacgccataccgatgagcttacagacgtgtgaattagaactgccgcttcgacattattatgatcaggctgtgctaagagaacgttgtgatccttcaatcgcaaagcttgaagaaccctgatgagctccggttcttgtgtgatgtttttcgagattaccaacaaatttgatggtgaaattatccagtgaccataaacaaatgtgacttaacatcttaagaactctcacacgtttgacccctggcactatatatagaaacggagatatggattaccatacatataaattaagtagtaaaagagagtttttaaagtaaaaaaacctaatcaagatgctctttaccaccttgtactccaagcaatatagatacatatattttttttggatcgctagctagctctcacctgtcaacaaaaaaaaggaacatgcccatacacaaacaaattttgagcaagagatagagagaaatcttacttttgaatcctctgtgcatggtttccacggagatatgtggaatgtggctaccgattatgaagggttgggttttgttttatgagagactactaaggtaagggtatataagtatcatcccttgatatcttcacttaatcgactacgtacaatatatagtttcctacgcaagctggcatataattagggcaaattaggtgagaaagaagattttatgcccaattttattttttaacaataagagtttattggactagatttctaatagttattggactagagcaatgaaaatcttgtca

SEQ ID NO: 15402 - DNA, 401 bp, Arabidopsis thaliana columbia
  unsure (1)..(401): unsure at all n locations
tnnnnnnnnnnnnnnnnnnnnnnnctaaaggttacaggtgctgaaaaagcagtttcctacctgccagattaccgtcaccaccgaagtgtataacggcgtctgggatgcgattattaataatcaggccaatatcgccatcgcgcacccgatacactactggacggcggcggtattgattacactgaaattggcgcgattcgctgggcttttgctatcgccccggatcacccgttagcctttgtgccggaacccatcgccgaaagccaactgcgtctctaccctaatattatggtggaggacaccgcgcatacgattaataaaaaagtgggctggttgctgcacgggcaggagtcaattctggtgccagatttcaacacctactgtcagtgccagattttagg

SEQ ID NO: 15403 - DNA, 602 bp, Arabidopsis thaliana columbia
catcttttgattcacctaaaatgtctagtgactaaggtcacacagattcttggtagcaaagaatggttacagagttaatgaaagaaggacaaggtaggaaacacgcacaatctacagtttcgaaacaccaataattgcaaaagatgtatataaatggatctcaggaaactcagcaactacaacataaacgggaattaaaaaaaaaagaagctaaaaatcagatatgaacctgagccaaatatacagccacgttgacagaaatataggttatccgcagcttatctgtaggtaagcttctagcctgctcattagtggcaacaaaatatatactcagagcttgttggcaggtttaaaagacagtcaacacacatcaaaaatttctttttaggtacctggtgatatatctctgcccagaacagcacaagcagcgtgtatgccgagaaaaagagaaggccaggaagatccaatagtacccagcaaagagcctgcattacctcacagaaacattagatacttaaaaagatgcagctttcagaatccaccatttccaaatcaaacatgcaaaaccagaactaagttgagacactctcaccttgggatga

SEQ ID NO: 15404 - DNA, 603 bp, Arabidopsis thaliana columbia
atatgtcaaatttgttgtgaatttactatcaagttttgtttttgtttttattagggatattgtttcacattggaaaagttgagtagaatcttaagtaatatatgggtctcttcactcattgtcaattaataccataaagatgattgtgaaagtgaatgttgttgttgttgcttttgggcttgggctcgtggcaaaaattgttggagttgtggcagtgttgaacatcgttggccatgatgggagcaacagaggaagctacgacagctgcataaaggagttttgcttcatggtttcagagtcgttcatgagcatcagtaattaaaggaggagtgtccttgccttcaatttgatcaacaatggtcttgtactcctcaaggagactatcacgtgttactttaacttgatcttcatgatcaagaggtttctcgagatagctagttgatccatgcccgaatatatagagatcaatggcgagaagaccatcatgtcgagggagtgtacagggatattgttcccatataaaatcgaataagatcttagataatatatataagagatgaactctccactaattgccaattgattttgagttagaagtataga

SEQ ID NO: 15405 - DNA, 569 bp, Arabidopsis thaliana columbia
gcttcgaaagcaatatctcatgtcaaacatctgtctttgttaggttttgttcatgatatccatcgagccagctccaatgctcgaggataaagaaaaatggtatgtcttcaacctctttagaattgtcacgaggattatcattaagcagaagaaaattgtccaaatcatccacatgtgctgtagtaattgcatatccacagtatgtgacaaacagtgctttatcgattcatggtctattatttagctccagaaccatttttctcatcggtttaataatttttctagcactggcaaagaaatcttatatatgtggttggcagcattcatttgtacaaaagcgttgacctttaagcgctctgaagcatagtaatgcaattcttgttaagaggtcttggcaatatcttatggaatattcgactcttggttgctactctctgcaggtccctggtctttcatgattttgttgcaaagtgcctcacaaaggaaccacgtcttcgcccaactgcagctgagatgcttaaggtaactataatagtcttctgcatgtacgccagagatcgttagtatgt

SEQ ID NO: 15406 - DNA, 603 bp, Arabidopsis thaliana columbia
aaactaaagaggaaaattgatagaaatgggtcggatactttaaatcagtatcaggcacgaagcggttttactcggatagttacaaacggcctgaagcggtggactatgcattgtggtgtcgtttatgcttaactaagtcgtacgctgtgtcgtttaactgaagaaagcatgtattgcagtctctgagtaaaacttaaaaacggcactgaaactatcaacatttatacacttactaggagatgaatgttgtattattctcttgcttgcttgctttggctgctgcatttttgctgagacgaaataatgaatcctcaaaccgataaagtggtgagaagaacgacgatggtggcgactgctgttgcttcctactttctcttaaccggcgattacggtcccgaacccaacgttcttgatcccgttagtcccccattttctcctttctgcgaatttgattatttagtttccatgaaaatctggataatgaaactcgtttctgattagtttttgacaaaatttggaatcagaagatcgatttagggtgattctcttagtatttatctcctctatgatacttctctagttgaagtttggtaaacgaatgtg

SEQ ID NO: 15407 - DNA, 589 bp, Arabidopsis thaliana
agtaacgtccgccagtgtgctctaaaggagcctgatgccgaaagacgaatccatgaacatccgttacctgctgtgtaatgccgatgaaatggagccgggcacctataaagaccgcctgttgatggagcaactgccgcacctgctggtggaaggtatgctcatctccgcgtttgcgctgaaagcttaccgtggctacatcttcctgcgtggcgaatatatcgaagcggcagttaatctgcgccgtgccattgccgaagccaccgaagcgggtctgcttggcaaaaacattatgggaacaggtttcgatttcgaactgttcgtccataccggggcagggcgctacatctgcggggaagaaacagcgttaatcaactccctggaaggacgtcgtgctaaccacgctcgaagccacccttcccggcaacctccggcgcatggggtaaaccgacctgtgtcaacaacgtcgaaaccctgtgtaacgttccggcgatcctcctaacggcgtggagtggtacagaacatctcgaaaagtaaagatgctggcaccaagctgatgggcttctccggtcgggtgaaaaatcagggactg

SEQ ID NO: 15408 - DNA, 678 bp, Arabidopsis thaliana
ggataccccagccagaggattcacctccggctgggtccgagccctcttcggagaggacggtgcaccatcagaacgaacaactgtagatggcccaaatacctgagcgacctgattgttatccgattgacctgctgcagctgagatcccagcgttgagctcaggaagcgagggatgagatgctgaggcagatgcgctggaaacagctagagtgtttcgagccgcagtcactgcaaccgacaaatcaccggcacgagcgggacccaggcgttgactcgttgaacacgaaggcttggacgcctcattcttctgatgagcgggagttctgaagtggagctggagtcaggaggaactgagtagatagagcacgacatttgttagtaaccaattcaagttgcgcaactgtctcaataactcgtacttttaaaaaaaataatatatatatagcggaactcgtacctataggcaggttagcttcgggaaccggttcaatacgcgaaacctcttcgattggatctagctgtgcttctggaagaacgattgcgtgaactgctggagctacgggaactgctggagctacggcaagagcagctacgatgcgatttctgctgaaagtggaccagtcagtctgaccacgtcggagaagggttacagctcaagttctgtctccgagagagtact

SEQ ID NO: 15409 - DNA, 571 bp, Arabidopsis thaliana
agtgaagtggacgggtcattaaccaagagaaggatagtgagttttcttggaggtattgatctttgtgatgggagatacgacactgtagagcatcctttgtttggtactttgaatagtgttcatgctaatgactttcaccagccgaactttgatggtgcatcgattaaaaagggcggtccacgtgaaccgtggcacgatattcactgcaagctggatggtcctgcggcgtgggatgttttatacaattttgagcagaggtggatgaaacaaggtattgaaacaaattcacaatgcttcaacgttttctttttgcgtttacatgttacaataattggtgattttttcgaatacaaattttttttaatcgtgaaaatgttaacgaaccaagtgtcgttagctctattggtaaagaccgaccctaagcgagacttagaaatcaccagttcgagtgacgcttgggacgaaactaatattgtaatttgtgttttcgggtctaaagggattaagaattttttttgtttgaattacgggcttttgcattaacattattaaaacacacataaatttgtgt

SEQ ID NO: 15410 - DNA, 514 bp, Arabidopsis thaliana
agtaacgtccgccagtgtgctctaaagccatattggcggtcatggatatggctctatttatccagggccaattggtgcggtgatttctcctgctacttggcggctataaagattttaaagatttaccctacgcctgctctttatgcacagcttgtgacaacgtgtgtccggtgcgtattccgctgtcaaaactgattttgcgtcatcgtcgggtgatggctgaaaaagggatcaccgcaaaagcagagcaacgggcgataaaaatgttcgcttatgccaatagtcatccaggattgtggaaagtcgggatgatggccggtgctcatgcggcaagctggtttatcaatggcggcaaaacaccactcaaatttggcgcgattacgactggatggaagcacgcgatcttcctgaagctgacggagagagtttccgtagttggtttaagaaacatcaggcgcaggagaaaaagaatggataatcgaggcgaatttttgaataacgttgctcaggcact

SEQ ID NO: 15411 - DNA, 812 bp, Arabidopsis thaliana
taatgcgaaaaatgcaaaacatgaatttaattccgaaattcaaaactaaccaagaaaaatgtgaagtatgtgtacatgcaaaactcactaaaactccctcaccacgagttgaaagaacaactgaacctatgaatttaattccgaaattcaaaactaaccaagaaaaatgtgaactatgtgtacaggcaaaactcactaaaactccctcaccacgagttgaaagaacaactgaacctctaggtttaatttacacagacttatgtgatttgaaatatgtgcaaactagaggtggtaagaaattttttgttaccttcatagatgattgcacaagatattattatgtatatctattacatagcaaggatgaagctctggtaaaattcaaagaatttacactcgaagtagaaaatcagcttcagagaactataaaaatagttcgaagtgatagaggatgagaatataatgagccattcaatgcattttgcagagaaaaaggtattatacaccaaacaactgctccttattcaccagaatctaacggagttgcggaacgaaagaatcgaactctgaaagaaatgatgaatgcattgttgcaggaatcagggttagcctagaacatgtggagggaagcttttcttaccactaactacatccttaataggataccacataaggtgactgcaaagtcaccatatgaactttggaaaggtacagtaccctcgtacaaatacctaaaagtgtggggtgtctagcagaagtggctgtaccacctcccaaaaaggtcacaattgggcctaagattgtagactgta

SEQ ID NO: 15412 - DNA, 694 bp, Arabidopsis thaliana columbia
tatatagataatatttatattaatgtgtataacaatgttaatatgataacaataacaaaaacatgctttattctaattcttttcaccaacaaggtaaatctagaaaacaacataattatgttttctcgccgccagtgtctaatcttcaatcattaactcttccatctccatctcaatctgacatagttttccgacctaacgccaccactgcttgtgaaatcatcgatgttggtatcatcatcaccaccaccaatccaccattccatcactatctccatctgacgtaattttccgaccaacgccatcactgcttgtgaaatcatcgatgttggtatcaccattaccccaccagtccaccacacgtgacatgaaatcatcattgacggtgtcacttttacctcctcatttctcacaatcatcattgatagttttctaaaccgcttatctgataattttattgttaacacgagtggaggatatttttggtattaagttgagtgagatgagagagaactaaataaagaaacttcaagcatagattcttaatttcttgttcttctgagcatatccattataatttcccttgaatttattttttcttttgttagcagttagtcttcctacacaaatactttccaaatttgaacatgatctttgagtaaagaagactcactcactaggtgtatttttttat

SEQ ID NO: 15413 - DNA, 665 bp, Arabidopsis thaliana
tgaaattctcaatcaataccaaatgaagttgaatcctacaaagtgcacattcggagtcccgtccggagagttcctaggttacattgtgacgaaaaagggaattgaagccaatccgaccaaatcaacgtctttttcaatatgtcatctccaaaaaacttcaaagaagtacagcgtttaactggttagatcgcagctttgaaccgctttatttcaagatcaacagacaaatttttacctttttaccaaattctataaggaaacaaaggatttctttgggatgagaaatgtgaagaggcatttggacagctcaaggcgtacataacaactccacccgtgttgtccaaacccgaagtggatgaaaagctttatttgtacatttcattgtcaaaccatgcggttagcggagtcttgatacgggaagatcgcagagaacaaaagccgatttattacataagtaagtcgatgacagatctagaaaccagatatacaatgatggaaaaactcgcacttgcggtggtaacctccgcccggaagctgcgtccatacttctagtctcatcctatcgaggtgttaccaaacagccacttcgaacaatacttcacagtccaagtcaatctgggaggttggtaaagtgggcattggagctaagtgagtatgatatagag

SEQ ID NO: 15414 - DNA, 852 bp, Arabidopsis thaliana
cccggttattttttgcggatgttacataaataaagacatcctcatcatcacaaacgttcatctcttcctctactccgaacaaccatggattgtacctcatatgcaattaaccttatttgcatctaatccaagcttcgtcaatatcctatcttctaacattgaaagagttatcttctcccctaatgtcttcatcatcacattatacatgtgaccttcgaatttaaaatatatgatcacgttctctttcattgtaacctgccaaaacaatacacatactcagtcaatattactagtaataccgattctactacattttcagttttactagtactaattctgaaatattacatgtgtgagtaatactattacatatatgaaatactacgtgtctaagtaatactggtgctattaaaacatattatctatataaataacggtactactatagctagttcgaccagtattattttcgcgacaagaacaaatattcgatttgagttcaatttagtatgaatcagcatgtgaaatcaattgcttacccattaacagaccaaatgaagcctaaatctatacttaaacttctaatgtaggtgctaaaacacaataacccaaatctaattggattgaatctcaaaatcttcaaaatatgtaattcaaagcttttgaagctctctccatacctggacttagtagattgatgcagcttgcaggaggagaaaaacgacaatgcggtcgccggagctcgccggaggaagaagcccgaagaagaaaacgactcgcgctcgaggttcgtttttttttttgttttcagtttttgttttttttttcaaaatgttttcagaatattaatta

SEQ ID NO: 15415 - DNA, 573 bp, Arabidopsis thaliana columbia
tgttagtcttcttaattctttacactagcaagtttgtgatcatattgtttgtatattaattctctatgtgcgtttctgtgtgtaatcagggattgctcaaagcttttagctttcattcactcgaaagcgggggagagcaagctacgtggtgtgttgaagaagtattcgaaacttggaagaggtgctgttgctctgatttcaccagccaagtctcttatgtcatctgctccatgaacaaggcttgaaagatggctctcttgcaaactctgcattttagattctctatcttttatcgttttatatgtaaaggtattggttcttgttgagaaatgatgtttccgtatgaattcaaaagtattataatgaaattcttcttctcttctataatcagaatcgttttggtcctttttcccatcatattctttaactatggagtcaaattcaaattacatagttatctgttataacttgaaaacttctttgttcttcataagaccaagtacgatggtacgatcaaggtgaagttgtcacatttgtcaaataataattccaataagaatctggtgaattttg

SEQ ID NO: 15416 - DNA, 527 bp, Arabidopsis thaliana
  unsure (1)..(527): unsure at all n locations
tcaagactcaacgttctctactttctggtgcatgtcacggaacccttgactctgaccctgaccttgaccttctccaaataccggtgactccatgaacgtctcggcgcatcccggaataactcttcccattagaccccttcctatttatcatagccaaaaaataatatcaaacatttttacaaataatgaagcttttggaacttctactattttttatgatctatgagaatgccaaatatttttttcatttgcagtacttatactggacaaggaaatgtaagatttatattagttactatttttcttgtcgatctatatattattataatgtagtatatatatatatcgcacgtgaacaacaaacgtgagtttgccggcgttcaagaaagtgggcacgaaaagaccctgaggctcaatgacganacgctcaaaggcaaagcggagcaacggagctggggtgcatggtggcccagactcgatgcgccacctcgctcttgatgatttgggatggtcgagcgcatgagttg

SEQ ID NO: 15417 - DNA, 833 bp, Arabidopsis thaliana
aagaaacggtataagagttgtgattggtaatggatagtccacaaatatttggcaaaattaatggctcccagcaaaaccggctaagggtgtgcaagtggtgaattggaacagtccacaagttcctaatctgattcaatctctaaggtatgttaaagaccttctattagccaatggaagagaatgtaatatgaacttactacatacttgcttccctgaggatgtggttcagcaaattgtaaaacttagacaaggaggcaatacctcaaaggttagttttgcttgggattactctaatgatggtttgtatacggtgaagtatggatattgggttaccatggaagttattaagtgtcagcacactcctcaagaagtggtacaacctagcataaccccgatattcccacaagtctggaaaacagattctcctccaaaactacaacactttctatggagatgtgtgagcaactgtatttcagtggcaggaaacttatcctacaggcacttagcaagagacggatcatgtatcttatgtctagctcatgtaaagacatttaaacatctactttttaagtgtgctttttctcggctcatatgggctattttcgtcattccagcttcacatggaggtgagtggacagattctatctaccaaaatatttactgtataatgaatgtaaatctggtgcacccccatttggataatgaagagaaaataggcccatggcttttatggaggctgtggaaatgcaaaaatgactatttattcaaggggacagactacacaacgcaagaggtagtgagacgagccaatgaggaggcagaggaatgttgag

SEQ ID NO: 15418 - DNA, 612 bp, Arabidopsis thaliana columbia
cctgagcatccgattccaaccttgtacgaagattcatgggacgcgattcaatggatcttcactcatatcacaagatctggtcctgaagattggctaaacaaacacgccgatttcagtaaagtctttctcgccggagatagcgccggagctaacatcgcgcatcacatggcgattagagtagacaaagagaaactccccccggaaaatttcaaaatatcggggatgattctgtttcatccgtatttcttgtcaaaagctttgattgaggagatggaagtggaagcgatgagatattacgaaaggctttggagaatcgcgagtcctgatagtggaaacggtgtggaggatccgtggattaatgtggtcgggtcggatctaaccggattgggttgtaggcgggttttggtgatggtggcgggaaatgatgtgttggctaggggaggttggagttacgtggcggacgtggagaagagtggatggatagggaaagtgaaagtgatggagactaaggaagaaggtcacgtttttcatttgagggatcatgattctgagaatgctcgtcgagttttgcgcaattttgcagagtttcttaaagaagaaacattttaagtg

SEQ ID NO: 15419 - DNA, 511 bp, Arabidopsis thaliana columbia
ccattgctacttcatctaagactaaaaaccaatggattctaacaatgatactacgattaatttccctacctagaagctactaattaaatacgactaacgttgtaaagagagctgttcattaccttggctctatttcgcttgaactgaggtctatccttcacaccaagtccattttttgtagaaactactcgaggcattccccattcttcatttgcaattgttgcttcttttctattagaagctatgattttcgcagtccgtttcaccaacaactttttttccgtatcggtcatagttaagcgcttattttcagagtctttggcactctgacgttggaaatcagaaggttgatcaatcagcagtatgttccttagaccaaacacaagaggaactatagactcctgaaagaggaaacaacacacatagattctttgtattaaaaactctaaaacccacacagtaaatccatactctgatacaaaagaactctgctcatcaaactaacctgctg

SEQ ID NO: 15420 - DNA, 708 bp, Arabidopsis thaliana
aagcaaaagtaaattttaaacaaatactttaaagatcaaaagcaaaagtaaattttaaatccttaagaagagtatatacctagtgggttccctcttattcagcgcacttgtttgacgtcgtggcttgacgtttgggaacccattgggttcaatagggaggagcttcaaggattgcttctcctttggcgtccttgatatcttgatatcccgccgcgcttttatgttaagttttcttctaaatggagttttagaaaccttaccttgtaggaaaacttatttagtttgctttatcatctcttggatatgttctttgccttcccttccatgctccagaggaatgatgattttcatctttgagatgttaggccgtttgggcggtttggacttcagcttttggaccctctggcgagcttcacggttgccattctccaccttgttggtatcaggaccaacaaggttatcaggcagaggaattaccgggtatgagatcgcctttgagattgttggatagacgatttttgttgaccttggtgaatatggttttcttgctgttgtgatcaatcacggcaccaatagttgcaagaaaagttcgtcgcaagaataatggcttgtcgatctccttgtctatatctaacacgtaaaagtctatcgggactatgcaatcccctacgactagcagaaggtcgtggagtaatccgttgggagtct

SEQ ID NO: 15421 - DNA, 552 bp, Arabidopsis thaliana
gccagtgtgctcgaaagaaaaagagatctatcaactgattaaccagttcaaagccatatggcttgagcatcattctggtgtcatcggagatccagaagtattaggcatgagcgatcgcatcatcgtcatgcatgaagggcatctcagcggggaatttactcgtgagcaggccacccaggaagtgttaatggctgccgctgtgggcaagcttaatcgcgtgaatcaggagtaaagaaatgacaacccagactgtctctggtcgccgttatttcacgaaagcgtggctgatggagcagaaatcgcttatcgctctgctggtgctgatcgcgattgtctcgacgttaagcccgaactttttcaccatcaataacttattcaatattctccagcaaacctcagtgaacgccattatggcggtccggtatgacgctggtgatcctgacgtcgggcatcgacttatcggtaggttccctgttggcgctgacctggcgcagttgctgcatctatcgtcggcattgaagtcaatgcgctggtggcttgtcgctgctgctc

SEQ ID NO: 15422 - DNA, 660 bp, Arabidopsis thaliana
gtaacgtccgccagtgtgctttaaagccatttcttgatatcaaagtttttctctgcccattccttcagctgtgcgtacatcagcagacggtcacccgcaccgccgcgtgcccatgcctggttgttgctctcctccagatattccggtgcgacggtaatatcgtcagcgacacggttcatcttgccgagataacgatcctgcatgtacagcgccacatcgttgttagcgacttcagttgcacccggtacagtcaacggcgtttctgcggcgttatgaccgacttcatgccagatcagccagtcgttcagcggcgtcgtcggcagcgtggtgctgttcggcgagaagctgctgttcattaccggataacccgaatgcgcatcaccgatggagatctgcacatcgttggtgaaacgatgtttgtggcccggcaagtttttataggtaaacatccggtgcttaccgtcttcgctatcacggccgtagaagtcattcatcgagctggcaaaggtatccagatcgttagcgaattgctccagtccgccagtgtaattgctggcattcaggttcttcttcggtgtggtatagacgaaagcgtctgattccagctcacccagcggaccgggttgagttcagatcgtttttccatgcgccgtctttata

SEQ ID NO: 15423 - DNA, 963 bp, Arabidopsis thaliana
ttctatatattgtttccgtgttagttatgacaacagaaaaagttctgcatacaattcttgaaacgaaaatatattcaatataatgtatattgagcagtctcaaaaatatttggatatgtaatttatttggataggaagagcaagaagcagtcactaagcaacttaggaagaacatggcttacaaagctaatccggtaccaagtttctaccaagagggtcctccaccgaaacaaccattgaaaaaggtatggaacgaaacctcactgtcttcacttaccttttttacgcccactttgattcattttattgcttgtccaagactgaaaacatattgaatgatgagattcaacatttagttttcttttcttgtgatcgggtaagataggcttatcctcaccacaaacagcttatcctactcaactacgtctatggtcactttagctttgtttttattttaattttaagcagtaactcactaccacaattgtgaattcactttattcatggtaacagaagttgctgaatttctgtattcagatgttggattttggttatatgggctctagtagtctacggtaggaatgattccaaacgctgagattttaaacttgctactgattgtttgatttgcagtttccattgactcggcctaagtcaccaaaccttaaccgtagaaagagctgcagcgacacagttaacgcatcatatcaggaagtgaaggggaaacattgtgctcgacatcgtcagagtgtaggtggttgcaaggatgaagtcaaaacgaacagtgtcccaaggacaccaaatagcagcagcaaagatcagatgagaaagtccaaaaagggaacaccaaagtcttgaagaagtacatgaaatgtttaatagtggccatgatggagagactggtgagaatggcgttggtgttgtggaggagtgaacttcgcgtagttgtagtttcgttttgac

SEQ ID NO: 15424 - DNA, 502 bp, Arabidopsis thaliana
tcatttgatttatagaaaaattgaaatctttcttgagatagagcaaccccacgaactctagagtagatcctccagattctaggcatatctaatatccaattagacatccgttgatgagagggattcagaaatcttccaataagactgcaactattcctctcaatcgaacttaactgaggttgatttgatagaattaaaggactatcatcgttgatcgtcatctcaaagattgctttatccaattccatattcatgataagaacccctttaaaacactttcagaagatactcacagcaacacaattcacagagaattgatacaactacagctgcaactacaacccaaagatcttgacttgattgaaactcaaaagatttagaactccgacagaaaacggaaatatcttcgacaaaggctccgctccaaaacaagagtgcaatagagggagaagttcttaagcccagctgaaaagggacggcgaacaaacggcgatttgagatt

SEQ ID NO: 15425 - DNA, 545 bp, Arabidopsis thaliana columbia
taagagtaagtcactctagagtttcaggcaagcaaagaccatgatcgattggagactagctccacctggccaaacataccatcaccatccagtttcttgaccaaaaggttccctgagtgcctatctgtatttaagattctgatgtcaagaatccctatacggtgtacagctgaaacagggaaatttgatgttccgtgctcgctagcatcataatcatgaggtatgaactgctgcaaggaagcaatcttgctcaccaacatcttctccataggcttgcttgccttcactccatcgttgacattaaagatagagtgagtaatcttcacaagagcagtgggaggaacatttgcaaaatgctccttgtcgagaagataagccgcaacttctctgtagcctgttccccaacccgtactgaacgcttcaacccaggttgtccaagcgccttaccaacaaaaccttttgggttattaggagcataaggctcctcatcagtctggtttaacaattgcaacactctctccacggctgttcttaaagctataggc

SEQ ID NO: 15426 - DNA, 510 bp, Arabidopsis thaliana
caccagttcataagcctccgaaaccaacatacagtccacctatcaagccaccaccagtgcaaaagcctcctaccccaacttatagccctccagtaaagccaccaccagtacaattgcctccaaccccaacttatagccctcccgtaaaaccaccaccagtacaagtgcctccaaccccaacttatagccctcccgtaaaaccaccaccagtacaagtacctccaacaccaacttatagccctcccataaaaccaccaccggtacaagtgcctccaacaccaactactccatcacctccccaaggtggatacggtactcctcctccatatgcatatctatcgcatcctatagacataaggaactaggtaaacaagatacagtacatatatttcctcaaggatcgccaaataggctttctagcacaagagagatgtatgttaaagctacatatggtactgcatattatgtggtaaaataaatagagttctataaatggttgttccataaatg

SEQ ID NO: 15427 - DNA, 506 bp, Arabidopsis thaliana columbia
gtttttctttggtaggatatgcgtcatctggttattgattctttaaaaactgctgtgtttgcagtaaaagttgtttcgggaaggacacggtcattggttgagaggtttgaaagaggagaaaaaattactcattctgaagataaagcagccagtgcaacagtagttcatagctctaattctgtagaggaagagcccctgacagcatcggtacagacagttagcatgatgcctacccaggtaatgccagttaaacttgatcaggcaactaactcgaccacagttgacgttcctgtgttatcaacacgacgaactaagagtactccagtcagagtaatgcctgtagtactcggtcgggacactagcatggcaactgatacgcctcctgtaacatcaacccgacctgataggacttcagctactaatttgacatctgatgtgtctggtgtacatcaaaacgacaaactaggacttctccagccccgtcatgccaatgatactcaatcaga

SEQ ID NO: 15428 - DNA, 1236 bp, Arabidopsis thaliana
agacaccaaacaagttaaacgtactctacgaaaacaacagacacagttctcttcatccatctcgacatgtaatcagtagcttgttaaaaggctattcatgagtgtgcacagaagtgggaatgttgtggttcagagatcctctcctcttcccctaaggaggttgcggaactcttttttcctcgtaagaacctggaatgtcctctcccccactctattggccactatatttattaaatcctcggcaattaaccacaaaatcttcccctcaccataaaatcatatctcccatgcagttactgaaactatcctaaagatggaatttaactaagcgatctaggagacaactttcttgtgtaaatcacttaacatgaatggtatacttatattgagatacaagtttacacttacctcctcttcatcttctgactctgtttctgtatcatcatcataactgtctccaacatcatctgcgacatcctttgctgaactaatcagcgtctgcagcgttgagtgatcaccctgctttgtagcattaatcagagtgtccatcaaatcaggttcaacttcacgcaacaatttccctgagagcatgttataccacattagctaaagaatttacaaacatggtaaaatacaaagataacatcccagataatagttcatctacataaaaatgatgttttttctcaccaatatagttgaaatgtctacgctttccttctcgaacatccgagcctagtctctgcggcaaaacaacgaacaccttatgtgcattgtgccaaatttacgattaacgtaactataacgtccaaaatgtactcattgtgacttaccttcgcaagcatcaatgcatcataaacctcttcaccaagcgacgcagctctaagatgagaaagtcaattactttaaaaccagaaacttcaacacaaatataaaagtgaagattttgaaaagatgatgtttccaagttttgagaagcttacttcagaatctgcttaacctgatcaccggagaaggaagcaagttccataccccatttaacggcacggcgagcatcacgcttccgctggttacgactcctcaacgaatcagactcgtaaccatcgttatcacatcttcttcggcaacaataacagtaggctttaaagcttccggtggcgcgggacgaattcgccgacgaggtggagactttcagtggagaagacgagaagagaagagagtggggatagaagaagt

SEQ ID NO: 15429 - DNA, 554 bp, Arabidopsis thaliana
ccccggaatgattttggaagacctttaaataaggaagctaaaagaaaaagatcagacttgttagaagagtgtgatgaaagcattgatctgtggcggtggaagaagcggtcaatattgtttgagttagtatactagaaggtaatattttatatttttctaagtcttaattgtagcactttacagttattaaaatgatagtcaaactgattctttgattatctttgtcttatgatttacccgtgcatcacaatattgatatgatgcatgtggagaagaacttgtctgatgctttattgtctccattgatgcaaagtgctaagtctaaagatggcttaaaaggaagaaaatacctggatgatattggaattcgaaggcatctgcacccaaagactcggggaaagaaatatatttgcctccagcagcctactggatgtctaaggacgagaaaaaggtattttgtcagaggttgtctaagtttagaggtcgtgatggctattgtgggaatattgctaattgtgtcccagtaaaccctcatgtgattgggggtctaaagt

SEQ ID NO: 15430 - DNA, 502 bp, Arabidopsis thaliana columbia
aatttattcacttagaatgatgaagaaaacggtggaagtgaggaacgcaaagacctcaataccttgtattttgttcttctcttcacagagtttgagggtattgtctagacaatggtagaatttcttggctcgttataagagatttaagtcagtaggagttgatgattgattggcttttgaattcttataaaggagaagaagacttaaatagagtttgagattgtaccctctgtttctgtagacaaccagtcatgtgcacagaacaaagcctgtctgatatcagggttcaaggaactctgactatcatagatcaccggtgtcccagagttgtaggttgaatcaggcgcacagattgacatcggcgtagccaaaatgtcacgggccaactaagagatgatagggtatcttggtgtatggaccttccagtgattcagaatgttgaactcgccactacggggaaagatcggttcagacaagtacttgtccaaatcgcggtgttgtg

SEQ ID NO: 15431 - DNA, 743 bp, Arabidopsis thaliana
aaaagatcagacttgttagaagatgaggtggtgcaagaggaagagtgtgatgaaggcactgatctgtggcggtggaagaagcgatcaatattgtttgagttaatatacttgaaggtaatattttatgttttttctaagtcttaataacactttacagtttttaaaatgatagtcaagctgattctttgattatctatgtcttaggatatgctcgtgcgttacaatattgatatgatgcatgtggagaagaacttgtctgatgctttactgtctacattgatgcaaagtgctaagtttaaagatggcttaaaggcaagaaaagacctggaagatattggaatccaaaagcattgcacccagagactcggggaaagaaaacatatttgcctccagcagcctactggatgtctaaggacgtgaaaaaggtattttgtcagagattgtctaagtttagaggtcctgatagctattgtgggaatattgctaactgtgtttcagtcaaccctcctatgattggggttctaaagtcccatgatcatcatgtactcatccaaaatttgttacatgttgctttgagaggcttgttgcaaagcggacctagggctgcagtgactcgagtctgcaactacttcaacagattttgccaacgtaccattgacccagagaatctaatttccttggagtctgaaattgtagagacaatgtgtcaacttgagaggtactttcctccttctctgtttgat

SEQ ID NO: 15432 - DNA, 565 bp, Arabidopsis thaliana columbia
cgccagtgtgctctaaaggataaatacgccctgctccgccagtcgccagcacggtagcgcgggctttgaaataaaccacttcaccggtttcgatgcacagtgcggtacaacccaccaccgcgccatcctggtttttcaccagatccagcgcataccactcggagaaaatggtggtgtggtttttcaggttctgctgataaagcgtgtgcaacagtgcgtgaccggtacgtcagctgctgccgcagtgcgtgccgcctgctcgccgccgaagtttttcgactgaccgccaaacggacgttgatagatacgaccatcatcgagacgcgagaacggcaggcccatgtgttcgagttccagaatcgcttccggcccggttttacacatatattcaatcgcgtcctggtcaccgatatagtccgaccctttcacggtgtcgtacatatgccattcccagttatcttcatgggtattaccagcgcaacggtaatgcgccttggcagaaacggtatgggaacgggcgggaagatttagagagcagccacatgtctggctgtctgggaaattt

SEQ ID NO: 15433 - DNA, 754 bp, Arabidopsis thaliana columbia
aaatcgtgtatgttctccatcgccgttgctgtggaaatggggggtctcttccgttccaccatcaccggaaaagctagaagacgacgacgagctggtgttggtgattgtactactgtccacactagtatcgtgtccctttccatgacggaatgttttcctctccaaatcaacaatttgttcgtcatcttcttcaacttctattggctggtgaagcttctcggtcccggtggtgggctccgtgagttcggcggcggatcccatcagaaagggaaaagatgacaaagtggaagacaggaatggccaaataagggtaaagcaaacaaaaaaggagagattctgagatctaactatctatagagaaggtgatagatattatgttggggtcgtctttgtctccttcttcttcctcacttgaacattatcaaatacataaatgatgattctgcttattaattatatgattattgatggtgatttgtttgttttgacttggccgttgattgagcactactcctagttctaatatactagtactagttttatgcaaaaacttttcacgtgtttaaagctctttgttagttagttactaaaactgtaggactttttgttttcttttgtaattttgttaatatttacctttactacatatagttgacaaagtaagtagtattagtgattttttcctcccaaatttcattatttctaaaaataccacctactattatgggattttcgaaacattatgtgactttta

SEQ ID NO: 15434 - DNA, 576 bp, Arabidopsis thaliana
tgcaagtccagttccgagtacaactaagtgaggatatgttgctatgagattgattggagacaagtaatccctgtaaaaaataggatccaaataaacttcaacaatgaaggagagaataagatcacgtggtcttttcaaaagagaagaaaacaagactttaccatatcaaaactcctccaagtaagacaacgaagggatacagctgaaaacacgatttgaacaaaacattaattttgcagcataattaactatttctgaatcaataactagttaggagattaccatagctaacgctaacaccatgctcccgtttcttgatcgaacgactttgtagacatttgttacactgcaaaatacaaccgtgtgcaaaccagcttagacatacgaacttcacaacttgaaaagactcttagttgatcactcaaaaataacataagattgttcaagtttgatagactcacttgaatgcaacggttggtataacagcaaaagcgatcatcatgtatagcactgctctagaagtttgaatctctaaaacagagaacaatgaatagctcaaaaaacaaactttaaaat

SEQ ID NO: 15435 - DNA, 576 bp, Arabidopsis thaliana columbia
gtgcttatattgacttcaaattacactgcaacgttgacatcagtgatgacggttcaacagatacgcgggttgaaatcaaacgaaaacattggcttcttttctgcctctattgcagcaaatgtggttaatgataatcctacgttccaaggaccgagatacaagggattaaagacagctgacgattttacaaatgctttaaggaatggaactatctcgtttatcgtcgatgaagttccatatgtaaagctctttgttgcaaagcacccttcagaattcgtcattgtcgaaaccgaaagcgtaaccaacggctttggatttgtaaagcttttacccccaaaactttcgtctattattacattattggtatgcacacttatttgacttaatccatctctctctctcaggctttccagaaaggttctcctttggttcaaaaggtgtcaagagaaatcgaaaagctaaggagaacagagaagctaaaagccatagagaattggtggttcagagacaacgacgtcaccacaagcgaggatacgttccacctctcactgtatcacatttcgcggtttgtttatg

SEQ ID NO: 15436 - DNA, 1170 bp, Arabidopsis thaliana
tagtatggctttgatttactagtgaattattttgtatagtcatattcaattatttaatcgcaataatataatcatgaatttgaacattttcatagatatttatcttcaaatgtagcaaaaaaaaaagactatctagaatttattccaagttatctagaatttttcagctaagaaaaacttatactatgtgacattcttgaaccaatcctaatagaactagttgttcattgttaggtttcggcaaagacaatgggaaaacaatctagtgagatttgtgtcttatacaactctgacgaataaagatacttgagacctttaatcattgcgtgaggttttcaattttgatacctacaaatacagctaagtcactcctttatacaatctttgatgatcgaagactaaactatcctgaaggttcacttcatttgatcactgatccacattttagtgtttggaacaattgtgacttttaggtctaaagaaggaaatttttgggttataatttacatgcgtagaagaaaatataactatcgtgatctattaaatttaagtctaataatagctagtggttacacatgtttagaataacacattaacttcgtttcttgactaattttacctcaaaacaaaaaaggtaacaataatgttatcccatgagaagagaagcaagaatctctcccatggttttctcaggcgtgtctccgttgtcatctacgtgaactccggactctagaaccgccgcatcaagaactagtttccgcttcgctatctcgtagatgttctcatcaaccgtcgatttcgtcaccagtctgcaccagcattgccagagttaatacagatatatgtgagaatacaaaacagagcacacataaaccaatccaaaccacaattttgttctgaaagttatctaaactgattcaaggatttaaagctcaaacctgaagatagtgactggttttgtttgaccaatacgatggcaacgatcttcagcttgccgatcaatctgtggattaaaatccatatcgtgaataatgactgtatccgctccggttaaattaagaccttgtccacctgctcgagttgacaagagacatgcgaatatcgacttatcgttgttgaatgtgtcgctatggtttgtctatctgtacttgagtactgttgaaacaaaag

SEQ ID NO: 15437 - DNA, 541 bp, Arabidopsis thaliana
tctctctctctttcatcgcagcgaataatccaaatcgaaagcaatttctctcgacgaagaaaagagaagcaatcggagtctgtggaggtaaagaagtacacgatcaaatttcaagtcagagtttcggggaaaaaaaaggaatgggggatcatctggtgagagctgaggaattcgagaagaaagctgagaaaaagctcaatggatggggaatattcggatctaagtacgaggatgctgctgatctgctcgaaaaagcagctaattcctataagctcgccaaatcatgtaatttccataaataaaatttctttgcttttgattattgtttcatcggattggtgtcgtgtttttttttattgttgttctttgtgatgatgaggaagaaaaaaaaggtgaaatttgaaacgtttgatcttaggtttatcagttgcggtgatttgtctatggtcatgtgagaagtagaattagtatctgggtttatattaggtctattttgatctgtaagaaatttatggttgataatttcatacgaaaacatttt

SEQ ID NO: 15438 - DNA, 587 bp, Arabidopsis thaliana
taaaaaccgacctaaaaaagttgagggttttgtacatgttttttgtaaaaggtgagggttttttttacccacttttcatagagctgaggaacttgataagatatcaaacaacaagagtctccaactcaagcagagacttcaatctctcacaacaacactgcagctgtttcaggcccaaaaggagacacgaagcccatctctcattcatcggaactctgcaatactcaaaacagagaaccatcacgcgagccgcttcagctaccatcgcacgccgccaactcttgttgttgtttgatatcactttctcttcttcaagcagttgctactactttcagaagaaagctgagaagaagcttaacagacggagaagattcgacactaagtacgaggatgctgctgatctgctcgagaaagcacgtgattcctataagcttgccaaatcatgtaatttccataaataataatcagccggccttgatttttgtttcatctgattgatttgtgatgatgatgaggaagaaaaggtgaaacttgagacttttgattgatctttggtttagcaattgtggtgatcttccatggtgttg

SEQ ID NO: 15439 - DNA, 490 bp, Arabidopsis thaliana columbia
tgtctgtgtgctgccttatatctaatgttctttgagtttctacaggtcagattccacccgcatcattcagaaatagttgcgagtggaagtttagatctcgaggtccgcttatggaataccacaacttctgaatgcattagatctcatctattctgtaagttctaggaatcagaacactctgtttctttttcgtagttatgcctatcatcttaccagttttaatttcttcttgttaatctctcttgccagatcggcctattgcttctatcgctttccatgctgagggtgaactacttgctgttgcttctggtcataaggtgattttcccttttaagtacccacgaaacgctagctagttgcaggtggcacctccttacagaaagatctcataagtttaattcatgatatcttgcagctgcacatgtggcactacaatatgagaggagagggatcacaccaactgttgtaatgaagacgaggcgatctttga

SEQ ID NO: 15440 - DNA, 656 bp, Arabidopsis thaliana
  unsure (1)..(656): unsure at all n locations
tgagtgatgtttaaaaacctaaaaaaaattttaatcatcattttactcgaccaacataagctacaaagtcttccagggaatctttcaagtttatagaggattgcgggatttcctggagtttttctagtgaacggagaatacagagaagagacaagaagacattctgggacccgccgctgacgcccatgtcctccatgcaacagaccaaaggacaggaaatctctcctcatctcttctcctccactcgacgtcaacgccatcactcgacctccatccctcttaactcgacctcatcgcctcgttttctcctccacaaccccataaactcgacccatcactctcattcatcaccaccgacaaaacaaactcccatccactcgacctctccgccttctccttccttaaaaaaaaaaacactcgacttctcccttttattttcatcccaacaccactcgactctcacttcactcatcaactctcactctcaagctcaacaaacactcgttctccgtccccatacttctcgctcaaaaccactcgaccactcctcgccaatcccacaaccatcactcggccgaagctctcatcacctctccactaccactcgaccgcttcacatcaccatcttcttcatcgtntcatcactcgaccctatc

SEQ ID NO: 15441 - DNA, 615 bp, Arabidopsis thaliana columbia
caattgaatacataactgttcggatagcaaacgtggaatcaagatttgccagcgctttatcagagtccggtgagatcaaagtagaaggcagagtgaaacaaggggttccaagtcttaccaaagtcggattatttggagtggatgtgagtttagaagggagtgtgattctgtgcaggcaagtagatcagcctgggatgatcggtaaagttgctagcatcttaggagatgaaaacgtcaacgtgagcttcatgagcgtcggtcgaatcgctccaggcaagcaagctgtgatggcaattggagtagatgaacaaccaagcaaagaaactttgaagaaaatcggagacattcctgccattgaagagtttgttttcctcaaactataggttaatactttacatggatgcacataagaaaaaactcagagatcgatataatcttaaatgatgatttattctgtactaatgatacaatcgagtgtacatgaaacaaattacatagttgattttaccaaagcggcatgtcgacgaagtgatgtgttattgttgcagccagcagggattttacattgtttctcagagagaagaagtcagagattgatggagctatgaacagtga

SEQ ID NO: 15442 - DNA, 877 bp, Arabidopsis thaliana
gtcgggtgggatggatcgggaaaagtgttcgaggaagcacaaggataagtgcatccgaagctaaatatatcaagtatgaaatcaataataaaatgaatcggagatgaaaacttgaagaaactacggtaatcactgctccttagagacgagatcatcatgccgatcttcttcaagcaattagcaacatgaatagtacacctatagattctaatggcaaggttctcaaaggatttttgtaccaacatagcagcaatgttcgattatgattcaattgatgtccattagcaattggtatcatgaatcgatgcaaatacaagctaagagaagacaaaaaggagtttgggtcaaacctatgattttgcggagaccgtttagaggggctgggccaatgcattagtggagatgggccattgttttgggggatgggcctaaatttggttaatgggctcgaagaacagtggcccattaagaggaaccctaacaaggcaacagtgtggcagaggatggtgatggtgcgacggatctgaggcgcagataagaactccgataaacgctaaatgatgctggtgggaataaggtcaacgtagatgagatacccacataaaacaggtcggaggtaaggatggtgttgcatgtagagatcatagcggttttagattggaaaaattggggctgttctgttggtggaaacttcaaaaagatggatgcggacaaaagctgaatagaaggaaagatcatcgagcatttcctctgccctctgtcgtcaatgaacggccgaggaagttaaacgattgaaggttgggttgggatgattgagataatagccagagaagaattaaaaatatgaagagatacgaaagaagtgaacgaagaagag

SEQ ID NO: 15443 - DNA, 2384 bp, Arabidopsis thaliana columbia
cctcattagcttattgagttctgtaagtggatgtttgaatgtttccactgttgtaatactttgtaacacttgtgttatatataaaagccacacacttaatgagaaaaaaaaaacaaggtttgattctttatttttccattcttctaggcatatatataaggaaattcacttatatataacaacccaaattctctaaccgcttcaattagatctccgaattctagattccgatcaatccaaatcggggaagttggtgcttcatagattcggcgccgagtctggtttcctcaaagacggtgttgtgtcgtcgattcacgccgcgagtcttccttcttagttcttcgccgattcacgccgcgagtctttcttttgctaagacgttcaccgagtcttcttcttaaggtgattcgaccgtgtacctctctagataagcctttgaatcaatctatcttgttgaagcttctttagatgaagcctttgactcattagtattatgaaacttatggacacttcgttatggtctttgatttgtatagttcatttgaagattgaatataacagagcaatggacgctgaaattctacagtttgtgagagtatcatctgggctatcggttaaccgactgaaccatctgatcaatctcatcaatgcgtggtcaacgaactgtcttgagtacgattgatggtgtgattgtggaggctgtatacaaatgggttcctggttctcttggacttgaattggttggtgttggaggtggcgacgttggcggaaataatcaacaaggccttcgtgggaatgatcagcaagccgtcccatctgccgtcgctggagtttcggatagtgaagaagatgaagaacatgaagctggagatgaccaacagagtaggagaaagcgaaagagagaacaaaaggagaacaagggtcaggaggaagagaaggagaaggagatgaagattcagaaaacctgatcactcagaccaatgacttgttctgacagtcactacatgataagaagtagtagtgttttacttggagtatagaagaatccattgagtttattttagggttaaaagagtattcaagtagatgtgaaaactcttggtcatcaagtagtttaaaagatgaaaagttaaaagagttaaacaagtgataataataatcagacacacaatgatttacatgtgaccttttagaaactctaacaaaattaccaacaaacaaacctccaagataagaatcaattgatacattatgaggaatcaaaccggtttttgtatatagatcaaacatcattaaacaagagttgtgtttacgatcacacttcttattctgcatgcatgtccattgaagaatcaatagaacctggagagttagatcccctgttcacttcactgcttctggtggttccgccggatgtgtagcctccctgcggaatttggtagttctgaagactacgccgtattgggcttgaaagtgcgtttgagaaaaccgagttcttggcctggttctcacactgctcggacctaaccactggaacagctgttgggaaagaggtgcctgaagtggtcatgagcccgggattcgtgacatgcattgttggttgcggtggtggcgctcttggggatattggaggctcgtctatgcagcattcgagctcgttctgcattggagaaatcagaaactcaatcaagaacagtaaacaaatctgaccacatgttagaataaatagatagaactcatatgaacctgaatataattgacaatatccataggtgtcactcttgaccctccttcttgttgtctccatatccattggtacagtttttcctgaaataaggaagataaagcagaaaaatctcgtaagggtctctttagccataacctattccacatatatatcacgcgcggtatgtcatcttccaagtacaggttttcacatcacaacacaataaacccacattttaagtagaagaatttcagtacaccaaggaaaaacaagagcagactaacacaatattactctatagaactcaatatagtgaaagagaacgcatacaagaaaatgctaatcctatcatattaagactactattcaattcatgtggctaagaagcacctatacaggaaatattagcattatagctaacgaaaacggaagagatagacaacgatcggatgttctaacattcgttctgtttataatcagaccagtaatatagacgaagagacaaggataacgcaaggtgaaagttagaaacacggtctccagagagacttttcttgtttcatttccatcttcacgcttcatagccttgttttcctttgtcatcaactagttttcatactctaaactacagttctaaaatgtctagacacatcacaat

SEQ ID NO: 15444 - DNA, 1536 bp, Arabidopsis thaliana
agacgatttcgaacgcgaagatcgtgagtcgttgtcggagtcttcgccgaacaaatcatccataggatttttcttcggcggtgaatccatgaccaaattaggtatctctatttctccttccgttgcagagagtttccgatcgaattctacgccaccaaacccaaatagctcagatccgagtgttaaaagtccgacccgaccgagtttgagttcagtcggtttaaaagtcaggccagtttagctttatataaattaaaggcccattttaggagcaactttttaagtaatccctgaattttcaataatattccaaaaactcccaaacttttgtttttaacttccgcacaagttgttaccgtgaggagttgaagagagaagaaagagagaattattaagagagactataaccgtatgtataaggtataaatgtaatacaggggatacgtaaataaagtcatacactcatactataccaactagtttcctgaaggttttgacatgctcaagcctctgagcttgagcctctgttacagcatctgatgctttcaaggttctgtatagattcttatgaagcttaagatactcattcttatacatggttagatcattatacatatcattctccttcatataactgataagctccattactctctcaaaatacccgcctctgagaaagttcaccacaagcttctctaacagatcttgtgttgtctttaagtttttgcttgcaatgttcctcttgatatctccccacacgattgtgatctcccggtacatgccaagagatgagtacatgtcgatcaagatccaaaagctttggacagttggtgggattttcatcttggggattttccggtagttattaaggcatctccttgcattttagctttgcagaagtagtagagggacgagtttagctcatagagcatacttggagctttcatttgttttcctgcattgatttcctgaaccaagagatccctgagctctgtgttttcactgtctttctcttcagtttctggtgaaacacaatttcatttgatggatctgtaattaggccggctttcgtcatttgtttcagaagaacttctgcattcctcaacatcttgctcttgtaataacctgacaagaccatcctatatgtggccaattccatgggatagccagcagaattcatgtcgtcaagaatatcatgagcagcttctaaccaaccaatagcaacacaagcatcaatgacatcagcacataacctggatccacccagcgaaaacaaaagctttgatagctcagggagattatcatgtctcttgtacccatatactaacttggcaagagtcttgtgtgtgataccaagcttggaattggcataattagcaaatgttgcttcagtatccactccgagagatgaatctctctgcaaaagcttgggtgaaatatgtatctttaacccatatctgatatggtgtgatcaacaggcaaaacccgaggctttacagaatcaaatccaagattctcaactgaaaccaagacctt

SEQ ID NO: 15445 - DNA, 541 bp, Arabidopsis thaliana columbia
ccagagaggtatggaagatcttcaagattgtatgagagacagtgatttggatgatgtaccaactcggggagttttctacacttggtcaaatcaccagcagaaaaatcctattatcaggaagttggatcgggcattaggtaatgcggactggttcgacacttttccttcggctattgccgaattttggccctcctgaagattctgatgatgctccttgcataattaacttggccaataatccacaacgctcaaagaagtctttcaagtatttctcattcttggcttcgcatcccacctttatggcctctattcttgaggctcggagcagaaacacatttgttggctctaatatgtttctattagaggagcaccttaaggagattaaaaaagagtgtagaagattgaatagagcagggtttggtaatcttcagcagcgcactagcgaacgcttggctgccattagaagatattcagtctcaattactttctcttcccttagattctctctttagacgagagcatatggctagaaaaaatggga

SEQ ID NO: 15446 - DNA, 471 bp, Arabidopsis thaliana columbia
cactatgaactttcctgaaaatcagaaaactagctagaataaaagccaaaagtggccatcctcctctttcacagtgaagaagaataacatcctgacggttcccacgagcaagccaactctcacaaacacggagaaaatgttgaatcaatgataaaggaagcataggacagccttcatactgcctcggatactcaagaacagtaacatcatattcacagagagtttcagcaaacacgctttttttctccccttctcggaaattaaacgctaaaaacgacgattccgggaattcttcgtgtaaatcattgataacttcatgcaagaagatctgatacaagctatcagccaacacctccgtgcaaaaacatgaatcagaaactgtacatttacacacagattttgaatattagatgtctattaagctaaattgttaaatcactaatacatgattaagaaaagaaatggtgatga

SEQ ID NO: 15447 - DNA, 877 bp, Arabidopsis thaliana columbia
cacgggtttttaaaggatttaagaactttttaacactcttctaagtttttttaaaaccttttgtaagggttcacaagagattttaaaatggttcaaaaattatttaagggtttacaagggtatttaaaagattttttaaaagatttatagaggattttaaaatatattttttggatgtgattatttttttttttgtcatctgcttaattaattatgttcaaatgagccatccctgagaaacattgtttacataagggatatgatgcggttcggtacaaatttttcgtgtcaaagaatatgcttttacattcgcactacaagaaagtaaagataaagataaattagataattcttccttgtcgatttgaatctcgtttagatatactgagaacgctagccattcgtttggggaacacaccatcttcactaaatctgaacattctgaaagaacgatacgtcttggttgtcagctccaacaatacatctcatcacccagagaaaggcttctacttcggtatgaagtggggataggcttcgccgggtgttagcggctcccattatcggcggctctccattagctgactgacaataccaccctaaccctgaaaacttatcactatttttccaagaaccatcaacgtagcatttaactccattcaaacaagtcgaaacagcaactttatctcgggtaatattttccatgtttaaaaatccatggttttctgaacatagctcagcttgcgctgtttgtcatgcttttgcttccgtgtccactaaacgtaggagctcatattgagatttatcaattttctcatgaatcttttcattttgcgctttcaaatatacaacttatcatggaaaagtgaagatgaattat

SEQ ID NO: 15448 - DNA, 564 bp, Arabidopsis thaliana columbia
gaatcggtactcagtaagtagaaatgctcatcgaaacctaaggagagcagaacgggcacgcataacagtcagcaaaatctcaggtaatataagcagttccttagggtccaacacaaataaagctacaaatgaccctgcattttcttaagttaggaagcaaactagtcactgacccttctataatatttggaccaggattagtggaatctatattggttaaggctaagagctgggaggtagaaagacagaaagtcttcttatacaatgaggtaacacaacttgatgcctttttgaattaacaaagagaaactctaaattagatagagtaatcatcacctgttaagagttatccaggtacctcttgttgcaatgttgcaagaatacaataagctgaggcaggaaaaagaaatggagaagcaaaggctccgggttagtctctcctcctaagccttaaatacagtaagaaaaccaaaactgtgaaaggaaatatttgaagttaacctgattgacaataaaatgcaggaaatgaagaagatgagcattcacaacatgtggctgagggag

SEQ ID NO: 15449 - DNA, 555 bp, Arabidopsis thaliana columbia
  unsure (1)..(555): unsure at all n locations
cccggtaaaaaacaggcggttaagttaccggcgttttcgctcagccgtaggaggtaatttctcagatggtccagtcggaagtttacggccagtcttcttttccagtcgattctttagctctcttagtattcgaatctgtcgtagcttctccggcgacagtttgtcccaataaattcctgcaaaacaaaaaaacgatcagcatgttgtgattcaggcatagaattcagaaaacaatatagtgaatcactgaataaggctgatgataattcaaacaccaatctactgacagatcacatgaaaaacttgagttaataaggaaatcaagaccttgtggttttggtattggtgtgtttgtgaaaatgactcgagtaggagtgcatatgatatccacaggaacatcgtgaatcgccagtttctcgagaggtatatcatctacaagctgacaatcatgtactgcaaatgaagtaaaagcttcatgagccaaggtataaacagaaaagtgtatataaaggtttcttctaaattgtatttataccagttgtnacacgggtgtgg

SEQ ID NO: 15450 - DNA, 577 bp, Arabidopsis thaliana columbia
gactaaagtcacaactctctctttctcaacttctcaacacaaactaaatcatccgttattcttcaggtagctcattttgtcactcctttcaactatactagtttggatagctttcacgctgctttgaacggtcttcttcctaaagatatccgtgtcagagagctgaactgcagcggtttcctgagtttcatgctcggttttctgcctctagcaaggtttatcgctaccagatatacaacgacactttcatggacccgttccagcgtcattgggcttaccactgtgcttataaactgaatgcttctaaaatgcgggaagctgcaaatctttttgttggaaagcatgatttctctgcatttgctaacgctactcgggaagatggagtacctgatcctttgaaaactatatctcgcttcgatgtcattcaaatggtaaagaagaaagatcttagttctggagaagttagggtaaggatcagactttgaccttgttggtgttttggtgtttagggatctcttctacagcttgaagttgaaggttctggctttttgtacagacaagtcagaaacatggttag

SEQ ID NO: 15451 - DNA, 584 bp, Arabidopsis thaliana columbia
ctcatttggaagattgtgggattttagttattacttggatcacgtataggattcagagacaagagaagagaaaagaggagagaaatggagaaaagggtagagaagagaaggattgtgttagttccggttgctgcacaaggacatgtaaccccaatgatgcagcttgggaaagcccttcaatcaaagggcttcttaattactgttgctcagagacagttcaatcaaataggctcatcattgcaacactttcctggttttgactttgtcaccataccagaaagcttacctcagtctgaatctaagaaactaggaccagctgagtatcttatgaatctcaacaaaacaagcgaggcaagcttcaaggagtgtataagtcagttatcgatgcaacaaggcaatgatatagcatgtatcatctatgacaagcttatgtacttctgtgaagcagcagctaaggagtttaagattcctagtgttatcttcagcactagcagtgctacaattcaagtttgctactgtgttttaagtgaactcagtgccgagaagttcttgatcgacatgaaaggttccaaaatagcttaatg

SEQ ID NO: 15452 - DNA, 622 bp, Arabidopsis thaliana columbia
  unsure (1)..(622): unsure at all n locations
tatcagattcctcttttcttcgctcgattccatttcaaaatctgttcttctatctcctgttcctgaagaagacgatttctgggtttgtctaaagtttggaacttttttcctgtggagacttcgattacctacagatatcagattcctcgattcaaaatcaaactttgttcttctgggtctcttctcctgttgctgaggaagaagattagtgggcttaagctttattttgtgggtgtgtatgcaaaatcaaatggagtgggatagtgattccgatctcagcggtggagatgaagtggcggaggatggatggttcggtggagataacggagcgattccgtttccggtaggtagtcttcctggcacggcgccgtgtgggtttgtggtcagcgatgctcttgaacctgacaaccctatcatttatgttaacactgtttttgagattgttactggttatcgagctgaagaagttattggtcgaaattggtgagtttgctcctcttgacttttaccctaaatttgtggtgttgaatttgtttactgtagcgaaatttgctcatttgtggtattggtacgatgttactagaaagctttgttgaaagctgtttgacnnagaagaattata

SEQ ID NO: 15453 - DNA, 534 bp, Arabidopsis thaliana columbia
taagatgatggttatccaaaaaaaagttggaaacaatgaattattttggtcaaattgaacttctattatatatatcctgaggttaaggtttcttggtccaacacgacaggtatggatgatgaagatgatggatcggcctctattcatgatatgcttgacgataaacgtagagttgactatttcaagagttaccttgccaacgtctcccaggctattgagtaagtcaacatttttcccttcattcagttgtttacaagcgacaaaaacttaggaaacagagaatttttatcaagtaaattagtgagagtgttatgttaatggcgaaaattgaaacagagacggagtggacataaagggatactttgcgtggtcgctgctggacaacttcgagtgggcgcaagggtacaccaagagatttggtttggtatatgtagactacaagaacggtttaacctgtcaccaaaatcatctgcttactggttcatgaaatttctgaaaggtgatgaagaaacacaggtaagaaggaatgaaaaa

SEQ ID NO: 15454 - DNA, 495 bp, Arabidopsis thaliana columbia
attgttccaagcaagatcaattactggaccagtgtgggaatctgatgtctagagtgagagaaagacaactaacatgttacatttggaaaaacagaggagctaaataattttcaaaagttggttgtcacacctgcccggctatccgtcccagttgtacacaaggtagcacctcattcacctgaagcattatataatcagcttacaaatcattatctcatgatggataaaacaaaaggtaaacatcatcaaaaaaacagttaacaagtacatacaaggtcaagatcccatatctctatagaggactccattgtcccgatagctacaaagttccctgcgaacacgaaagcaaaacttgaggaaaatgatcataatctcatccacagctattcttggatacacacaaacctgttccccctcctgttgagaggacaatcaagccatgctgtgcacaatggaagctcggatataatgatgtcattgcgaagataaatgttt

SEQ ID NO: 15455 - DNA, 482 bp, Arabidopsis thaliana columbia
ataagatgacaggacaacttgagactcttgctggtaacttctcccctgatcagatacagaatttgattgccttgttcagttctcagttgcagccacagattgtttctcctcagactgcttcttctcagcatgaagcaagttcttctcagtctgttgctccttctggtatcttattctctccttccacatattgctttattggcatcttggcagtttcacataactctttgtccagtgacacttgggttattgactctggggctacacatcatgtgtcccatgacagaaaattgtttcagactttagatacttctattgtgagttttgtgaatcttccaacaggtccaaatgtcagaatcagtggagtgggaacagttttgataaacaaagacattattctccagaatgttttgtttattcctgaattcagattgaatttgatcagtatcagctctttgactactgaccttggtactagagtg

SEQ ID NO: 15456 - DNA, 568 bp, Arabidopsis thaliana columbia
  unsure (1)..(568): unsure at all n locations
attattagtttccaaatgtcggctgattgcatactacacattttcttgttgtttatctttctattctcttagcatatgggacatttatatatcatccattcatttcccagttggttgaaacttgatttcggaacactgaaggcttattgttaccaggttttacagcactgtatcaccaggagattcaatcaatgttattggagagtttgatggggatggcaagtgtgacgtggaccgtcaaaacaatttcttaattgttcatcctgatacccttgttgccggaactagggtattattttcgtcttccctttaaggactctgtctacaactaccaatcttctttgcacttaatttagttgttgttgtgaataactgttctacctttcaggttgctgcaagttttggttgcccaaggcgaaccgtgctagatgagaggctcagatccaatgaacacgctacagtagccttacttggaaccttgcaacaccaagtttttcaggtttactacattatggaatctttttgatgagaattctattggaaaatgagtgtttttgtntgatttttt

SEQ ID NO: 15457 - DNA, 493 bp, Arabidopsis thaliana columbia
attgtgttatttgtttctgcattgttgatccaatgagcaccataagaaacgaaaagaaaaaaaacaaatacctttgagaattatagggagagtagcttcctgaacaacagtcattgtctcgtatccagcatccttgattgcctttagcgataagggagacaatggatagtgatcaaatctgttaaccgaaaagagtaactctcaatctgacagtaccaagaggtcaagattcacaatcaagcaaaactcttaaggttgatgtgattaattcaaaatcacacagaagaaactagatttgcaacaatgtttgtttaccttgtcttagtcaaataagaatcatttgcattcctcgttttatccgcttctataacattctccttatcaaccccaaaagcagaaacagctttcttcttaagagagtcataatcttggtccgcttcctcatcatcttcactaagcaaatccccaatatctcccattactaaactcttga

SEQ ID NO: 15458 - DNA, 570 bp, Arabidopsis thaliana
tcccctgactctttttctctttcatcttttaaaccaaaccccacgcactaaaaccatagacaaactctctctcttctctctctctcccacacacacgcttttatttattttggagctaatcggaaaacaaaaaagcaacggccaaagcaatgaggaaagatgatctctgcatcactgttcctaccttcttccgatgtcctatatctctcgacgttatgaaatctccggtgagtctttgcaccggcgttacctacgatcgagctagtatccaacggtggcttgacggcgggaataacacttgtccggcgacgatgcagattcttcagaataaagatttcataccgaatcggactcttcaacgtcttatcgagatttggtctgattctgttcgtcgtcgaacttgtgttgaatcggcggaattagctgctccgacgagagacgagatcgccgatgcgatcgatagagtgaagatcgagaaagaagaaagagatgatcgcgaggttttgtcgaagattgttcgattcgggagagaatctgatgataacagaggatttctcgccgaaaagatga

SEQ ID NO: 15459 - DNA, 583 bp, Arabidopsis thaliana columbia
tttctggcttaacgaaaggcttatgtgatctgccgttgattctcaccggaccaaagttccaaactaagctttagttggagtcgcagtttatatattgtaaatctctcacatgattagttatgcttttgagaataaatccaccagctcgacctgtcttgtaaaaaggttgtcctatttaagtcaataccatagttgccttttaatcagttagtgcagcccatactaggcttacatggtaatgatttgatgattatgttttggtctccaattaatttgagataagaggcgtacgagttggcctcgacagggtcaaaaagtcaaaaatttccgacattagaaggtatatctttttcttttttaaatctagcaaatgaaaccccaaactcaaagagtgtacagatattcaaaagagattatacttgaaaccaaaacaattcaaattcaccgacaaaataaagaacataggtgttttcaacataaagattcatgatggtgaatggtcaagagtcacggccgcatcggtaatgcttagagcagcctctactataaggggtagacggtggaggaagacatgagttgagta

SEQ ID NO: 15460 - DNA, 497 bp, Arabidopsis thaliana columbia
ccctgctaggcattcatcccaagcatatgaatcgaaaattatcagccttcgaagtttatttatcagaaggatatcaatagtaggttgtccatccttaaccacatttaacatttgctgcaatgaatcctgaaaaccagcgacagcgttaatcggtattgcatacagagaaaactgaaaaatcatcctacagtgaagaaaggactctaggtacagaggctatgtaaaagactcgttcctataaaggccagcagattatgagacaagcttctacaattatttataagaaaaagttttgactctgtctatattttacacacatgattcgtgagaagtatgaacgtggtgggggtgtgtatgagtgtaggtatgtgtgaatgtgtgtgtagtgtgcaggtgggtgggttctgtctgcgtgagttagagtgagtgtgagtgatgtaatgcgccaaatgcaactctatttcttcttaattctaatggtgtgtaagtacatgaca

SEQ ID NO: 15461 - DNA, 523 bp, Arabidopsis thaliana columbia
tcccctctcatatttttgcttgaagaaatctgattcctttgccgtgagtttctctcttttgtcaataataaaggttacttctttagctctctctttctctgtatgactgattttgaaaatcctattggcagaagaacaaattcgatgcatagaacacaaaattcataccgatgattgacaaaactgtgaatgcttctacatggcctacaaatctccacaagtcaaactatcctgaacctgaaggtacactacattgaaacattgacactacactaaatttattcgtgttttcacgttttgaaaacatgattcttttttttattaccattccaaacattcatcatagtttcatgtctttgaaaagagattctgctattatactataccgctacactcttcaacaagaataccacttattacctaaatgtgttcttgccgtcgcagatttatactctgccgtgaagccatcgcagaggagaggacgagaaggttatttattcgggggagtgatgtctttggtgat

SEQ ID NO: 15462 - DNA, 1052 bp, Arabidopsis thaliana
ttcagcaaccgctagtccttgctcttcctatcagccaagtccctgtgcttcttataatcctagtccaggctcctccaacttcatgagtcctgcttcatcctcatttgctaatcttacctctggtgatggccaatctctcatcccatggctaaaacacctctcaacaacatcatcctcatcagcttcttcatcatcaagactccctaattacctctatatccctggaggctccataagcgctcctgtaactcctcctttaagctctccaacagctcgtaccccgagaatgaacactgattggcagcaactcaacaactccttctttgtctcctcaacaccgccaagtcccacgcgtcagatcatccctgactctgaatggttctcagggattcaactagcacaaagtgttccagcttcaccaacgtttagcctcgtctcacaaaacccatttggattcaaagaagaagcagcctctgctgctaggaggcggaggagggtcaaggatgtggacaccaggtcaaagcggaacctgctcccctgctattcctcctggtgctgaccagacagcagatgttccaatgtctgaagccgtggctcctccagagtttgcttttgggagtaatacaaacgggctagtgaaagcatgggaaggagagaggatacacgaggagagtggttcagatgatcttgaactcactcttggaaactcaagcaccaggtaattccaaagccacatgtacattttcaaacccggttgaaccaaaaccgttcttgatatgttgctccaaattttatttaaattgttctcttcccatgtaatgctcaaagttaaaacacagcttataatattcgtttatctgtccccgaccgtaatcttttcttcctaatattgtacccttagcttgtgattgaattctatcactgcctatgtttcactgtctcgtttcgtaaccttcccggtttaacagctaacgtaaaaccccggtttgagtggttataattagacggtttatgtaacacttatagcaacgaagaaattatgttattgttta

SEQ ID NO: 15463 - DNA, 698 bp, Arabidopsis thaliana
gcagtgacatatgtttactacacaaaacaggtgcatagaaagaacattaggtactcaactgttaggtgtctaatatattacagagtcaggtaatagaaggtaaacacactagaacatttgggtcagacaatcccattagctaattcaaaaccggcaatgaaatatttgttagcagcagtcaccacatcagcatgcttcacttctttgcaagcctgaatcccaccattggcatgggcttcaattaaacgagctgccatgactccagaatattttacagaatctgcctgtggaatatcattttctctgtgaaccgcaagagatttcaaacgaagtttcttttccccagccattttaatagcaaatcgaaatagatatggtaacatttcagcaaggggcaaaagcactttcttcaattttgtttcacgccataatcctgtatagcagtcgaggacgctaatgatccatgcactcatatcaacacaaagccctagccaatgctgtgaatcaatgagaaatgggatgtagaccacagcagagcctgtaggggtacattcaagtaggtcgtgatcaaacccatacattcccttatcagcagacttgacgaattttgggtaatgcgtggataattcaaccacgaatgttgaatcaatgactgaaacggcttggtgcttgtcaatggtattagttgcgcaccagtt

SEQ ID NO: 15464 - DNA, 1039 bp, Arabidopsis thaliana
tagaggataggatcccctctaatccattatagaaatgtttccgtttgtttagaagggttataaaaagcttaaaaatgagaattagatttaatagtagctagtgccataataactatggtgacataaagtttgaaaaatatttgaggaaaaacttatgaattttttttggttacatcatttagttaaaggactagttgagcaaaaactaagaaatatttagttttatcatatatttacataatattctaatttctaatgtttttttcttattattatgttcttctataaagaatgaataatctcatattataaatcaagttttgtaaactctgattagtaagcatgattaattataacaaatgtataatatgaagcatttggtgggtgggtgatattcataaaatcgacaccttttaggcgctggaggagttcgatgataattttatgaatgtagatgaagccgccctacacgatctcataaatagaactatgcctaaagatacggattataaacattgtagttgaatttaaagagtattaataccctacgttgaggaatagcccatgttatgtcgtaaaagaggtgattgtttttgtctttatttgtcatgacgctcaaagcagtttcctttagatgtggtagctggatatcttcattgccagcaatcgcctcactaaacacttgtgtgataatatcgatacccttgtttcagatcgagccgtgagaagagaggttttaaatgacttaaattccaaatttgataacaacatcaacatgattaagcatcgccaaccatttccaagctttgatgacgctacaacaatgttgtaataattattaagttatttaaaattaaaatatttctatttttaaataaataaatatatataaatatatatatatatatatatatatatattaaaaaaaattagttaaaaaccaccattgtatattgccaaaattttagttttttaacatcaaaatttttaaaattaattataaaattattcctaaaaactatgtttagacttaagacta

SEQ ID NO: 15465 - DNA, 599 bp, Arabidopsis thaliana
gcataaactaggtgaaattcccttaatgtcagataatgaataaccaattgctcttctatactttttaagttcagacaacagcaggttcacttcatcatcatttaactcagcattaatgatcacagggtaagtagagtttgaaccaaggaatgcatacctcagaccttgaggaagtggtttgagatcaaccttcggtgctttgagttcagaccagtcatctgaagttggaatgatcagctccatagtgtcgctgataaatgtggtcgagtgaatagttcaaagaaaggcatgggacttccccccccaagtgatcttgttttaagtcattagcttgacttccttactcctttaatcatcaagaggttcctggagatgagccaaagtcacctctagaaggatttgatctgctaagtatttcttgagcctttgaccattcactgtgaaatctccactcttaccagctagagtgactgcttaataagggcggacttcaataacacagaagggaccaaaccatctagacttaaactttcctggaaagagtttcaggcgagagttgtatagcacacctgatcactacctggagaccttggtgatga

SEQ ID NO: 15466 - DNA, 782 bp, Arabidopsis thaliana
ccaagatctcctagtttttttggaatgattttctgctgaatgatcgcactgcattcgtgacttagcaccaccatttcttggacttctttgatcctctctgtaatcatgcctttcacatatttgttagagtctggtataagtgcaagacagtcgacaagaggcatcgtgacttcaagatttttcaattgtttctccaggagagctttgtacttatgtatcatgaccttcttgaatcgaccaggaaatgggagtaggggcttgtaaggtgggggaacgaagacattgtctttggttttggcggtagttggtttttcaacaagaggagatgatgcacgagctagtagtcgagtaggttggtcgagtataggctcttctattgctttttcagcggaatcttcattctgacagaaatcctccccatctcgctccacactgtcctcagtcttctggttcggactctcctttgtgggtaattctttaccgcttctaagtgtgatagcatgagcatactcctttgaatttgggattgattttccggaaggtcttgtaaatttgggtgctgaggtcgacctagtgtggccttctatgtatctgatcttcgatgtcagtgcttcaaccttgatattgatatcatagtaactgcagtcaaccttgttatgaatttctgccatccttttggataaatccattgctcttgttgcttgccttggagaatctgctgtaacatgttcttcaagtctgaatctagaattgttgaagctggttgttgttgctgctgatag

SEQ ID NO: 15467 - DNA, 809 bp, Arabidopsis thaliana columbia
cccttcaaacctctctttcaacttaagatcttttgtttgcttgagggcaaacaagagataagtttgggggagttgataacactgtattttactcattttactcatgtgtttatcatcatttaacttagtgttcactcattgtttcatatcattttgcatctttttagcttattttgcatacttaagcatctaggatctttttacatacatatatcatgttttggtgtgttttcaggtgtagaaggaggttacaaggaaatcactcgatcttctactctatcaaaccaggagggaagcagcagagcaatgataagtagatttttacgcctacttatgtgctgaagtgaggttcagttcaattcgccttaaacactaatatgtcgatgcagctatagggggtgtcaatccagttcattgttattgatagcaatcaagatgtatacaaaagcaactaagtcaagccaggttatagtgatggtgggtttctaataacaatcctaaatcaggattcaaacaacaaaaatgagaactttaagagccctactcgattattgggccgagtagaaccaacaggtaacaaatttaagaaccaaaatgcaatcaacatgtgatacagataagatatgaataaaactgcaatcatggggtgaatacatataaatctaagaagaatagaagtcctaaggattgattcattgataagggcaactctagggtttatcaggtggctaacaggcgaaaggcagataccctagacgatagattcaaaaccaggtcaatccactctcgtcaaagagacctcataactc

SEQ ID NO: 15468 - DNA, 723 bp, Arabidopsis thaliana
tactcttgtaataccactatcgattatcgcatctatacagggaggtgttttcccgaagtgacaacacggttcaagtgtaacataaagcgtcgctccgacaggggattctcacgagttttaatggcatttctctcagcatttgggccaccaaaaaactcatgataaccttgtccgatgatgtgattatcttttacaataactgcgccgaccataggattggggttgacgtaaccagccccttttggtgccagttttattgctaatgtcatatatttggaatcgctcatctcagtagcgtcccggccgtatgactgactgggagcagttctctcgggagctttccccgggcgtcgaacagtcagctcagaactggtacggacaaggggaatccgactgtttaattaaaacaaagcattgcgatggtccctgcggatgctaacgcaatgtgatttctgcccagtgctctgaatgtcaaagtgaagaaattcaacgaagcgcgcgtgaattgaggcattatatatgacatctatttagataactaaatgcaaatttgaatataggggcttctatatccataatcatgtgcctctaatgcctgcttctaactaattcatttgtagacacaatcaagcattttcagcttggagttgtccctcgagtaagatggtgggccttacatatgtgtcataagacatgtgaaaggatagatctgaatacaacgaa

SEQ ID NO: 15469 - DNA, 952 bp, Arabidopsis thaliana
gagggagacaagagatgagaggaagatggcgggtgatagagcggacacctcgttgagtgttgttatcttggatcacttattcagttacaaggagtatgctgcaaccatccatcgcgcgggaattcgcgggagtctttgtgttggtggtctcttaacgccaatactaggagctgtgggtatggaattcggaacccctgacgtgttgcctaagttcattgacctagactatctcaaggggaaggattttcttgagaaaacaactccggcggatcactatctcttcaagttcaaccactcggagcttggaccttctcttctacccctaccatgcgagaaccggacttcggtgaagacaaggcgcaacatcaattttatgccatctccctctgccttgaacatagacattcgaggagctcgggaagatgaactagaatgtagtccagtcgactatgagcaacatgagtactttactcaagctaattatgaggagcaaatcgagtttgagcaacatattgatcaacccggagcaagggaccaccgaacaagagcaagctcattatgaagaaggtgctaaccaagagggagatgagatagctgaagttcacaagaagctcggtgtgcttgaagagcttggaaaccttcacagcaagacaaaaaagagtttcaagaagaagatgagaacaatgaagaagtcattgaagagtatggctgctcaactcaaggatttccagagcaagccaacgccaccgtcttccaaccccgaagtaagaagaagcggttcaacgagctcagctacaaggagagctgaaaggatcgatcaaccccgagcttcatcttttgagcctcgggaaatgatctccgagtagagagatccaaggagtaggcagagacgagcttcacacgctcgaccggacagaacgagcaacaccctcccgcctcaacttcagcccct

SEQ ID NO: 15470 - DNA, 600 bp, Arabidopsis thaliana columbia
gtacctctacaaattgctgtggcaaaaacgttgtccatctgttctttaaactgatacaacaatgtgcctcaaactttgtggtaatatataataatatcaaattccatttgagcagaaactgtctactaaacgttaatctgatgaccaaacttcctctggcgtagtgctatagttggcttacgcggatcattccgtgccacaatcttaagcggatgggcttctgtgttgaaaacccactcgtctaatgaaataacagatgaaggcgaaaagagaagatatagatacttaagagtctcagctaagaagaagctttgcatcttgttgtctttagcacctgtattgacctgaaaatgaagaagcaaacgttaacaacgtgtttccgaaagatggaaaggcccactcgaggagggtatctgattggttaaggtcagcccggctcgaaacttacatccttcaagcctacatatccagattctacgcgagagttcttctcaaatgcttgaaatatattccatcccactcttgatatgtcttgtcccagttaacgccagaggtaaaacagtgattcaacggtttctggtcttaaaatgttccaagatg

SEQ ID NO: 15471 - DNA, 683 bp, Arabidopsis thaliana columbia
tgtgccaacatattgggagacctcaatgtcgtcgtggatggaagactaccgagcaatagaaggtagtgaagtggtaatagcacactcaggtaagacagatgtgttaatctcaagatttggagaaactctcaaaggaggaatctctgtgactcgaatggaagagaaatggactatagacgatgttgcattcgacgtgcctggtctctccgttgattgttttattcctcctaaagagatgaagatggattttcaccaccaagatgctcaaaaacatttaccaaactacaatacatgatcgaggcaaaactgtaaaattagaaaaatgtaacagagtggggtgtttttgactcaatttaaaagttgtggggttattttaaaactatatatatagttctaccacaactactttgttccttcttcgttgtgaaagcaaataacagagagcaacaaaaaaatgtcgcgattggctttaaatcgttatagccgttgtttttcgcggcttaagacattgacgacgcctctgtttttctcttcctctgctgcgtcgaatcgagatggtgactatcagataggaccgcccccgatccgagtcggactcactgagtcagcgggtcgggctgtttttgcacgcgtaaaattggtgccggagatcttatacacacggcaaagccgtcgtagcttgc

SEQ ID NO: 15472 - DNA, 600 bp, Arabidopsis thaliana
ctcatcaaatcctgtcgtactctttgcaactaggtattgctgcttcaaagtctcttggttcatgttatcaaggtcaactgtccccaaaggcatataaaaaaacagatttgaaaagaaaaaaaaggtaaatctcaaagtcatcaagaacaaccaaatcattccaaaaatattgaatcgttttgccgtacatactacatttcctcaagccaagagacgctaaaaattccattcttttacatttatttagtttcaaataattttcttagtgattctacaatttttaacaagtcctcactttttaacctaacaattccaatgtatgaaagtcaaaataaattaaagaagtgttcaaaacttaaatagtattttcagtttttcactaatataaatcattgtaactgagcctttttatatcttaaaacaatttttttgttattaatacaaatctaatttggaactacgtgtaaaagtaaatccaaatacaaaattgtagttctcttgttactaagctttacaaggagaaagtggagagccacaaagacagtcgttaccggcgaaggcgctagccgggaactttgtcgtaggaagttctccacgggg

SEQ ID NO: 15473 - DNA, 375 bp, Arabidopsis thaliana columbia
ggagcattgttaagccaaagcgcttgactcccgtctttcttcttgaaatcagggtgtttaggattaacctgtagacagagatgtcaagaaagaaaaagaaaggagaaccttagccaaatgtatcacagaattgtaacaagtagaaccactaagacaagtttcattaccgatccattctgtttcatttcacggtaatcacaccattcattcgggttatcaacaagatcaaaccaaagattagttccaaattctcttcctctttgaacgctagctaagaacaagaagatgaatgttcatggttataatcgaagtttaaacagccaaaccagtaaggatattacagtaaagagagaaaaggaacgggaatgatgcgct

SEQ ID NO: 15474 - DNA, 602 bp, Arabidopsis thaliana columbia
cctgtgtgagcaggaagccgtgaacgtgtccttggggaatcttttgtcttacccattcgtgagagaaagagcggtgaagaacaagcttgccataagaggagctcactatgatttcgtaaaaggaacgtttgatctttgggaacttgacttcaagactacccctgcctttgccttgtcttaaaagattcctcctactcaaatattttctctatgttgtttctaattatgttcttataatcttcttctgttgcttctgtaatgtcatctttgctacttctattccaatagaaatgaataaagctttaaagagcatttacttttatttccaccctcattaatacaaagagaagataacacttgctatgcttatacacatagatagataaaggctactacactcaagccagccccttaaggaatgggataaacaacgaccttccctgtggcatggttcgtttctaagtatgaaaaagcatcagcaacgcgatgagaatgggaacggtcctttgggatcaaccacaggtctcaccttcccactctcaatatatgggttaagtttcttcaaaacatcgccattagatgtacaacgaatcgaaaccagg

SEQ ID NO: 15475 - DNA, 637 bp, Arabidopsis thaliana
gcactacatgacacttttttttttttgtgaatcattttctgaaatttttcaaaatttttttggtttttctatgccttagataaatgcagactcaaaaatatacacaatgcaacacacacttcctgagccgtcccccaaacttatcatgtttcttgtaccacttctgcagcttgctgttgtttcatagtgcgtcgctcaaactcttgctttcccgcgatggaggtataagctcgctgaaatgatacatgctcgtgtcaaactccgcctcatttatatcatctgtctcatcaacatcttctgttgtagctcctttggtgtgactaacctcctcagttggcggactgccctcaaaataaagatcttctagcgcaggcttgaagtcaatgttccttccctcaagaatcctagtagcgtcaatgcaggggagaagaatgttggcgattctagaatgctcgaacctgtagcggtggaagtcgccagccatgtcaaactccaagaactcacatcggcgcaaatgatccaagtccatcatcctcggtgctaaccctggttccttgagcggtactccacaagcttccagaattggcgtcagaacgcacccacaaatagtgctcctctcacattcttcttaatgttt

SEQ ID NO: 15476 - DNA, 490 bp, Arabidopsis thaliana columbia
ccttaatcatatactgtatattcacatacaggcagatgctaggaaaacattctgtaccttgaaaacacttttccaccctgatttcacattactgacacggctgagtaccatttgagaaatgcaccgaactattagttctcttatttcagcagaactgcttttttgcataacaatgacaaatggtcgaagagattcattctgaaagttgtaattagccagcacctcacgttccaagaacttcatagacagttgtcgtagtgagtccataacgaatattgcaacagaaagattctctgacaagccaacagatactagacaatctgacaggatgctccatatgcgagaccagactagcctgatgcggttcatgttgtagtggctgtacagcaagaaaagagatatgtagatgatatgttgacatgttattagactatgatgatgctcactcgatatccagttctgtagccaagatgagatgtattcaatatgt

SEQ ID NO: 15477 - DNA, 479 bp, Arabidopsis thaliana columbia
gatgttggcttcaagaatataactggttcctgtttcccaattcaaacaggaacaacaaaaattcctctcttagatttataacagagaagaacaaaaactccgtaacaattgaattacagatagatttctaaaagagatgagattgttgaagaaccttggggacggcgttgcctagttctttggcgtgactggcgtagttacggccgacgcagacgatcttcgtcccttgcttgaacatcctctgtatcatcgacgtcgccattttctgatcgatacaaacaacaaactcacttttctcttattccttctcctttttttggtcagaatcgtggagaaatggaattcggtaacttttgtaattttgtgattgaatcacttccaaaacagaatttactatttcaatcccaaacttctgttttttcacatgtaagacccttaaactttgaaaataacaaattatgagaatttgcgtgatttgt

SEQ ID NO: 15478 - DNA, 483 bp, Arabidopsis thaliana columbia
ttaagaagtgtgtgtttgtctttcttacaccacggataaaattaagagccgagtgaatcagagtaaatatctatgctaaaaacatcacaatcaaagacatgtgatatctgtaaaacccagaatcaaataagcagagcttggagccgtaggagagcacaagagtttcaaagaatagagtaagcacgaactacctcaatcacaggggcttgacacatgggacattttcctcccgcttccactagcttctttgcacacttctcgcaggtgttcatatgtccacatctgttgtttacgaacgaaacaagaaaaaaaaaacagaggagtttagatatcaatttgggaacatgtttaaaacaaatgttggtgttttcatggttcatagtttcatacgtacctatacaataaagagtcaatattgctctcgcagcatacgcagcagatccctgtccttagatattcccattttgactcgtaactcgcagt

SEQ ID NO: 15479 - DNA, 519 bp, Arabidopsis thaliana columbia
tgtaagggtcttctcaagtctaccttatttgtaatattacaaagaaaacaagacatgatccaaaagaagaaagcattttgtgggatacttatactattatttatatagaaagtcaacgacttatgggtttattcaacttctaaggtcaactatctcatcccttgtcaacatctctccaagctactatccaaaaattccattactcttgaaagtcttgaagaaaagcggacgcaataataggctaattagctagctataaaaaattcctctctttttttttttttggtttgaggtcaacgaattagaaaaacaatcggcgacaagaccgatcttttgtcggttgatcaccatatccagttcacgatgttgagagtagtgcaccgtcctcaattctccacatctgcgtttctcttcgatttttgattgtgattgttgcctttacgtgattacactctgtaaaagagcagtccaccattttacagatgatggtgatggaggccggacatctgggatttatgg

SEQ ID NO: 15480 - DNA, 368 bp, Arabidopsis thaliana columbia
ccatcactatctatgtcatcgggcacttcagaaagtagatcacctatacttatgttagtaagactatcagcccattctcctggtgattgtgcattaccgccgctcaaatgctcaagtggagtaatactcgttgaagcaggttcataatcatctctagatcttgcgggacgatcatggacaccagatgcacatactagaccctgactgggctctacagatgtcgtttgttcagcagttgaatgcacagacaagggtcctgattcagtaaggagcatgttgacctcgttcaacctatccacattcatgtcatcctcgagtgaagggcaaggatctgaagttggaacttgagaaataatagaacatgacgc

SEQ ID NO: 15481 - DNA, 562 bp, Arabidopsis thaliana
attgatgatatggattttaataccaactgtttccatttttccttaggtatgaaggacaacgtgacatgctctataatcagacttttaaccttgatcaagtttcatttgctgctgaaggccttaaagatgctcaacaaactgtatgtactcataagttttttcttatcttcttagtaaaaaatagcacattgaaccaaaacctcatgtacatgaatgaatatgcagatgacagcgctaaaatctgctaacaaggagctgaaaggaatgatgaaaaccgtcaagattcaagatatagatgtatgtcttggttcttattcaagcttctcttgtgtgtttgcttcctagatactgttttggttaagaattatttgttgtataccacagaatttgcaagatgatatgatggacttaatggatgagagttctgaaattcaagagacacttggtaggagctacaatgttcctgatgacattgacgaagatgacctcctgggcggtaagttctttctctgctctttatgctgcttgtccttggggttggtaaaacaattccctgtgtttg

SEQ ID NO: 15482 - DNA, 478 bp, Arabidopsis thaliana columbia
  unsure (1)..(478): unsure at all n locations
nnnnnnnnnnnnnnnnnnnnnnnctaaaggagaataaccccagctgatagccttgctgattaagcgcagtaattaatgccgcacgtgaccgggtcgacagaatgccgtccatatagctcggcgagatgccatagaacaggccaaagatgccgttgtctgtagtgttgccggagctcatatggcgcgtgaacgaaatattttgctcagcaaaacctgccagcgcaggcatctgcttctcgaagcgtgagtagttcaggccatcgacagtaatcaacagcacattcatgcccggtgcccatatcgcgatacgcagttcgcttaacggatactgaacggaaacggcgtctggattacttgctcaataagacggcgttgataccctgcgcatctagcagaccatgcttctcaagaaaacgtcgcgccgtcatcgggtacgaaaacggcaggttaacgcgctgcatggtgatcgggcgataga

SEQ ID NO: 15483 - DNA, 1059 bp, Arabidopsis thaliana
  unsure (1)..(1059): unsure at all n locations
caaacataaagttaggccaagaaacccatttaaaaaaaaagagagagagatggagagtttcccgatcatcaatctcgagaagcttaatggagaagagagagcaatcactatggagaagatcaaagacgcttgtgaaaactggggcttctttgaggtactctcacttttcttttcttctataaaattgtgtaactcaaaatctaatcatctgtttgtgatattacagtgtgtgaaccatgggatttcactcgagcttttggacaaagtggagaagatgaccaaggaacattacaagaagtgcatggaagagagattcaaggaatcgattaagaacagaggtcttgactctcttcgctctgaagtcaacgacgttgactgggaatccactttctacctcaagcaccttcccgtctctaatatctccgatgtccctgatctcgacgacgattacaggtaaccttttttagtttcatccggtccgttttttaccttaaccggttacaggatctcagatttactggttttcaaaacaactcagcatgaaccgttttttttcttttggttttaagtaaaagtttaaccggtgttattgtctttctacagaacgttaatgaaagacttcgccggaaagatagagaagttgtcggaggagctactggatctgctgtgcgagaatctcggtttagagaagggttatttaaaaaaggtgttttacgggtcgaaaagaccgacttttggaaccaaagtcagcaattatccaccttgtcctaatccggacctagtcaagggtctccgagcccacaccgacgccggcggcatcatcctcctcttccaagacgacaaagtcagtggacttcagcttcttaaagacggcgagtgggtcgatgttcctccggttaagcattcaatcgtcgttaatctcggcgatcaacttgaggtaactactgaaccaaaccgtactaaaccgaaccaaattgaaataagaattttgagttttaattttggattgattaaaccaggtgatnacgaatgggaagtacaagagtgtggacatagagt

SEQ ID NO: 15484 - DNA, 807 bp, Arabidopsis thaliana
gaagaaattagttacttctaaattttcgtatgttataaagtcttgttctgcaacaccattactgacgtttttgcgttatgaatatactgatacagtttcgtgtgagagagaagcgtaatgggctgctttggttgttgtggtggtggtgaggatttccgtagagtttctgaaactggaccaaagccagtgcataacactggaggtagcttagtttaccccatatcagtatttctcttttggtggctaagttaatgaactttattaattgttcttaaggttacaatggaggtcaccatcaaagggcagatccacccaaaaaccttccagtcattcagatgcagcctatctctgttgcggccattccagctgatgaattgagggatataacggataactatggttcaaagtccttgattggtgagggttcatatggaagagtcttttatggtattcttaaaagtggtaaagcagctgccattaagaaactggattctagtaagcaaccagatcaagaatttctcgcccaggtagatgctatagagtatattattgcagtcttgttgggcctagaccttatacttcctatgctctgatagttctgcacgaagtcactctgttgtggttgttttgtcgtatttggctttgttactgacatgaccaactttaacaggtatcaatggtttcgagattgcgacaagaaaatgttgttgcgcttctgggctattgtgttgatggccactccgtgttcttgcttatgaatatgccctaatggatccttcatgatatcttcatggtaagttctaatgt

SEQ ID NO: 15485 - DNA, 693 bp, Arabidopsis thaliana
ctaaagaaactggtccactttcatcttcatgatcatggaactgccttgtccgttgccacacacagccagaatacgtacggtcataatcaaaactccttattaagcagactgttctgccagttgtttttctgcatcttcttctgcgcgcagcgagtccagcgaagaacatataagccagtgcaattacaatgatgacggccataaaggcgataccgatggagaagaagccttgcatcatcggcggtgccagaatcgaccagtccgccatgcccatccaggcactcataccggtgagtttcaccgcccagacgcaaccaaagatttcgatcatccccatcaccagacaaatcttcagcgccgcacgccagccgccgaagtggttagcgaacacgccgatggtggcgttagagaagaacatcgggataaagccaggaataatcaggatcgaggagccgcaggcgaccaggatgccaaccgcaatcagctgaccgatggtgccccacataaagccccagaccacggcgttcggcgcgaagctatagatagctgcacagtcaatcgccagaaccgcacctgggatcaggcgctgggaaatgccgttaaatgcttcagagagttccgccacaaacatgcgcacaccctgcgtgatgatgaagatcgccaccgcaaaggagaaaccagtttgcaggatgt

SEQ ID NO: 15486 - DNA, 447 bp, Arabidopsis thaliana columbia
ccctgatgtttaacacaagtttgagtaaagatttacctagatgtgtgatcacatagttacaagagtctttaagttgttaattcaactagatttgtaacatttgtcaatatgttactgatctttgatttattcttttttgtgtctccaggtgttcttccttggaggaaggctcgtgtttggacctgatgctcgatctattctcatcaccgtcttcttaattacagctcctgtcattgtattctgtatttttgttggcagaaaatttatcgatgattttcctcaccatagaggagtatcagttttagctgttgctgttggtctgattttattagtgagttcctttgtctcatgaatgtttgtcccttctgattctgattcagctctctactgcaacctttttactcttggcatcttgataataaaggtttagtatttgtgtgtctacag

SEQ ID NO: 15487 - DNA, 517 bp, Arabidopsis thaliana columbia
gcgagtaagatgatgatggcaatgtggtcgggacaactccatgagagcttgggtggtggttgaaactagatgatgatgaaccaagagagttaccgactatagcgtttttataggattgaggagtgtatgtttgttggttgtgtagggatggatctggacctagacgaccagctgagctaaccgaacgaggaagggatgttgttgtttgaactgaggaagagacggtgattggggagggtcgcatcgcagggattattggagcactggaaggccttgatatagttgttgctggtggttgttttggagcagagagtttttgcatatcagctctgagaccaacagtttgcgactgaatatgtgaaggaagcactacttggcttgatgaaggtggtccagttgccagtactttcctgtttggaataccgtctgcggttgaaatgctctttttctccggttttgtctgagttaatggtgaaggattcttggcaacatttctgggagaagaaagtacagcagt

SEQ ID NO: 15488 - DNA, 496 bp, Arabidopsis thaliana
taaataaatcataacaacttccttaaattcacaaaaattcttcaaattcataaaaaaactcaaaataacttaaatcactcataaaaatttataatcaataaaattcataacaaattctcccccattatataaggaaaatataggaatatgactaaaattattgacatactctattatgaaaatttgtaaccctccaaattttatgaatatgacaatattattgacatacaagttacaactaacaaattgttatgaacacgaaaacaagactccaatataaattttttaaaacaacacaaaaagtagactcaggaccggtgtgtaccagtcattacaaagaaaagaaaagccatggacaatgaaaccgaacactttctaactgactctgaactttcacaattctcaagctgcaagcttccattaccattccttcagctgaagttgaatccccagaaggagccggagcttggttccaccgaactgaaaccggcatgtg

SEQ ID NO: 15489 - DNA, 490 bp, Arabidopsis thaliana columbia
gaggatcatctaaccttcatgacagagcttctgctatgagcattaatggcaatacaatcttgcttgctggattcgaaatgacgagtccatttctataaattgcataaaaattcagaaactcaacctcacagagactaacaagaggttaaagaaagacaaaggttcacacaaaaaaacgaattacattgagaacattagggtttgctaaatctttcttattcagagcaatgatacgtctcttagctgacatttgggattgtagatcttcgttcgccgatgacagaggaatctgcaaaaatacccaaaaacaaagacaacgacaattcagattattccttccacgatgataaagggatcgaatataaagagagatagtgtgagtgagtgtttcagacacgagcatccgaacttcgataacgagatcggagagcttgaggcggttacgaatggcgcgagtagctgcagccatatgaccgggaaccaattgatt

SEQ ID NO: 15490 - DNA, 253 bp, Arabidopsis thaliana columbia
tagaggctatgatgcaaccgtctcttaatgacttgaagactcaggtttggaagcttcagactgaaccaaaaattaaggtttttctgtggaaagtgcttagtggggccattcctgtggtggatcttttgtcttatagaggaatgaagttggactctagatgtcaaacttgtggctgtgaaggggagtctattcagcatgttctttttagctgctcttttccaagacaagtgtgggcaatgtctaatatccatgt

SEQ ID NO: 15491 - DNA, 1361 bp, Arabidopsis thaliana
atcaatctctaaatgtataattaaattactaaataacatatttttacggattatatcttaaaaaccaaaaagtataatcatattactttaatttaaacactcaacacaactttacaatataaatcagctgacaccaatttagtatttaggttctgaaaacgcatttttctaaataattttggccggaggaaaaacttgtcaagaatgggatccggtgctaagggattgtactggttttcccaggtttataagtgcaaactttctattaaatgaatgatatactcagaaagtcaaatggaagtgatgtcgtgagtcgcgcacgctcttgacatacaagatagtgcatggaataaccaaaatatttatcaacaaacgtgtacgcaaagttgcaaacatcaactcaacgcttaatcacttaattttaagcacatgcctaagaactaagaaaaccactaaaggccccacacgtataatcaggttatttttctttattttaaaaagatagtaggtcggattagtagtgatgatgagtatgatgtcccgtcggaggataagtcggatgataggtctgtggaggcactgaggtaactccggtaggattatgcccgtaaccgggtcccagaaccggtgccggtgcaggtacaggcgcttgttgaggcatcgtgggaccatgattcgtaacatggatgttgagattgcctaaccataaacttgtcttccgcatgagccgctttagccatgtgcatatgcatattcgcttctgcttccttcgcctttctccgttggtgcgctatctctttctcctctttcgtcctcgccatcgcccgctctgcctgcacgtcattaatatttgaatcaatcaaacaatccataactatttaatcatatcaatgatgttaaacgaaatcattagcataattctaaatttagaaccttctcatcagcttttgcttgacatatcaccatcttctccttggctgtactagccatatcgcttatcttctgtttcgccgattgcatattttttttctttagttttctgtttctctaaactctaactaattactcttgaatgattcttattcgatttaaataaggaaatgtatgcatggcttcgtcggtccaaatgggtcacattaattccacgtgttattaatgtcgccacgtgtcttgtttcaattcccagctttctatctagttgccacgtagagatcgttcgctggcctaatctgatatccacgcaccgcctctaccggattttggtggtttaattggccgaattttgtaaaccggaaaagtttttggtttgtatttccggtttatgatttagcagtggaatggttgattggtctcttttctca

SEQ ID NO: 15492 - DNA, 896 bp, Arabidopsis thaliana
caccgagacctccgtcctcaggcataggatacacaagtgtattaaaaggtggagcctttatgcccgatagtgtaaagtagcatccacgagcatagtgagacgaaggatcaaatcgatgatctaagccatgtagtctctttgctagagcttgagcacctaatcccgcagagttaacaacaagattagggataagctcaagctgtgcttctgcctcacaccgagattcagtaattctggtatcagcaacatacaaatgcatcttcttttcttcaacacgaccgtttaaaaccaccgtgttgtacgagaaagttgcgtggttgttctgtgcttctccctgtagtctcaagttgttgttatccctgtaaaccatgaaatcaaaactcttttcctaaagacagaacaatgaagaccctatatagagagctggggaaaagtttattatatataccactaaagatagcatgaaggaatgtgtatcaagaatgccagattcaggagatagcaaagctttaacacaacgaagctgtggctccattctcatagcttcaaaaccttccaacatccttagacccgagactctattctgagttccaagatgcatcaatagatctagtttcggtatctcagaggatcccgtagcaacgataagcttaccaatcttcttatgagggatttcatattcagagcagtatttatacagcaattccctccctcttacacaaaacttggcctgctcaaaatccaaacaaaactcactattgaacttaccaaaacacacatctgattcgatcctcaagagaaagattgtacctttagagagtttggtggataatagattccggcgtggacgacttcactgttgcgggaactcgtcacggtgccgaacgatgatgcgg

SEQ ID NO: 15493 - DNA, 924 bp, Arabidopsis thaliana
ggtaaatagttttctgcggttgtgccaataggattttccagcagcgccacgcagtgcagaccgagtttggcagcgacttcggcagtctgccgcacatggttagactggatcgccccggcagtaatcagcgtatcggcaccttcacgcagagcatctgccgcgagaaattccagcttacgtaatttattgccgcccattgccatgggggtgacgtcatcccgtttgatgaaaatttcccgtcctagataatcagaaaagcgcggcagatattcagagcgacgttggcgcgccgataaactccagccgtggaaaacgggttaaattatgcagtggcataacagcctccgatgtgtgttgttgtgattttcttattatgcacgctgaaaacgcgtaaataaaaaaggcgctagtgaaagcgcccttttttgtcattatgctgattatttggtcacatcagcaccaaaccatttttcggaaagggcttgcagagtgccatctttttgcatttccgcaattgcatcattcactgctttcagcaggtcctcatttcctttacgcagcgccacgccagactcctgacgggagaatgcttcaccggttactgccagcgtatcgttggttttcttcaccagatccagcgccgccagacgatcaacgaggatcgcatcgatacgccctacgcgcagatcctgatatttggtcgggtcatcatcataggtacgcacatcgacgccctgaacattctgccgcagccactcttcatagttggtgcccagaccgacccccacttttttgcctttcagatcatcggctgttttaatggtgccttcgttaccttttttcaccagcgcctgaataccagaaatggtgtacggggttgagaaatcgtattttttcttgcgctcatcagaaatggtgacctga

SEQ ID NO: 15494 - DNA, 848 bp, Arabidopsis thaliana
gtaacgtccgccagtgtgctctaaaggatcttcaatgcctgccagcgggccggtttccagaatattcaggtaagccgcccccattgaaatattacgctctggatttttcagctcgctggtcgtcggctcaccactccagcccatacggcgataaacatcacgtccggaggttgaagcttttaactgcatcaaaccaatggcattcgatttactcaccgcgttcggattaccacccgattcgatagcgataatcgccgtgatcaattgtggatcgacgccccaggctgcaccggctttctggcttattggcatccactgcatcgcacgttgcaccggaactttcgcgttccacggcgggttcgtatagtcatgctttgatgaacaacccgctaataacacaatcaaaaaggcaaaccatctcaatttcacttcttctatccttatagcctggaatcgccgttgaggtgacaacggcacacctaagcggcatgatatacatttcgtttctgttgtcagcaaggaattgccatgtctctgtttcacttaattgccccatcgggttactgcattaaacagcacgccgcgctgcgtggtatccagcgccttaccgacgcggggcatcaagtcaataacgtcgaggttattgcccgtcgttgtgagcgttttgcgggtacggaaacagagcgtctggaagatctcaattcccttgccagactgactaccccaacaccatcgtgctggctgtacgcggcggttacggtgccagtcgtttactggcagatattgactggcaggcactggtggctcgcaacaacatgacccgttgctcatttgcggacatagcgatt

SEQ ID NO: 15495 - DNA, 1059 bp, Arabidopsis thaliana
tttccactttattcggtgactgggaagagatcttctgcactcttagtatcttctgcattggtatgttaacaacatcttcatctacatgaatcatttttggttttctctctgcttacgtatgtttttactgtggtggtctcttgtttcagggtttcttgcaactttcatgaaactatacccgtcgatgaaagcttatgaatacgggttccgggttttcttgcttacgtattgctacattctgatttctgggttcagaactgggcagtttatagaagtggctatctctcggtttctgcttatagctcttggtgctggtgttagtttaggtgttaatatgtttatctatcctatatgggctggagaggatcttcataaccttgtcgtgaagaattttatgaatgttgcgacttcccttgaaggttagtataacaaaggttttggcttttctgagtctcgggaaggagatgctttactgaggattgtctttggtcttataggttgtgtgaatggatatctccgctgtcttgaatacgagagaatcccatccaaaatcctcacgtaccaagcttcagaggatcctgtttacaagggttatagatcagctgttgagtcaaccagccaagaagagtctctggtagttgtcattggggatcattttcgataagtcggtttttattccattgcttctcatctcttaattagtttgtgttttctctggtgtaattgcaaagatgagtttcgcaatatgggagccaccacatggaccatacaagtcatttaactacccatggaagaactatgtcaagctcagcggcgctctcaagcattgtgcattcactgtcatggcattgcacggctgcattctctcagaaatccaggtaacatagtagagagacttgtatggtttttgaggattctgatgtttctgggacttccaaaggaatgagttggtcatgattagagcttaatctgggaccattcacaggcacagaggaacggagacaagtttttcggcaagaacttcagagagtgggcgtagaaggactaaattgttaagag

SEQ ID NO: 15496 - DNA, 519 bp, Arabidopsis thaliana columbia
aacataaaatcgcaggaccgggttgctcatcgattggttatggagcttcggaggaaattggaccgtttcggatcaataaaaccggttctaatctctatctcaacaagtttacgtggaacacaggttaatattttttctttatagtttcatttgttctggagtcacatcgttcgttatacaacaatgaagtttgtttgaatcttttatttgtaatgaatagaagcgaatattttgtttcttgaatcgccggctggagttggattttcgtacactaacacaagctctgatcttaaagattctggggacgaacggactggtcagtttcttatattttatcaaacattatttgttatcaaggtaatagtttaggatacacttttgttaacaatgaaattacattattaattttaatatgttgacatataattgaatctgcagctcaggaaaatttgatatttctaattaaatggatgtcgagatttcctcagtaccaatatagagatttcacattgttggtga

SEQ ID NO: 15497 - DNA, 828 bp, Arabidopsis thaliana
cattgagtctttggcagatgcccgtgactctatgatatcacaatacacggtttcatctcgaatccaagtatttgaccttccttttccctgaaactatttcccgacgttattgttgaatgtttggaaccaaacttcctcggtccttgattctcccgaggttcgaacttcttgggtggaaaagtgactgatggttttgcttgcttatttctcttcgcaaaactttctttttcatcttcgacttccatccaattgtttgctcggaataacgcatcttgaatagtatcaggtttgtgtagtatcaaatcttctttgaatctcgaatcatgccataatccttttcgcaaagctgataaagttgactgttgtgagatccttgggagctttgagagtacgttcttgaatttggtgatgaaagtccgaagtgtttcgttcggcccttgagataaatttcaaaggttggtatccgaaatgcttttatccataagaattgagtattgtttcaaaaatactgctaaaagctcgttgaagttgctgatcgaccctggttccaattgagtgaaccacattagggcttgtccacacagattctcaaagaaaagcttgtagtatcctgcatcttcatcggcttcgttcagatcaactcacccagcaacaattaggaaagttgcgagatagccttgcggatcttccaaaccgttgtacggttctaagttaagttttcgagaatctctgattctcaagctagcaatttgcagggtgaaaggtgttcgctagctttttcaatgacccggttgatatccgttcgagcttttacttggtggaatttga

SEQ ID NO: 15498 - DNA, 194 bp, Arabidopsis thaliana columbia
  unsure (1)..(194): unsure at all n locations
nnnnnnnnnnnnnnnnnnnnctaaagtctgcaggagcgtaggaagaaatacatgaaccagttgaagggttagagttctgataagacccaaaacgagtcacaaaacgtgtagccctggagtccatcaggtgtgccgtggtagggacctccgtggacaggtaagacggtgtcagcgaaggcagactcatgagaatc

SEQ ID NO: 15499 - DNA, 980 bp, Arabidopsis thaliana columbia
tggttcgggagttaaaataagtgtagattaatttattgcaaataaaaccctgcaatttcttaatagttttttaaagaaaaaatctacaacaatcgaaaacttctttcaactcatacgtactatagtctatttgaattgtttataatattcgtaccatttcacttttatattttatctcttctttctcgacattcgtgcgctttaaccacacatcattattttcttgaaaacaaaacgaaacggtttcgtctctctctcagtttctctgacaatctgtacagattctctacatataactttcaatcgattttgtcccttagttttattcatcataattacttattagtcctcatctaatttgatataatcgttttgtaccaaaattctaggctttttgtccttctgcattttttgggtttttgcccccacttgttgtgaaattttttgaacttcatttccaaggcattaccacgagagcataactgaggaagtcgtggagaatcttaggatgagatttgttgtcgacatctatcaggagtttgttcaggctctccgtgtttgatgcccaattccaatatttttgtttaagaatttatgtctattgtaatttttaattaatccacttcgacttctacttagatgccactttatttgtagttctataactcgtatctttgtatgtagtcttaattagcactagattttaacccgcggtactatatttttctagaaaaaatcaaagtgtaattttcttaattaattaatattattatataacctattgttttgtatttctctcaatgtacaacactatatgatgtgcaatttctttttattagtaaatataataatattagatttcataattcttgatttagtattaaacgtaatacatccccattagtgctggaacaagagaaactgaggctgataaaatattaaaattacatttaaaccgtgttattactttgggttgatga

SEQ ID NO: 15500 - DNA, 559 bp, Arabidopsis thaliana
tatcctaaatgcaatgcaactacatgaacactctatttttgtgaaatcattttctgtaatttttcatttttttggttttttctatgccttagatgaatgcagactcaagattgtatacaatgcaacacacacttcctgagccctcccccaaacttaaatcacataatccactaagtgaccaaatttggaagagagtactcaggacaaaacacatcacaaaaacaaaataaaaacaagagatggtatattacaatggtggagtgaggtgcatacctcagtggaagaaggagcggagttggtcgtcaatagctgcttgtgattgctcccaggccatcgaagaatctccttgttgtgtctcagcttccccctgggggtactcgacctctgctccttcgtcgcggccagcatcgctctgatgatactcgacctctcttcttcttctgcggccagcaccgcggtcgagtgaattagtgactgcatcattcgctatactcgaccacatcgtcattcggcccttgtagggtgtggtcgagtgatttggacccggtcgatgtgaatg

SEQ ID NO: 15501 - DNA, 524 bp, Arabidopsis thaliana
tcgactctcccctccaggtgcaggtagtcctcagttacatttaagatttcggattttcttagatcaagttctattttaattttcatttcggttactaactttgtttttcagttgttgtcttcttgatccaggtacaactctgatgtatgcaaactagatccgaagacaaccagggtctcggtcgcagggtcccctgtcatcaggtcaccaacttccttaaccttccggcactgggcaggcgtcacgcccatacatggtcttacgactttgcggagacctgtgtttttggtaaacagtcgcccgggcctggtcactgcgaccccctttgtgaggaggcaccccttctcccgaagttacggggctattttgccgagttccttagagagagttgtctcgcgcccctaggtattctctacctacccacctgtgtcggtttcgggtacaggtacccttttgttgaaggtcgttcgagcttttcctgggagtatagcatgggttacttcacgccgtagcgcctggtactc

SEQ ID NO: 15502 - DNA, 586 bp, Arabidopsis thaliana columbia
ccgcccttgaccccattatcatcgccattgctctcggccgtaagatcacatgtgtcacttatagtgtctctcgcctctccctgatgctctcacccattcctgctgttgctctgacccgagaccgtgtcgctgacgcagcccgcatgaggcaactcctcgagaaaggtattttccatgctcaattatcgttatagaaaagcagagtatctctgtttttactctggttttctacacatttatttggtttcattattatcacattatctctgttctgaaaataaaagctatcacctgagttttgattttttatgtaacattaatattatagaatcatacacattccatctacagaaaacacaaatttttctgatctttatacacacataattcctatctttgtaactcttttttatttattttgcaacaggtgatttggtgatctgtcctgaaggcacaacgtgtagagaaccatatctactaaggttcagtgctctatttgcagagctgagcgaccggatcgtgcctgtggcatgaactgcaacaagggatgttcacgggacgacagttagaggtgtgaattctggga

SEQ ID NO: 15503 - DNA, 493 bp, Arabidopsis thaliana columbia
cttaccaatgttctagttataatgtgagattgttttcttggtctttacaggaagattttcttctactttgtccggctcattcttctgtcaaattcccgaacgagaagtctggacatcgcgtttccagagccgagcccttaccaaaaatgtataattctgtttcagcatataatttaatacttacagtatgacattattattcttatgatagcaactaataaatctcattaccttgctccctcagaaatcctgctgagctatgttctttggaacaaacaccagcttttacaaaagagcttgttctctgtggatcagcactctctaaaagtgataaggtcagtactaagttaatcttctttccacaaggttcaaacaagaaacaagtgtttgtggatttacactcttggttcaaagttggtagagctttttcatataaaaagactaattttctcattgcattgctattccctagaaactgatggaaagtttagcc

SEQ ID NO: 15504 - DNA, 504 bp, Arabidopsis thaliana columbia
gagaaatagatgtacattaattaattatataaaatacaaagctattgtgtattgaaaatttagctattaatataaaatttagttgatcacaaactaattgcgattttgttttttgtttccgtaaacctagttgtagatgtactgaatataagtatttatgttgattttaaacaaaggaaatctgttgtcttaaattcgtccaaaattggttattggtgaaacatatcctacgaatacgcaaatttatgcatccccgtgacttcgttacctgcacagcggtttagagcaatgtagagtagtttggctaaaggaaatctatctttacaagtattaaaaatggaaatggctccacacaggtcgaggcagcggaatccgagattcaagctatggagatacgatgatgaacctctagcaattgctgaaaccatgcacgaattacgacacctcaagctttttgggaacggactgaccaacttaagattggaagcattcttgacaactgtg

SEQ ID NO: 15505 - DNA, 565 bp, Arabidopsis thaliana columbia
atgaagacatggaagctccagagtacgagtatggagtttcttgcccttactgttactccaagaaatcagaagaggagaaagaaagggcaagagcaaggcagacacagtttgaggaatggggtgtaattggtggtccggacaaaggtcgtcgacccgccactaaacctgatagtccaaggaagaagatcaatgcaaagcttggttcttcaatatagaatgatgttgttttgttcttcttcttgaaatcatttgcattgttacatacttacattaaagagtttaaacgctaatcaatgaggcaatgatcttgaatttttttaagcatatcggaaacaacgactagaaacaacgactagaaacggcgcgttgttcaagtgttaataagtagaacggcaggaagtgtaaaattgacgtttgactaggtcaagaagctcttttaatgtcaaaaattccgcagaattgattatcgtcatttcgttaaggatctctgtggggtttgatcgaatttcatagcgaaggagagagtgagagagagattgaagcagtaatggcaggaacatctgga

SEQ ID NO: 15506 - DNA, 544 bp, Arabidopsis thaliana columbia
ggggtatagttgacctgattaagctctttcattctttttctttgtctcttttttatttatttataatctagaagcagtctcaaactttcacaaacagaaagaggacaatgtcatggtggaaaggttttacggtttattgtttttcgaataatcaaaagatgatcttttatgattccttgttttctgttttcaggagttgactttcataagttttgggaacatttttacatatattataccctttttattcgagcattttcgtcgagataatgttaaaatttaagagattcatactcatatattatatagataaagatcatcaagttgcattattttttttatatccatgttatatgtcaaacccatttatagtgctccatttcctttcatggaatttaaaaattagggttgaatagaagtggtaaaagctgtagactaaggtgggtgaactacttgaggccagggcttaagagaggacaaatcactcctcaagaagaaggaatcatccttgaacttcattccctttggggtaacaagtaagcta

SEQ ID NO: 15507 - DNA, 599 bp, Arabidopsis thaliana columbia
  unsure (1)..(599): unsure at all n locations
nnnnnnnnnnnnnnnnnnnctaaagttcgtttgtattgacgtggcgaatggttattccgaacacttcgtgcagttcgttgcgaaacgacgtgaagcgtggccgaccaaaaccatttgtgctggtaacgtagtgactggtgaaatgtgtgaggagcttatcctctcaggtgccgatatcgttaaagttggcattggcccaggttctgtttgtacaactcgcgtcaaaacaggcgtcggttatccgcaactttctgcggtaatcgaatgtgccgatgctgcgcacggtctgggcggaatgatcgtcagcgatggtggctgcaccacgccgggcgatgtggcgaaacgtttggcggcggtgccgatttcgtcatgcttggcggcatgctggcgggccacgaagagagcggcggtccatcgttgaggagaacggcgagaaatttatgctgttctacggcatgagctccgagtctgcgatgaaacgtcacgttggcggcgttgcggaatatcgcgcacgagaaggtaaaaccgttaagctgccgctgcgaggcccggttgaaaatacgcgcgagatattttgggcggctgcgttcacttgtaca

SEQ ID NO: 15508 - DNA, 520 bp, Arabidopsis thaliana columbia
gccagtgtgctgcagcttgctttgcactatgctgcagaaacgaatgcgcttcagcctcctcacaagtatgtgccctgggtagtcgtggatggtcagccactttatgaggttcgtttattatttgcttcttttcaagttcttctgcagtgctgaatacttacatagccaatccacacttccttactagttgtagatgaatgatattgttaggactcagtggtcagtcattgagacttacgatttgcattcactccagggattgatttgggatttggttttaaatcactttagatttagtgtctttagggatttggatcatctttaacccgtacaatttctcagagctggtatcatatgttagtgcaagtccctacatggtaatcttgtgagttagatgcgtcttggaagtttggaaggagagtttagtcttttagctgtagttagcctacgggaagtgaaattgtacataggcttgttggcaaaggctcataaaattaatattgatcaattggaacagaag

SEQ ID NO: 15509 - DNA, 664 bp, Arabidopsis thaliana columbia
ctctagaggatcccccgttagacaaagaaattgttttgtaaatcaaaagaaaaagactcgcaacttccaactgttctgcgtgattttctatctccgatattccacatacactaaattaacccacaactttgaagtaaacacagacaccaaaccaagaactcttagtaaacatatttggaagagaggagatcaataaccataaagtacaacatgttacatagtcttataaattgtttccataaagtacaacatgaatgcatagtcttatgaattgttacaagcttcataattagagtagattattacaagcgtcataagtagagtagggtactaccttacagaagagtttttgcataccgagtatcgaactcgagtgtgagaagcccctgaatgtccatagttctttttatgatagcgatgcgatcacggggaggcttgtgaccattacccttaggagcccgtcccttattagggtagtacctgtaccgtatgtagaaaactgcatttctggccttgagtctctcatttggctgcttcacattttcctcagtttctacagctaccgttcaaataaccaattttgatagattgggctgcacaagagtttaaacagacagtggtattatacaagagagagcctacactatggaggaaaggaaagaag

SEQ ID NO: 15510 - DNA, 256 bp, Arabidopsis thaliana columbia
tggtttagtacggtctggttttgtcttactttttcttgtttatttttatctacaggtaactgagtttgaaagtggtgggttagctattggattgagttgtagccatctcttagccgatccagtttgtgcaatgatgtttattcgaagcttgggcagatttaactttgtctcggtccatgatggctccaccactatccacccgttgccgcttcgccggttttccaaccaaagactaatctctaacaaccaactgctt

SEQ ID NO: 15511 - DNA, 636 bp, Arabidopsis thaliana columbia
  unsure (1)..(636): unsure at all n locations
cagatatacttcatttaggcctgaagtaattggagaggagaagtcagaaagtgaagctggagatataattgtagaggcaagaggagaagtcactgcactaataaatttttccttttttttccactaactaataaaaattccttttttcccgccataagcgtgacgtctattacacgcgtcactcgtctagtggtttatagaaatgtaaaaaaggaaatcaaatcttcgtttagtaaaaaaggaaaatcaacctataaattactgaattgtatttgtaaatcaataaagtaaattcaattttaccgtcttttaatttcttcctcttctctcgtctctctcacgcgacgtttctagggttcttctgcttatctggagattttgcataaactttctttaatgggtattgttttatccaccgaatcgttgctaatctgtttctgatttcgtgtgattattcgttctgtgaattcctgtttagattctgtaaacaaatccactgaacgcttttttttttgtcgttccttctctgaagaactctatcaacgacatggaatctacaaggaagaagcgaaaagagcattggatatatgctgagangaactatcacagaatgattacaacagagcgaaaagatat

SEQ ID NO: 15512 - DNA, 433 bp, Arabidopsis thaliana columbia
aaaagagagataaattaatggtgcataccaaatttacagcttgttgagctgcgatggtaagtatatctgcgcatgaaacagtccttggacatgctgtctctactgctgctttcattctatcgatcactggaaatcctcgagccgagtttgcgtttggagccgcatctttctctgttcgaaaggatgttgtgttgtctaacaggatcgatgcatcacagccctatacagacaagaattatgtggtcactaattaattagtcaacatatattgaaatcataatgatatatagttttttcttttcatgatgacatatttagtatactacaaaaagtgttagattgcattttcattcaataaaaaggtttgttctttttaagcaacgcgtggtgatatagttgtaacaagttagtatacattttagtttacattata

SEQ ID NO: 15513 - DNA, 436 bp, Arabidopsis thaliana columbia
gctctcgccgcggaagcagctagcaaaacagtacaacagtggaagtgtatatcagatctttttccctcgtgaaccagaccttgatatgaacgaagatcggacctcaaattctgggcagccctgaaggcgatcgctgcagcttctggtcgttttgcttgtaaaagtagatttccctgacgtcttaacaaattagtggatatatatatatatgcaaacttactaaaaataaataaactcctcgttgaactagcttaccttcattatgtagccgggtatgtgcctctcgtctaccctgatactctgattgcatagtgtatgtcatgagctatcacacaaagattttggcacaaaaattcagtgtcagaaaaaagctaaccttctcagcataagataatgccgtccttgcatctttcctttcccatagtacagacaaagc

SEQ ID NO: 15514 - DNA, 422 bp, Arabidopsis thaliana columbia
tgttattgtcatctacacgttaccttaccaatcaaacctaatatttaactttatcgtacctggtttcactcgagttgggtgcggcggatatggcctcgccaatggtcgtgtagtttccagtcccattttgagccaccacgagattaaccttagtctcatcgaccgggtcttgaagtagattccggtcactccctgagacccacatcggaaacccaacgtcctcctttactttccccggaatatgccctggaatattctcaagcatagccaacgagtcgctgacgtggctagagatattgaatagactctccttcgagctctcagtcactccatatgttttattatgagtattattcaaattcgcatcgttgtcgctagtagcgaaaccatcgagatacgttcgtgtatatgtcatcgcggcg

SEQ ID NO: 15515 - DNA, 282 bp, Arabidopsis thaliana columbia
tgcaagaacacgcatgcagtggtgagcaagttgtattgttcctcgatgcaggaagtgatggtggtgagacgacggccacacgtggttaacggcggtcgcgatgcggtgacagagtccctggtcgtgatcgtgttcaagatcgacggttgtggagatcttggaaccttaggagagttagttctcagagatagtgatggctgcgatttgcttctcatccacaacgaggtatcctctgaattgcatcccctacatctcattacgagtccaaacctgtatgattgt

SEQ ID NO: 15516 - DNA, 974 bp, Arabidopsis thaliana
catgaacttattgaagaaaaagtatactatagttgtgattctgtgatatactagttagaacaagaatctttacaaaaaaaaaacacatgggatgttaggagaaggagattcggattccaatgatccaacggtcagagaaaaatcagaagaaaatttcacaaccgtaggatctgttcccttaaccaccttgtaatgccggtctttattaattttgagaaaaaaataaaaacagcaccaaacttatgtctctcatgtgaccgaccaccgcatcctcagttgacctgtctctgcccccactttgtctccccacacaaactgaataacaagaagaagaagactttagatatcaaatgactccacgtgtcgatattggattggttttcattggttgtatcgtgtggaccaacgaagcaacatataaaaagcacgacgcggtgccattactacaataagagaagtgtaggagaagaaagttctcatttcataattgtatcaaattgtgagaggaaaaaaagaagttcaagaaatggagaaggaaggactcgggcttgagataacggagctgagattggggcttccggggagagatgtggcagagaagatgatgaagaagagagctttcacggagatgaatatgacgtcgtcgggtagtaatagtgatcaatgtgaaagcggcgtcgtttcatctggtggtgacgctgagaaggttaatgattcgccggcggcgaaaagccaggtggtggggtggccaccggtttgttcttaccggaagaaaaacagctgtaaggaagcttcgaccacgaaagtggggttagggtatgtgaaagtgagcatggatggtgtgccttatttgaggaagatggatcttggttcgagccaaggctatgatgatctagcctttgctcttgataagctcttcggtttccgtggcatcggttagtaacaattatgttctcttcccataaaagtagagt

SEQ ID NO: 15517 - DNA, 427 bp, Arabidopsis thaliana
gactcgatggttcacgggattctgcaattcacaccaagtatcgcattacagatgatcaatcatgaaaccgagcttttagttttacctccatttcgcggtggacccattcgagtgcatcgccaaccttgtaaagaggaacaagcatatcctgaataacatgcatatcatggtaatagttcctgatagcttcaccttgagtggccttaagaagagagacctttggaggcatcaaccaacctaagaggtacctaaaccagaactgatcaccaaatggaagaataagcttcccttcccagtacaagcaccttgtgtgcctgtggtagtattcacgagttgggatgtactcacaaactgtccctttttcagggcggtctgcgcgtgctggtagaaccacggcttgaaccaccatcccacattgttgattttg

SEQ ID NO: 15518 - DNA, 576 bp, Arabidopsis thaliana columbia
tgaagaggagttcatacaaattttagccatagcaaaaaccatatacttccgagggagccaaacgagtagaaaacagatggccatccgaacttggtgattagcataggagagaatgccaatcctgtgacggaaccaagatacatgccactatagaccagtgcaagcgatctgcttctctctgagacagggatccatttagaaagcatgttgttcatagcaggcattgcaacaccctgaagcaaaggtagacagaaccagctagtgagaagttgtacaggtctgagacaagtatagcaagagaaaagaagaacagaagaggccaacctcgccaatgcccatgaacgcccgcactacaagcaaaaaaggaagaccaagtctagcagcaataggtgtcataatagtggcaaaggaccaccagacaacaccagaacctataacaaccttcccgccaaacttatctgcccatatacctcccagaatctatgtccaagagaagatgagctaaagttagaattaatataccctctgctttcgagttctataaaagatcagattctacagagagtgatagtatta

SEQ ID NO: 15519 - DNA, 1031 bp, Arabidopsis thaliana
tccttagcttactctggatttcaggatggtcactagctctgcaattccccactcgatagaccacaatgttgtctcaatcgctgtttcagcagaaatcaagatatcagcttcacaaaaccatatacaatccagcctcttcaggggagaccaaaaaaccaacctacatgagcctaatttcctgttatggttacaattccggatttctaggattcacttaaaacactaatgtccaattccttatgcaagcagagacgtctagaggattgattacgtatcctacaagtaagaaatagaagttaccggcgacattgatgttctcgacgatgtaaagaacattgtcctcgttgatttctcccttctgctcagcttcaaggatgtgatcaatggcacatttcaatccttcactacctgtaggcttagaactcgcaatttgcctgtaagaatgaatcatcaatgtcaatttcccaaaatcaaactcaaaagataaaactaaaaatagaaacaaaaaaatgaactcacttcctctcatcaacaaagtacttcttgaaaagagcgattcttcgatctttcacatcttgacaaatcttcaaatagcctctgaggaatggtctaaggataggaatgaaatctccatagttatactcaaagctctgagctaatcgacttctctcaccattcaaagccttaagcctaaggaaaagaggatcatcctcactctcaaatcttctatcgaacatgatacggaacatattgttatacatcatcaattgcaaacgtttcctcaacacgattcctttcgtagcagaatctggattcttcttaacatcttcaacaacactagctgcttcaaactcccaaccttcacgattctgttgaacaactttgttggtgaagaaaggaaccgtcatgattcttctcatcttcctccaatgctcgccgtaaacagtgaacaccatatcttgacctttcccggtgaaaatgtcgaacacgacgtttctcgttctggatcaaactcaacgccttgagtgagg

SEQ ID NO: 15520 - DNA, 493 bp, Arabidopsis thaliana columbia
tggaaaaatatggatcttgtggcatcaaagtgtgaaagttgtggtgctttttaaatcgttgcagatggttacttgtgaggttcttcttccggattcgcaggagtggattattgtttccattgtctatgcttcaaatgatgaatcgactagatatgagctctggacagaattggtggacttatccacttctcaatcattgtttggaaaagcatggattgttcttggcgatttcaaccaaaccttggtcccttccgaacattcaaacccgcatgacttgaacgttgatagacgcatgcgtgattttagaggctgtttagaggctgcggatatctttgatcttgtctataggggtactagttatacttggtggaataaatcgaagatcagaccggtggccaaaaagcttgatagaattttggtaaatcaccattggctgaatgtttccctgagtctcttgctacttttggcgcaccggatttctctgatcatgctt

SEQ ID NO: 15521 - DNA, 543 bp, Arabidopsis thaliana
ggacattagcaacgaacaattagtaacacaaccactaaccactaatccttcattaacataaataaacattaaacattaacgataatataagtgcgaatcacatctcatctgtttgcatcatacctgattggaatgacacctaaaatactacaacgacaagatagtgttttaggaataattggatcttaataacctattatcaaacacggtcacaaagaaatcagaatctcctattcaacgatatcatcgaccgtattgctcgccaactcagaacacagacagaaacagatacaatggctgcaattgtagatgagcaagtgcaaccaaacaacattggtgcaggcgatgcaccacgcaaccacaatcagcgtaatggcatcgtgcctccaccagtgcagaacaacaactttgagatcaagagcggtctcattgccatggttcagagcaacaagtttcacggcctccctatggaggatcactcgatcacctagacgagtttgataggctctgagcctaacaaagatcaatggagttagtgaggat

SEQ ID NO: 15522 - DNA, 534 bp, Arabidopsis thaliana columbia
tagagtctagaggatgcctgcaactatatgttctggataagcttttattgaacaagaaggtagcaacaactactaaaagaggggtaggcttttagggaaacgaacctgcatccattgcttctcatacgtaaccaaatggctccaacctatttcctccagcaaatccagtttaagttcgtagagtttcttattcgcagtctcgttctcgttttggatcaagtcatcaagtacctgaaaatcattatcagtcatgtgggtcactgattttagaatgaatcatttgcagttttttagtatgtattaaagattagataaatgtatttaccttcaatgcggtcccgagtcgtgatagccgtttctctcttagaacagtgagagtaccgtatttagatgatttcacgtctacccattttgtcagttctttgaaattctcttcgaatttatccttctggctactttcttcttctccttcaccttccttctcaccctgcaaacaatagaatagtgttatttcttagtataagctagaaaaat

SEQ ID NO: 15523 - DNA, 1794 bp, Arabidopsis thaliana columbia
tctgcgaatgttggtgtacatcttcaggttctggtcccgttctttcttcaacagttgtcatagactcttcatctggtgatagagccaatgtatgaagagtgtcagacgcagatgagaattgatgaagaaacacctgatgaagccacaccagatcagaatggcgctttagaaatatcaatagctcgtcctggaattcttctccaagccgtagaagcttagagaactgtttcatatcatagagttgctggaaaacagaagtaactgaaccctccttgtggtcccacaccctcgtgctgcacaggaattaagggtattatctaagcaggaacgtagaaaagaagtaatgacaaggtgaaagatgtccaaaagctgccacacacaaaatcatacaaaaaattctctgctgtgcaatctcaagagtaaaacaaccagaagaaatctaacacgtttgagattactagaggaacagggtaagaagaaacctgagaacataccattaagtttctgagcagtcctgtatcattaagatcataacatatcttccacataattttatagcctgcatgtcgctttgcaatggaaatcaaatttgaacaacggtttctgaagatatcttcatctgtcgcttcagttctttctctgatgccctacatatataaaaccaattcatggtgtgattgaacacaaaaatgatatgcagtgcaccacatgcaaagaagtgctaacctggatttctgcttccataaactcttttgcttgtcgataaagagagtcaaaaatagtatcccgccgagtccagtattcattaagcaaacctttgttctcctcttccctctccaattttgcaaaggtagaaccggcacaagcctcaagtaaaacttcagtaagcacttcgagatgcgtgtatatgtctgatttagcagagatatcaatcctagatgcctcagttaacagatgaagcataaaggacgcaatgcaccacagtccattacatacaacagtctgagagtgccaaggtattaaaccttcaagtggtggataccacatttgatgctcgtttttgtaatctaaggcagtctgaagaattgtaacacatgcatttgagagttcgcaggctctctgcagttgagttcctagtggttggtcagctctgattatgtattctagttgcctgttcagacagtaaaacacttcctcaagttcagataccttgctgtagaaaacttcagcattatctctgtccatcaaaagaactgtatttctccgggctctctcccctacaaattgaataagatcccaaagggcacatgaaacttgatcctctgagccagcttgcggcgagccaaatctagctgagcggttttggttaatcatattctgcagttcccggagttgaatcatggcagcaagtttttcaccattttccagaattatttgcaaagaatgtcctgccataaaagagatgcattagctcagttgtcaatttttatgccaaccagaataatttaaccattcacgaagttctttttataaattactatccagttgggggagaaattacttatgaattagagattcatcttcaagcataaaaattctggttttgaccatgtatgcaataatgaagtagaatcatgctacagtaggaagaaaaaacaagtgagagatacaagtgagtactctgtttagaacacagctcctcatggcatttggatagagcaagaaagtgtagaaaattctcatgcttctgttgttctcaaccaattgtgaagatataacagtcatagctactat

SEQ ID NO: 15524 - DNA, 557 bp, Arabidopsis thaliana columbia
cagccactaacctcacataacactctcttggcccatgagaaagagacgtaaacaattacataggtggcatcatgatataaccctatttttactgtttttattatgttttagatataagtttttgagtctttttgttatttctagagtttttttagagtttttttaggtattcaatggagaggaacaacaatggagatgagaagacattttggagcaaaagttgaagaaaagaagctaaaggacgaattcactttcagatctagtcgagagtgtcgatcgacgcactcttggtgtcgatcgataccagttgcggcccagagaagttcatgacgcttttaagtttgaaaatttgaaaatttgccccataagacttccctattttcattactagtctctacacgtttttttatgccatatatattgttttaaaggtcattgtttagacctatcaagctttttatcaagttttctagcaaccaagttatttccaaagtactttcataagctattcatcccttgttttcagagtttcatcagatttcagtaacagtgaagag

SEQ ID NO: 15525 - DNA, 586 bp, Arabidopsis thaliana
tgctattactaatacaaatgttttaattttgctatatgtgattcagatggatgttcgaagtaatgctattgttcgacaatcagccggtgtagacagggataaagacacaatgaggctggcaaaccataatgcagttcagggtgaagatcgatcttcaattggtattgatggttgggaaaagtcgaaaatgaagaaaaaacgatctggcatcaaaacagatggtccttctagtttggcttcaaataaagctgttgatggttatagggacttgaaacagggcataccgaaattagctgttgattcccgctcgagattgaatggtgactcaaacatgttaaggtatggcctactgtattagatcataacttttttggttcaatcagttaaaagatccattgtttggagttgattaggaaaatactcccaaatagatttctttcctatttttaaatggattagattgattcttataacattggatagatgcgattttacgctctcttctgatggctattcaattggtacagttcatggttgaattaattgtgcaggcatggggcagtgaatggcgctggtccatatggga

SEQ ID NO: 15526 - DNA, 475 bp, Arabidopsis thaliana columbia
caaacaaactatcttaatttgaaggagaggtttgaaggtggggattcaaaaccaaagcatgcatatagagcgagtgagatcaatgtccataaaaaaaccatatgtgctctaggaaaccaaacatatcctcaagagttttgatggccaaaatatagtcttttccatagactttgaagatgatataccccaacccttcttctctcgactcatggcaaggtagcccccgaaaccactattgtaggctgagtgagggttggccatgagacccaaaagaccactcttttcaaagaggtactcgacatattctgttatgccaagctctttcatggtttgggggtgagggtatcgagtgccctgaatatcgtgaaccaccaaaagctcatagtaaccatttggcgacaacttagtcttctttatcaaggatttggtgatccttggagttattcagggacatagtcttcatccccaccaaggt

SEQ ID NO: 15527 - DNA, 592 bp, Arabidopsis thaliana columbia
gcatgtttgtacaagggattgataagttaagaaccctaattctcctttctccagatatggtggtatacagaagggcacactgaaaaccaaagaaaaatcataaaacaaacgtaaacattttataaaatgagacagtgtaccaacatttcagcaaagtagggtcttgccaaaactatttcgaatggccaattaacatgagtacaaagtatacctgaaaaccgcattcagctccatcttgtagtttgtcatcatgctttaatgtcaccattatagctttgtcacagtcaatctgcatggcactcaaggctcgtcaaaaatgtagtaaatttataccaaagtgcttctccaaggtaaacttgcagcaaaaacatgtgtttccctcttgactaatattatacgttttaggtaacaaagcaacatgaacataatgttagcccgaaaccaaaaacgagaaatattcatttttggtattgacacaataaacacatacatggaacgcatcagagacaattaatcgtaaattttgaaggaggatgccccaccgcaggtagatcgatgtcagttggtatgcgcttacagaagttcctgagta

SEQ ID NO: 15528 - DNA, 628 bp, Arabidopsis thaliana
aggagattaataaagggggtttaattgggggagtgattacattcaaaatctgattagttttgattaaacgataagttatgtggtgaatttgctatacaactagattggtgaataaaacttgcagaaaagacatggtgacatttttggtttcaggaagtcacaaaacaaccattcttgctactctcataagaatttttttttttgtagaaattatctgccttggcgtaacagtgaataaacagagaacccaaaaggctacacaacatcaccaaataggaaaaacggagtcagaaaatttcttcttaagagattattaaaaaagaaaaaagaagaagaagcaagggttaacttagaattggtgtgtgtagttcgacgtcattatgaaaggggtattgggtggacgtacaaggaggtcataaagtgttcgattttgcctttgggctcactgtatccatcaccctctgtgtatatcacatcgaagaggcgtgcaaagtttaggcatcgcagcagaacctggcgcggtacacggtcatgtgagttcatgaactcctccacaaccacttttttgttgtatatgtacattttacgcaactcacgggatgcttcttccttggtgactccatattgt

SEQ ID NO: 15529 - DNA, 611 bp, Arabidopsis thaliana columbia
ttcgtgtagtaaatgaggatcaacacaaagcttccagaacctcacagaaaccacagggtcaccgtttttttccgtctctacacctgcatctgggatatcccgattaagaaaatttgcttgagatccctgacattcgagcagccataacaaggtaggaacctgaagtctcttctctagtttctgtttcaagactaatactagttgttttacatggtacgaagagagttgagctagggtgctaatcagtgtttttcccagaacagacattatcttctccgttacgcatacaatgtcatcactggagtccaatgatgtctgggcatcaaaattttcagcggaaccactattcgaaataccatcatctagattgatcgaaatagataccagcttaagtttcacaaagtctgaaacatgcttccagaaacaagcttgtgttaccagacatctttcatcttctggaattgagtatactggatagccaactccgtgattctcaacaacactgctgaacttagaattaactcctacatctgatgcatctggtacactaacagaagcttcctggtggtatactctcttcacactttccaggtcaacctcataagcaatcg

SEQ ID NO: 15530 - DNA, 454 bp, Arabidopsis thaliana columbia
cacgaagacgagattgctaatctgaagaatcagcttcagagcttcatgtcttttgacacagaggatcatcttggtgctgaacaaaagagtgttgatttggataaagaggacactaaagaagatgcagtagctacaaaagtgctagccttggaggaagagctgagtatcgcgaaagagaagcttcagcactttgagaaagagacttattctctgaaaaatgagctcgagatcggcaaagccgctgaggagaagctgaagagcttacaacatgagctcgagttggctcagagagacgctgatacctacataaacaagctcaacgcagagaagaaagaagtcttgaagttgcaggagagattggcaatggtgaaaactagtttacaggatagagataacgagataagggcattgaaaactgcggtttcagacgctgaacagaagatattccccgaaa

SEQ ID NO: 15531 - DNA, 583 bp, Arabidopsis thaliana
tgaactaatcaaccttggtaatttgtatgctgagcttctgaagtgtgaagaagcaacaaagctacccagacggtatgattttccagccaagaccatatacatatctaacaacttgtaaagtctgttgtgtagtaaagtccatgtggttgagaattttgtttggctgcttttgatttaatgatctatggaagggtggactttgatgattctacttgtttatggaactcgtgttgccttgcaggatgccagttaggaactacaacgattctgctgcgtttcaggctgagagggattcttcagctggtcgtggcttccaagaaccatcatcgcccaaaatggctaagtctccatctcttcagagaggtcataatgttttccgctcccaggaattgtgctttaatagtgaagaatcgcccaatgatcatagccctgcaccagagaaactgggagaaaatggctcgtcgttggatgttggtgagaaggacccaccatcaaaagacaagatagtttcgagatgcggttaccagaattaccaaaaattgacattcagtgtccacaacgtcagaaatcaaatggttcagat

SEQ ID NO: 15532 - DNA, 657 bp, Arabidopsis thaliana
cttaattggttgaatcaggtggattcaggaaagaaccaaacaccgattatggaagggtacgagcggccggcggacacgcaatgtatccgaccagacttgttcggggcatctcgcttgtagtgaaaggtgtcaatatgcacgcggacctaatcattgttccactaaagagacatgatgttatcttagggatggactggttggggaagtacaaggctcacatagattatcaccgaggacggatacaattcgagagggacgagggtatgttaaaattccaaggaataagaacaacctcaggaagcttggtaatctcggcaatccaggctgaaaggatgctcgggaaacgatgtgaggcatatttagccacgatcacaaccaaggaagtgggggcgagtgcggagttgaaagacattccgatcgtcaacgatttctcggacgtgtttgcggccgttagtggtgtaccactagaccggtcagacccgttcacgatagaacttgaacccggaacaacccccatatctaaagctccgtaccggatggcaccggcggaaatggcggagctaaaaaaatagttggaggaattgttggataaaggattcatcaggccgagtagctcaccatggggtgcaccggttctgtttgtgaaaaagaaagatg

SEQ ID NO: 15533 - DNA, 553 bp, Arabidopsis thaliana columbia
atgagagacaccaaaatattattgttttatgttataccttggattccccggtttgcttcagcttatcagaatgcttggagacattttgcaagaagagcatgtgcttgattgtacgttcaaggagtgcatcaatgctacactgttaaataaaaaccacatgtactctttgttagtaataacctttcttagggattgtttaatttgccaagaacagataagtttttcacttacttttgcaccgtttggtattatttcacgcagctctttgacacgatcttggatcatttggcgatctttaggccttggtcttgggttctctcctggtttaagccttttccggttattagccggttttgcagtttcattcttgttcaccatccttggactgccctcacgcttcaagctgtgcgcttgttcaacccaagaacttatctgagacccgtagaccgatgatggcccaatggttgccatgtttctctcaaataactggctaccttgagggctactgtgagacggcgtggtaacgaagaattactaactttagcaaggtggt

SEQ ID NO: 15534 - DNA, 577 bp, Arabidopsis thaliana columbia
ctccatctcttccataatctcattctcatcttcctcaccttcagaccaactaaattccactttgcaccgatcacagtcacacttaaaaccgtaatcctcaagcaatctcttttgtctactcgaatagttcatgttcacagggaagtagcttaaacaaacttctctaccttcaggaacatcatgaatcatcctaatgatgatatcagtattaccatcagaagcagagtcaacataatcgaatctacaagcattaggaagacaatcatgattgaaaaacgaagtctttggataaatcccataagctcgcacagatcttttctcattcgaaacagagcacggttccatcagaccaaaggcgttaactttatcctttgacagtaaagccgccgtgagatccggcgagatagacaccggaagagatggacacacggaagataaaagagaatgaagaaacccagcagctgcagaatcaccgcagaacaagaaggatctcattgctgctgcactaccttggagagagagcaaatctggaaatagaaggagaagcagcgcgagattgtagcagagaggaggaacg

SEQ ID NO: 15535 - DNA, 529 bp, Arabidopsis thaliana
acacctgcttttacaatggctgctttgttcctgaaattcagagaatttacacgtatgtcattgatacaaatgattgaatttaatgcttggaactttttcagattcttgggttcagaaaaacatgtaactaaaacagatcaaaaccaaggaaaagtattgaaagtgacatatctaaagataactattaaactctatctatcatttcacctaaaaaaagtaaaccaacaacaaaaaaaacattcacaaataaaattcacaaaacctaatgagagatttgaaatgcaagagaaacatgcaatgcaaaggaaacaaaactcaaaatctacttgaagaaacttacacatcattgccgattccgaggttgagaagagcgtaaagcgaagcgattagcgcatcttcgctttgtgactcgtcgtcgatcatactaaccaacggcgggatcgcaccaagcatcgcaagtgttactctcgcctctatatcatcttttgctaacaacctaacctcactagccgccgctattttcttctcc

SEQ ID NO: 15536 - DNA, 711 bp, Arabidopsis thaliana
tgtcaaaaaaatctcaaaccctaagtttattttccacacattttttcagattatcaaataaaatatagaagaaaagtattagggaagagatatttacttggcggtcccatagttgacaagattggcgaagaggataccaatagtgacgttaagctgaaagagaatattaagaccaccacggatcctagtaggtgcaatctccgacaagaacaacggaacggcttgattagcgaacccaactccacaaccaagcaatatcctgcctgcaataagcatggctaggtcttgagcccccgcgttgagagccacacctatgatgaagaaaacgccggctatgagcatagttagcctccttccgagcgttcttgtcgtgtatgaagcaaagaacgttgcggttagaccggctaagtataaagatgatgtgaaaagttgtagtccttggttgtcgtatttgcagtagttgctgtctttgtcggcgccacgtactactttccgatataccacgggaaaaaacttttcgagaaagtccggcatcgatgtcatcggcctgcgtatagcatttcaatgatggaaattatttttgttgttactatttttaccgttaaccctataggatattatcgtcataaatttataatttattcaggtgatgtagccatgtcaaatcaacatcgacatgtgtgttgtagaaatacaaaaagagactaaacc

SEQ ID NO: 15537 - DNA, 1099 bp, Arabidopsis thaliana
ttgtcacatttgactcaatttctactccattcaatcacgtttagtaacaaatctaactcggtttatacaaccaaaatcttgtcgaatttaaatacagagaaatgtgaatagtgttgttccttacttgacgccaaaagctgagaacattggatttaatagcacagccaggaggaccataatcaaaaagtccagcgacgccactgtagatcttaaacgaagggatatagaacaaacgccgctcgagagtattgacaacagcttttcgaaaagcctcacggttaagcgaaccattaccggagctactgataatagactgaagctccttctcgacggtagatttctcgagcttcaatttgttgagttgctcaatggcagcatcgatttctggtttagctgcacgggaagccttgagagctcggacggcgttaccctgagcttcgacggatgaggatttctcggaaagagattgacggagagactgctcggtggcgtccatcggaatctggatcggagcgatggagattgggttgcgaaggattgtggtggtttggaattgacgaagattgaagatttgttgtctgcgatgaaagacgaatgtagagaagatgcgcattcgacgaagtgtttgtttccacttactagtggcccccttagggtttaagatgataatgtggaaacctttgggcccaaggagtgggtttggttgacgaaatgaaatctaaacccaataaagagtaaagacatttaaatgtcatcacatctacacgtttgacgtttcaacatggatgcaaaattttccaaatgctttaacaccaaacaaatatgtgaacattgatgtttggtaccaacttatccctcacctaccagaaaggtccactacgtttgtttatctataggcaaatccacactaatgtttttgtgttctttttttcctctttagatacacaaatatgttgtcaaaaccaaacctaaatgcatgcatttctgtaagcaaaggcattgcgattagaaagaaaagtttgtgtgcagtgagagctgtaaattgcgtataaccacaatcagattacctctgtaatttacttaattgtgctcggtatcc

SEQ ID NO: 15538 - DNA, 1692 bp, Arabidopsis thaliana
gctgaggaaacaaatggaggtgctggaagggggaggggtcaggctgattcttcggcaaagccatggcagcaagatggtgactggatgtgccctaatacaaggtctgtgatgtgatatcggtgaggagcttcatctagctcttgtttccgttaatttgctagtttttatatattttatagtttctagcagtagtgttctcatactctttcattggcagttgtacaaatgtgaattttgcattccgtggggtttgtaaccgctgtggaactgctagaccagctggtgcatctggtggcagcatgggtgctggtcgtggaaggggtcgaggtggaggcgctgatggtggggccccggggaagcagcccagtggtgctcctactggtctctttggtccaaatgattgggcttgtcaatgtaagcattccgattaggtttgaaatagttagttcagtttcagaggataatgagcgtttggtacttgattaaaacacatcgcaagaaacaatttatattcagtagcaaaagagaacattcagatggcatatagcgttgctggatataaaattaatttgtcttatgtatggaaggaatatagcttgtatatcaatgcttttgatgatgtcagttgactctttacttagaaagaagtgatggcccgctctgctgtgctgtgtcccctaaaccggtccagattatgcgtggaggcacatattgtttccttcttgtttgaatgttgattctaatttcgtaattttccttcagatggctgttaatctgaaaaacgtaatttgaaacgtgggtaggttgtagtcttgatccttctaagaagttatatttgtgaagataggctgccttcaattttctgcgtctgatacaaaaaatggactatgtgttagtttaattgcaagttatgctatgtgtcatcgagtagcttaactaagaggctgcactgtgtgaatgtgagttcttatgcataatgcactttttctttttgcgctaattctttcaggtgtggcaatgtcaactgggcgaaacgtctaaaatgtaatatctgcaacaccaataaacctggtcagaatgaaggtggtgtgaggtatgactcaaagccagtgataagattgcctttgtattgttatcttgcaatgttcgagctgaggatttggattataaatgattttacagtgaatgtaggagaggtcgtagattttctgttcgatgtttgtagttttgttgtcagcagggtatatttattctgcttttagacagggcctaatagatacctgggaaaaagtctcaatactctcttctgcaatttgaacgagtgcttgttttcttcgacaattgatttatcccacttgtaatgttttattttggccaaattagagttgcattaagaaacattaaggtttgagtttggaaggttgtttttatctagaccagtgcttattcatttttttttctctaaataggggaggccgtggtggtggttacaaggaattagatgaacaagaattagaggaaacgaagagacgcaggcgtgaggctgaagaagtaagatatgcttttcctgaagagttctttggatgaagcattaaagttggaattcggatgagctctcagtataaagtatatataatttgacttgtacgtctagtgtatatacggatgatggtgaaatgtatgatgagtttg

SEQ ID NO: 15539 - DNA, 540 bp, Arabidopsis thaliana columbia
tacggcttttaagtcttgtttccaagtgagtttctctctgtttgatcccttattgttatccacttattgtcttcagattctagatcaatataaggaatctcatgataccagagaaagagaaggtgccgctgcgtccagtaaattaccacatgatgtgatcttggttgggcattctatgggtggttttgttgctagagctgctgcagtccatcctcgtttgcggaaatcagctgtgcaaaccattctaacactctcaagtccacaccagtaagttttctccaaacttaacaagttttactcgccaaacaacatggtttgggtttttatgtatctaatttcatccagatcacctcctctggcattgcagccatccttggggcattactttgctcaagtgaatcgagaatggaaaaaaggttatgaagttcaaacatcccctgggggaaattatgtgtctgacccattactatccggagttgttgttgtatcatttccggtggctcaatgactatcaggtcagaaaatactactagtattttg

SEQ ID NO: 15540 - DNA, 579 bp, Arabidopsis thaliana columbia
tgtcttatattgggacgatgtgtggctgatcttgtgaggcaatgtgaagcagcaagtaccattctttgaaactgagactcgtcgaatatatctgtaacgtctggatccaacagtacttttaaatttccggtatcaatcaaaggctttgctgcattccaaggtatcttttcttaggtttcacgaagtgttgcttatgctacaagtaaccagcgcagaagaaaacaacttacccacattaccaaactctcttgtcctctaggattctgaggtgaaataggatttcttccagaaatgagttcaagcagaaccactccaaaggcgtaaacatcaactttatcactgacttttccatacatgaagtactccggtgcaagatatccaaatgttcccaccacatcaccttgtatcgaatatcgagaagatgttgtcggtcccacatcgacagaccaaaatctgacagctattctcataatcataagaaatacactcggtctcttatgaaaattaacatataaatcaaagctagaagcttacattacttgaggttggagctcaagtgatagaaggacgttagaagtt

SEQ ID NO: 15541 - DNA, 543 bp, Arabidopsis thaliana columbia
tttgagattttggatttctgcagaataaacgagaatgatctgttcaagcatgactggagaagcagatcaaaagcacaagtgtttcaatacatattcttaaaatggacattagcttgtcttgttggtctcttcactggtcttatcgctactctcatcaaccttgctgtcgaaaacatcgccggttacaaacttctcgccgtcggctactacattgctcaagataggtattgactcatcagccaaatcttgaaaaacaaaacagtcaagatcaagaaattgagataccttgtatgacaagtttatgtttttgaaataggttttggacaggtctgatggtctttacgggggcgaatttgggtctgactttggtggcgacagtacttgttgtttacgtttgctcctacggcggctggtccggggatccctgagattaaagcttaccttaatggcattgacactcccaatatgtttggttttacaccatgatggttaaggtttgttcttaaacctcacaaagtttgaacttccacaaagttagtgtga

SEQ ID NO: 15542 - DNA, 523 bp, Arabidopsis thaliana columbia
gaatgagcattccttgatgggttcctatcgattcttttccttatgcctcgggcatttgcagattgagccatgtttgcagcttctcgcagaccagtaacaaaagctccatgcatggttgcagggtatcgccttgttgtggcttctccggcaaagaaaagccttccatctcccacactttctgctaatatatcgtaatcatcgcctgaagctcccactgcaacattagagtaagatcctaaactgaatggatccccaccccatctggtgcagaccgtttgaagtggatcagggacatttattccttgaggttcataaatacctgatattcattaaaatggaacttgcgtcagacgctagcatcaactttaacaaatctggaatacaaatcctcaactaataattcttgaagattgatattgacaggtaaaaattgaaattcaattaaatgacaatcaatagatagtgaaatctattacccctaagaatatgaagaacacgagtcactgcgtcagtgggtggcatt

SEQ ID NO: 15543 - DNA, 523 bp, Arabidopsis thaliana
ttaccagagaccgaatcggcggacagagaagtggggagaccagagggtagaacttgtgagggagagtgtatattatgagatgctgttttcttcttcgatgtagtgtttgtgacaaaatctttaagaagaacagacttcttcttttctctacaacctttgcccaataactcaggaagacccggagatgaaggagtagaagattcgcctgtacttagtaattcagtcgtatctgaagctgacaagtcagatgtggatcgatcgatcgatctagaaggagaagatgagggaacgatcgatccaatttcctctgggactggattcgtcgacgtagaaggtgattgatcgatcgatctaggtggctgatcgatcgatccagattgcgcaggagaagatgaggatgaagagtcaacattagtggaatcaacttgggtggagataggtaagaaccagtcatcattcaccattggaggagtaggagggggtagaggcacattggattgagtagcagtcgcatatggataga

SEQ ID NO: 15544 - DNA, 572 bp, Arabidopsis thaliana
cttggataaagattcctgtttcaaagtcccacattacatcacagggtaattttagcattctactatacaaaggatgaaggattttataagaaaaagttgtttaccttcctggcagtcgctctccaggactgaaacccaatccatgaattcttgtgtaaccgatcaatcttgtttgagattgcaaaaaaagctccaaagtcaccaagagcatcgcgatagtacggattgttgaaaagcggaagacgtgatgatgcatcgacatcatccatcctaggtctacgtcctttaactgactgcaatatgatacattcaaatcagttgagaacaatttctctcctttggaccatcttatggttgcaaaaacactatattgcacatggaaactcaccaggccaaccccacgatagaggggatcttgatgtagaaacgaccaggttccttcaccaaaatagggttcatatatgcataaaggttgaccggttcttagcagctccccttcatccctctcatgtagatcattcttacttcggtctgcccttttggcgcttttatatacatcttcccatgtccca

SEQ ID NO: 15545 - DNA, 483 bp, Arabidopsis thaliana columbia
gcagccattggacaaatggagttttactacaagcagtttcccgagaacatgaggagtttcgctggatccatcttttacgttggaggaggagtttcgagttaccttggtagcttcttgattgcaacagttcacaggacaacacagaactcgtcagggggtaactggttagctgaggatttgaacaaaggaagattggatctcttctatttcatgatcgctggaatcctggcagttaattttgcttatttcttggtgatgtcaagatggtataggtacaaaggaagtgatgacgaagtgacaacatatgaaaccaatgaaaatatcatcaaacagcaagacaagaacgttgcctgataatcatggatttgtcatcttctggaagctgttagacttagtttttggtcagcatctctcaatcgcctagtacattttctttggattttcttggaataagccatatagagatgcagtaatcatatactt

SEQ ID NO: 15546 - DNA, 573 bp, Arabidopsis thaliana columbia
  unsure (1)..(573): unsure at all n locations
ggaattagatcactcaaccaccttgatttctcctccaatcatctcaacggttcactccctgagtcactcactgaactcggaagcctcgtcggaaccttgaatttctctttcaaccaattcaccggcgagattccaccgtcgtacggtcgatttcgagttcacgtcagcttagattttagtcacaacaatctcaccggaaaagtacctcaggtgggatctctgttgaatcaaggaccaaacgcattcgctggaaactctcatctctgtggcttcccattgcaaacgccgtgtgaaaaaatcaaaaccccaaatttcgtcgctgcaaagccggaaggtactcaagaactccagaaaccaaaccctagtgtaatcagcaatgacgacgcaaaggagaagaagcagcagatcaccggttcagtaaccgtttctctgatttctggagtttcggttgtaatcggagctgtttctctctctgtatggctgatccggagaaaacgaagctccgatgngtacaattcggagacaaagacgacgacggtgggtttagagttcgcgaagaagggcaagaaggta

SEQ ID NO: 15547 - DNA, 668 bp, Arabidopsis thaliana
ataggatcggaaaacccgggtcaaaaagactcgtcttcatttttttaatctcaggttcgtctccttcccagaaatgcttcaagaaattcatgtgttttggaatccgatgccaccatgtgaatatctcgttaaggtaaccttggtctcctccgttgtaagacacaacttcattaatgttatccattagtaactggaatgttgaattagatggctcaaccaccattagaccagagttgaagagcgtagcattgtttccagttgctgatatctcagggaactcgaagaggaaatcaatgtttctcaggataagcatgtctgcatcgatgaagatgatcttactgtattcagtcagttgccaaagacgaaacttgctgtagttccattcgttgtaggcatttggtacagcattcgggttcctgattctttgaaacatttgaatcttccatccagcagctaccaagccacttttatggtattcgcttatcgtttcatcaacaagtatgaccagatcacgagtagagcctgacattcgaatgctctgtgcagctgcaatggctccacagacataaaattgggcagaatgcaagatagtcgcgtaagcttctttctttgcactgcggagtagaaattatctgcagttgaaataaacataatcagcttaggagggg

SEQ ID NO: 15548 - DNA, 475 bp, Arabidopsis thaliana
gggtacataaagatcaaagacaagagacttaagacttgtttcgaagatttctgcttttgggagagtatgctttggcattggggtgagacgaactctaccaacaattcttccaccaccaccacttcatcaccgccgcataaaaccgctctcccttccctgtgaattcttttggctttctggtttggtacaaattactctgcctttcgccaaccaaatgtgggttggatatgttcttttgtttttttattatcagcttgaaacctgtatacgaatcccagaaacaatgtaatcatgaggggataaaggaatgaaagacaaataaagaatttacaggaagatgaagctttgcattcaaattttaaaactagagggcttttgttattccgttggacataaaagtcaactttatttatccttgagaaccggaaccgaaccgaaccgataaaattgattttagtgaggagaccatagtttt

SEQ ID NO: 15549 - DNA, 609 bp, Arabidopsis thaliana columbia
tttccaccgtgtgaacattctgagtattctcaccttgccttgatgattcacctacttccaccagacgtggagagtgtgctgcaaatgcaggtccggagaaaggctggatgttagaatccctttcatccacatttcttctaagaggtacctgaggcaaaggacctgcaaagtttggtaaagaggtagctcttgtatgagggtaatatgcagccaccaattcatcaggatttaaaggaggatgaggaatccttggaggtggatcaataggagtaggaaacgaactctcagacatttgagattgtgaattcattgaagatctcagattttcatctctcatgaacacctcttctctaacattcctttgagctgtagtgttagtcaccctatggagagactcaatctgcctgtaaagacatgagttcctgtgatgagtcattctgaagcagctactacagattctcctaagtctttcatactgaaagctaatcagagcagtctcaccagaatcaaaaatgattcttaggaaaacctcaggcgatctgtaattccaaccggattctccacggatataactatttgagtcgagtggagcatgaaatcagagtgatg

SEQ ID NO: 15550 - DNA, 526 bp, Arabidopsis thaliana columbia
ggtgctttgatttctcaatctctaactgcatctccatcaacatgttcattcgttttaactctacctcctttgtcacttccattctctgcttctccaactcaatcatcatctgttgcttcttcccttcaattctctcgtaaacttctccaaacttgagaatcgccgtagctagttccctacacgttgatccttcactcagatctacctcttccacacgaggatgcttcctagcaacgaattcccaatcaccaacctcatcatcatcctcatcatcatcttcaagagagcttccagtagagttcgatccagttggattcagatgattcttaaaaggcgctgatttgacaactccgccagccgatttcttcacaacgggaccgattagaacatcgaggcggttatagaaacgccaagtcgacggcgagagtttagctttctctgttttgtacttcttcttcaaagtatcgacccggttcttacactgtaagtcggtcttcttacggctgttatcaccgtgtctagagtt

SEQ ID NO: 15551 - DNA, 1557 bp, Arabidopsis thaliana
ggcatgatgttcatgtgattttggtatcagattgctttccaataccgaatctttttacgggtcaagaacttgttgcccgtcaaggaaacatatggctgtataagcctaaacttcaccagttaagacaaaagttacaacttcctgttggttcctgtgaactttctgttcctcttcaagctaaaggtcagtgactcagtagtaagtttcttcgtcttttgtatcagctaaatttgacatctctattctctcctcctaagctgattatgattcaattgcagataatttctactcggcaaatgccaagaaagaagcgtacgcgacgatcttgcactcagatgatgcttttgtctgtggagccattgcagtagcacagagcattcgaatgtcaggctctactcgcaatttggtaatactagtcgatgattcgatcagtgaataccatagaagtggcttggaatcagctggatggaagattcacacatttcaaagaatcagaaacccgaaagctgaagcaaatgcatataaccaatggaactacagcaaattccgtctttgggaattgacagaatacaacaagatcatcttcattgatgcagacatgcttatcctcagaaacatggatttcctcttcgagtaccccgaaatctccacaactggaaacgacggtacgctcttcaactccggtctaatggtgattgaaccatcaaattcaacattccagttactaatggatcacatcaacgatatcaattcctacaatggaggagaccaaggttaccttaacgagatattcacatggtggcatcggattccaaaacacatgaatttcttgaagcatttctgggaaggagacacacctaagcacaggaaatctaagacgagactatttggagctgatcctccgatactctacgttcttcattacctaggttacaacaaaccatgggtatgcttcagagactacgattgcaattggaatgtcgttggataccatcaattcgcgagcgatgaagcacacaaaacttggtggagagtgcacgacgcgatgcctaagaaattgcagaggttttgtctactgagttcgaaacaaaaggcgcaacttgagtgggatcggagacaagctgagaaagcgaattacagagacggacattggaggattaagatcaaagataagagacttacgacttgttttgaagatttctgtttctgggagagtatgctttggcattggggtgagactcagaccaactccaccgtcgctgctgattcttcctccaccgcgtaaaaccgtactactgtgtgtgattttcgttttctggttaaaatttattcaaacattagagtaggggttaaaataacaaatacctgataagtaaaggttcgttttgcaaaacacggacttctaaaaatctcattttcctaatacgcaccgttttgtgccttggtccaaaatcaaattaatttctccttcccaaatccctaaaatgtctcgtcttttgttgttaccaggcgattatgaaattctcgaaaccgaccctggtcttacggagacgatga

SEQ ID NO: 15552 - DNA, 589 bp, Arabidopsis thaliana columbia
tgggcttctctggctctttaggcttttcaggctgttttggcttttcaggttccttaggcttctcaggagctttaggctgagcatctttaggtttctgaggtggttgttggggttgtggctgaggaggcttgggtggctcgacgatctcaatggtctttatcgagccgccgcctttggaacagagtttgtccatgatcctctcaggactacagcaaaccaccttgatgataacaatgttggacttttcatcgaacaattggtctcttatttctcttgttcccaatcacacaagtaaatccactcagtccatttccaaacaaaaccaatcaaaatcaaattcaccaaaaaaaagttaagaaaaagagagaagtaactcacgagggaacttgcaaagaaccttcttcactttcttgtaacatttggcacaatcaagatccaccttcaacttcatcatagttacctgtttttcagatatcaacatcactaaatcctctgcttcttccatagtttgcttttttgataaaaaattatatgtactaatggatttgacgtttataagatcttattactgaaagaacaacaaaaaagg

SEQ ID NO: 15553 - DNA, 945 bp, Arabidopsis thaliana
cattattaatttataattaactttatgtacatttgactgataaacattaaaaagacttatttgaacctttttgtatatgaattcaaaattatactgataaaataacgtgaggaagaaatattatgaaagcttttaacatataaattaatttgcataggaaaaaattacacaacttaaattgagattagttaagaaacaagaaaaaacaaagttgatagaaaaataaaagtattaacacgactttggattcacacacgtaccattgaattatatctcaatacacttttacttaattaacttatttccaaaccaagtagccaaaatcatattattcttctctctcttccttttttgagtttcaaaatgcataaatacgagaacgagagacgaagaccaaattaaagtccaagcaccaatctagacctcttaggaaaaaaacctaaaaacctaatccccaaacctaaaaggcttatctcatctcttcttctttgtcttctttactctttttttacctctctcttcattgttcttcaccatgtctaatgaaaccagagatctctacaactaccaatacccttcatcgttttcgttgcacgaaatgatgaatctgcctacttcaaatccatcttcttatggaaacctcccatcacaaaacggttttaatccatctacttattccttcaccgattgtctccaaagttctccagcagcgtatgaatctctacttcagaaaacttttggtctttctccctcttcctcagaggttttcaattcttcgatcgatcaagaaccgaaccgtgatgttactaatgacgtaatcaatggtggtgcatgcaacgagactgaaactagggtttctccttctaattcttcctctagtgaggctgatcacccggtgaagattccggtaagagccggagaaacgagagttagtcggtgaagaag

SEQ ID NO: 15554 - DNA, 477 bp, Arabidopsis thaliana columbia
cttgtgggtaccatgtctctggtagtctcccagctgatgcaacaacaaacacaaataagtaagtaatagtgtctagggtttaattagggtttagggttcatgaagtaagaggcttacaaggattgtagtcaccaaagatgacttgagctatagcgtctcctccagcttcaccaggatatccgacccataaaacagcccgaatcgtgctcagattcttggcgaatgagatatctataggtccggctgacattatgaccaaaacaacagttttctttgcagcatttgccacatctctcaccagcttttcttgataacccggaaggtataggttaacacggtcaagaccctctgcctctaccgtctgatccaatccaaccaccaaaaccgtcacatcagcctctgaaaccgccttgaccgctgctgaaatcagtgtttggtcccacatttgacatctttacacctggctcgtaacaattt

SEQ ID NO: 15555 - DNA, 875 bp, Arabidopsis thaliana
cagtatccccagtaccaatggaaatacctagttattgggagatgttgaggttcatgagagatttagatatagagactttcaatggtgggacagacccggttaaagcatataactggagaaatatgttggagtgcaaattcaagtcaatgaggtgcccagttgagttttggagggatctagcctcttgctacctaagaggtgaagcacaagagtggtgggaacgtgtgaagcagagagaacaagttggatgtgtggatcaatggtcttttttcaaagaggaattcactagaagatatctcccagaggagaccatagatgatcttgaaatgaagtttttaagacttcaacaaggtaccaagacagtaagaaaatatgagaaggagtttcacagtctcgaaagatttgagagaagaaaaagaggagagcatgagttgattcataaattcatctcggggctgagagtggatatacgcttgtgttgccatgttcgggacttcgacaacatgattgacttggttgagaaggcagcttcgctggagataggacttgaagaagaggctcggtataagaggatcgctcaagaaaaggaagcgatgggatcatatggccaaaccgggcatagtaagagaagatgtcaggaagtgacctgttacaggtgtggtgtagccggacacatagctagagactgtagaatgccttttgatgggaagcaggaaggttaagtggaatgagacacaattttcagcatcccctaagagacaagtgttggctgcaagagattaggaagactcatgaccgaacgttggtgaggatgaagttgaggaatagtgtgactcaagcttggggtcactatggtgttgtttacatgcagtgat

SEQ ID NO: 15556 - DNA, 427 bp, Arabidopsis thaliana columbia
cttaacaggatttatcagtgtagactgcggattatctcctaatgaggtctctccttatattgagccgtttactggactacagttcacaacggattcaaatttcattgaaaccggaaaacttggtagaattcaggcaagcctagagccgaagtaccgaaagtcgcaaacgacgttgagatattttcctgatggaatacgcaactgttacaatcttacagtgacacaaggaaccaactatttaatcagagctagagcaatatatgggaattatgatggtcttaacatttatcctaaatttgacttgtacataggccctaatttttgggtaacaatagacttaggaaagtatgtaaatggtacatgggaggagatcatctacataccaaaatctaatatgttggacgtgtgtcttgtcaagacagggccg

SEQ ID NO: 15557 - DNA, 567 bp, Arabidopsis thaliana columbia
tatcttgtgtcagcggaaaatggttgcagaagttgaagctgtgatagctgagatggacagaaatagcattcgcattgatgagcactctgttcctgttattatgcagatgtatgtcaatgaaggtttagtcgtacaggcaaaagctctgtttgagaggttccagttggattgtgtgctttcgtcaacgacacttgcagcagttattgatgtctatgctgaaaagggactgtgggttgaagcggagactgtgttctatgggaaaagaaacatgtcaggccagaggaatgatgttttggagtacaatgtcatgatcaaggcttatggtaaggccaaacttcatgagaaagcactttctctcttcaaagggatgaagaaccaagggacttggcctgatgagtgcacttacaattccctattccagatgcttgctggggttgatttagtggacgaagcccagcggatcttggctgaaatgctggattcgggctgtaacctggatgcaagacgtatgctgctatgatagctagctatgtgcggcttggcctgttgtctgatgcagttgacctg

SEQ ID NO: 15558 - DNA, 502 bp, Arabidopsis thaliana columbia
ctgacgtgatccccgaggagcctctggtattgacgtacttacagtactgagatgggaccatgttaaaatcgaattttcaaaccacaaatttgacattgtttggaataatgttgttgttctctacacatgagcacatggattatagccccttctctactttggggcggattgattgattgataataggcttgctgttgtatctttgataggtatgagaaggcaatccagatttatgaagacacaggcacgccattcactcaacaataagttgcttaagtatggagttaaaggccatcttctcactgctggcatgtgccacttatgcaaagctgatgttgtttccatcactaatgcactggagaaatatcaggttcttcttcttccacagcaaacagccttaacatcagcatcctggcgtggtcctttgagtaactatgacatgtgttctaacttgtactttcttgcaggatctggatcagactttttcaggaacacgggaatg

SEQ ID NO: 15559 - DNA, 868 bp, Arabidopsis thaliana
cctgctttggttttgcttcctcagcactcgcttctgctgcaggtgacacttcctcttcttccttggcttcagtagcttcttcggtagcctccacttctgagaaagctttctcatcttttgcttcagctgtaataaccacacatactcacagttattagcgtaatcaaaccaaaggccaaaaaacgaaaaacaagctcacgatatttagtttaagcgctggtatcaggtgaagaactaaccagaagggctggtatcaggtgatttcttcttctcagcagtgagaacttgggaaagagcagccactgctgctgctctttgtgacgcctggcttgtcaatcctgatcttcggggaggtgactttgatgatggtgaagaattgaatgcggatgttaaggcggctaaagcttcagccctttgtcttggacccccttgacttccatttgatctgtctcggctctgcagttaaagaaatgagcgtctaagtcaacatatcaagaacatgggacactagtagctgtgatttgagaaattatttgattgcaactcaaaggtttgcgtaactctgagagattcatgaatgggaacccagaaatgagtcccagagcctttttttttccttcatgatatgccaatatctttgtatatatatgtatccaaaaaaatctagtagaaacatagaataatgagcttaagactatttaccggagagcttgttctcccagaagaagaattaaaggcagaagtcaaggcagctaaagcagcagccctttgccttggtccttggtcccactgctagactgatcctgcagcagaaggtaaattataaaccaacgttccagggatgtaatataatatattacaaaggaga

SEQ ID NO: 15560 - DNA, 499 bp, Arabidopsis thaliana columbia
ttgttctttctaagtttgttgaaaaataccagcgaacaagtttgtatttgttttccatactctgaaatgagaagatccaactggagtctgtcaattttagcagctcctagatgtctatctgtcgtcatattgtaatctccagtgtacacaatcgctgcatctcccatctttgcataaaccatcactgctccaaggaccttatgatcaatacaaaataagctttaaaaaatacagaaactctgaatataaaaaacacagaaagaaattcactaaaaccagaacgaatgtcttacatgccctgcataataagcccggatttgaagatcttcatcaacctgaattgtttgcttcaaatctattgcaattactacatataaaaaaacaagaggaagtcaagttatagacactgcatctgaattcgtgcacaaagacctcaaatgaactaaatccaatattcaagtaccttttttcatgcagtttgcgatatgggtagtggtga

SEQ ID NO: 15561 - DNA, 523 bp, Arabidopsis thaliana columbia
gcgactacgccaagcttgtgaccacccacaacttgttaaaagatataactcagatcctgttggaaaagtatcagaagcagcagttagaagactccctagggaggctcgaagcagactgatcaatcgcttagagtcatcatctgccatctgctatgagtgccatgtaagtgcagaagtgcagagtaaatgagacctagaaatagcatgtcctcaggctcactattctctagttcttaggtcttgtcctgactatctttgcttcgtcatgtttcatatttattcgcaggagccatcagacgaacctgttgtgacgttgtgtggccatatattttgctatgaatgtgttttagactacataactggggatgagaacacgtgccctgtaccgagatgcatacaacagcttgcgcgtgatgttgttttctctgaatcttctcttagaaattgcactgctgatgattcgggctgtagttcctctcatgataatggtcttgatagatcggtatatcaaaaagagactttt

SEQ ID NO: 15562 - DNA, 243 bp, Arabidopsis thaliana columbia
gatatatttttgcaggcttatcccgttgccaagaggggtgctaaacagacactggtttttaagggtgaggttaacagaaatttagaggctgcaacatgctccaaagcaacaacatctgaggagaaccgtaaagaagaacgaagattgactttgtcaggaaagttgtcaccagaagtgaaggtagaggaatcaggaaaacaattgcaatgattgaagcttcttaaactttggccctgctgctct

SEQ ID NO: 15563 - DNA, 538 bp, Arabidopsis thaliana columbia
agacttatgagctatacccatctacactagtatgcaggaaaaggagaaagaactaaccttgtcttggttgagtttttggagacaaacatagaccatgtcttcccagtatgcgcgaaagtctttatcagtaagcgcatattgggaagagatggtctctgttttatacctctgtaaacccattggttttatacctatgtaatgatcaaatggcttaagcgctggatccccgtaaaatccctaaccacacacacacgttgtacttaagaaatcaccatctatcaatccactaagtttcaaggatgtagataaaaaaatcaaagaagtaggacgtaccttgctctcgatcatctggcgtttaaagaggcaatagtgttgtacagcttcctcggagaaaggttcctcatcggaggaaaataacacctccagagatgaataatcctctaaaccatcgaagctatccacatcccattcaagcacctttaagtaatctattcctccaccctcacgctcctcgattttggcttcccttcttctctct

SEQ ID NO: 15564 - DNA, 515 bp, Arabidopsis thaliana columbia
cctcacagtcattccaacaatatgcttcctctcctgcaactttttcacaatttcgtatttgtgctctgcaataaaaaaaacaaagcttagaactaacatcaccacctttgcaatgaacatatagtgaggtttataatccaaacaataaataagcagattataacctgggaagactccggcaaatccatcagccttttcaatcaactcctcaacaggaatggatgcgaggtttgcgtctttgtgtgtaccaagaagagccgaagatggatacatgtttgttcccattccaagtctgcgaccagtttccttaccaatagcaagttggtcacctggccacatatgtgttcaagagaatgttagggggaacttgtgaaggtgtatagctagcacaacaagatagatgggtagacaaatttaccagtgatcatcttgacgttaacaccaagattcaaagcccgtcgaattgtttcagcactgtcatgtcttgggggaccaaaagtggaacaagcaacaaa

SEQ ID NO: 15565 - DNA, 580 bp, Arabidopsis thaliana columbia
cctgaaccacaaccaaaaccaatggattagattatttttcagttctatccgacttgtaaggtaagagccatgacgctccaagttacctccaagacgatgttaggttccgagttttcctgtctagctgaagattttcaagtgctgttgaggctctcatgacttcttccggcatatcttcagtgtcatatctccaattgctctcgtcttttctgtaccctgaggtagcggctcccgatgcttgagatgcagaaaccgacctgcccattaattaagcatgtcagactcataagcaacatggaagattaaagatcgttgatttggtagaacatggagttggatttaccgtcgttgatgaggtaagctatcagaagcagatgatctgcgaggaggatttctggtgtcaaggcttaatgacgactcggtttctgactctctccttgaactaccacccatgacctgcgtcatgttctgaagaaaaatgttgatcactaaatatgaggtgaatcagcagacaaattataatggttttactcaagaggatggaaacataatcctgggtgtgcaagaattgtagcttgga

SEQ ID NO: 15566 - DNA, 558 bp, Arabidopsis thaliana columbia
gaagttgcagagatgagcgtggccgtgtggagaaccataactgcaggcatgtgttgtagctatggtttccggtgtctcgtattgaactgattctattgcggacagtcttatcaatgagcttgatgagcctgtttgatggtaagctgagttccccatgacgtcctggcatttctctctcaccaaatatgggagatggaagcttgaaagacataccggaacaggaagagcagattctttggcaattagatgattccagtgactcgagtagtcagtggagaggaggcgttgagccaaattttcccaaacctcagaggaatacctgcaggaaaaaaagagatgattccttgtttcctcggcatcgttgcagaacttgcatgcgacttgttgaccggagttccatgttttgatgcgatctccggttgaaagtctgttgtgtattgcgagccacaaaatgaaggagtacttgggcgtggagtaggggaccaaacgcccttgtaccagcttctctgtggttgaggcaatctaacattattccaggtgactttagttataaactgg

SEQ ID NO: 15567 - DNA, 545 bp, Arabidopsis thaliana
ggatacacgcaccaaaaatggcgtctcagacaaactcgaagcgcataagaagccgtgtggagctgtatttcactcccttgcgattaaagagtggaacagcgcgtatgccttgtcttatctctgaaactggtaaacaagtttgacctccaaaatcatctttttcattcacgtcgtgctcatgaacttcaacacggagcagagcaagttcaggaactgctaaagggaatgtgaactccttattccaaataggtgtccatgtatcatactctatttttgttttctccatcacctcatcaacaggtgctccagcaatacccacctgtattgaccagttataattccatttcaatcaagataagggataaaggaaaaatcaagattgtcgttcacatactctaacgaagaaatctggaggagaataagaatcaaagtgagtttttttgaagtctaggagccatccatctcccatacagactttcacctgccattgttagatgttaagaaccgagaagcgtgggaggcatagatgaaggaacaacgggtgt

SEQ ID NO: 15568 - DNA, 359 bp, Arabidopsis thaliana columbia
ctaattgaaagaagcatatattgaattagaacctcttcaacatggtatttgcatatctgatcatgaagctactgattaggttaccttcttgccacggattacagccccgggctcaccttggatcaccatgtactttgctcctgccatgaataatcccgtgggtgccaagtgacccggttcgtcgaaatctttcataatatcactgaactcctgtcccttgaactatatgaaagaccaaatcacgattagtcgattaccatgagacaacatgcatcatttgttttcaaatctatgcaaaacatatagaaagaaacacacacacacaaaatacactatatatatatcccatgacaaacatt

SEQ ID NO: 15569 - DNA, 650 bp, Arabidopsis thaliana columbia
tagtcaattgatacacctaacagtctattaataaaattatctggaaagagtacgtatgcatctgcagattgacccacattacttggtcatattgttaatccaactgcttggtgtctcgttttccctcaacccagtcctcacccaacccggatacattaatgatgcaaggtcaactgtcgtaggattatacaaggaaaggtagggaagtacatataacatacctctggacagatccaagcattccctgctcctcgaatctccccaccatcaacaagggtagctctaataccatataaatcagcaacctatcacatgaaataggataatttgacaatatccgaaaaagtcatacatagactacttcacggaggttaaaacagaaatgaaatacttacacagttgtcagtgttaaatgtgaaattagcagaaagataagaaaatggaacacggtcaaatgctgcaactgcaccagcttccttgtttttcagcattgcctcatatgccaaagatgtagggagatctggagacagataagctatcttcctagagaccatgcaacttcccacaaaaacgggagcatcaagcgggccttgacagttgaatacagctgtgacagaaccagctagctgcagtccaagatgatagaatga

SEQ ID NO: 15570 - DNA, 1209 bp, Arabidopsis thaliana
tgcaaaaatctattaccgatgaagacggttaacggaaaaggatcaacggacgcgtacacggtggcgaaatacggttctaaatgggtccgtacccgaaccgtgtcggattctttagatccgaaatggaacgaacagtacacgtggaaagtatacgatccgtgtacggttttgactataggagtcttcgatagctggggagtatacgaagtcgacggtggaaaagaagccacgcgtcaagatctaagaattggaaaagtacgtatacgtatatcgacgctggagactggtaaagcgtatagaaatacgtatccgttactgatgttagttaacggcggcgttaaaaaattgggagagatagaattggccgttagattcgtgagaacagctccaccgttggatttcttacacgtgtatactcaaccgttattgcctttgatgcatcacattaaaccgttgagtttgtttcaagaagatatgttgaggaacactgcagtgaagatcttggccgcacatttgtcacgatctgagccgcctttaaggccggagatagtacggtatatgctcgacgccgatactcatactttcagtatgcgtaaagtcagagcaaattggcttcggatagtgaatgtagtcgccggaatggtcgacgtggtgcggtgggttgatgacacccgtttctggaagaatccgacatcaactttactagttcacgcacttgtcgtgatgctgatttggttcccggatcttatcgtaccgacattagcgttttacttgttcgtgattggtgcgtggaattataggttcaggtcacgtgctgctctaccacatttcgatccaagactctcgttagctgatgcagctgatagagacgagctcgacgaggagtttgacgtcgtaccgagcaaccgaccaccggagatggttcggttgaggtacgataagctacgaaacgtcggagctagagttcaaacgattcttggtgaagtgctgcgcaaggggagaagatgcaagctttggtgacgtggcgtgacccacgagcgactggtatattcgtggcgctgtgtttctttgtggcgttggtgttgtatcttgtgccgacgaagatggtggctatggcgtcagggttttattacttccggcatcctattttccgtgatcggaaaccttctccggtgttaaatttcttccggcgactaccatcattatctg

SEQ ID NO: 15571 - DNA, 975 bp, Arabidopsis thaliana
tactcagtgtctccttaagttggaacaaatgtgcagttcctacctgtggaaaggaacccctaactcagctcggggtgcaaaaattgcttgggaggtggtttgtactgctaaggactgtggggggggttgggccttaaacgcttagtctcttggaataaggtctttgctttgaagttctgctctttacgaaggctggttctctgtgggtttcttgggtgaaaataaaccttattggtagtaggaacttctgggatttaaaccctgctaactctggcagctggatctggaggaagctgtgtaagttaaggagcttagctagaccttttttggtctgtgaagctgggtctggtactactttaagcttttggctcgacaactggactggtctaggacctctaatcaacctgtctggccttattggtccgcagattgttggtctgcctctttattctgtggtgagagacggtatccgtgataacaattggtggatttctgtaagtcgcagtaggaaccccatcatatctctcattaagtctatcttacctgacgtgggtcccatgattgattgtgaagaggacgatgtttatctttggaagcttgatcatcttcctccatcaacaaacttctcttccccaaaaacatggcaggctcttaatccgcttggcccttctgtgtcttggcacaattcaatttggttcaaagatcgtattccaaaacatgcttttatctgttgggtggttgcttagaacaggttgcacacccgggataaactaaggagatggggattttccattctgtcgacgtgcctcctttgcaatcagcatgatgagtctagggagcatctgttctttgagtgcaccttcagcgatgctgtttggttctatttcacctctatgctaaatttctctcctccggtccagttcatggattatctctggtgggtgaaatcagcaacaagggaccctaaccttgctt

SEQ ID NO: 15572 - DNA, 544 bp, Arabidopsis thaliana columbia
gaatcattgtctaatgaattgaaagcgaatcaagtcttgagatgtcaccgactatataaggaatgcccatattcttatgagccattcaacactaactggtcagcttatactccagaggaagggaacatatgttaacatgataatattattctgtagcttattttctagagaagacgaaactttgacattctcacaccactcaagacatatattgttatacatgtaaagactaaaccattgaaaaggtgacaaacatactcttttcatcaacaccaacagcaggatctgcatgatcattcctgaaaataccattttgacccataacatgggaagcactaggtgcttgtgtcagagcgttttccagagcagctttccactcgtgtagatcctccatagtgtcagcctgcaaaaaaaataaagtcacaaaatcataagaaatgttcagagcgtagattaagatggaggatgaggtggatgcacctgataaaaaccagattaagtagagtacaacagaaaactaaaattttgagaaaaaccttaagtg

SEQ ID NO: 15573 - DNA, 571 bp, Arabidopsis thaliana columbia
aaaaatgtcaggagacggagtttcagcacttctgcaatagtcagtgatgagaactttaccccctggtttaagccacttgaagaatgtcctgaatagagctggcttgtcctgaacagagataaagggtgcagaggatgattaccaaaaaccatcttcaagagtgaaagaacaaatatatatataatatattgagtagctttgcttatacttggatgtgcagaatagtgtcacggctgtaaatgacatcaaaggaattatcgggatatgttttggtggtgcaatcagcgacttcaaactcgactgagcatttgagtccaatggcccgctccagtgcgaaagagatcatgttgaccgacagatcgattccaacaacatgaacatcgaaattctcagccatgtagaagtcactccaccgataccacaaccaacatctaggactttctgtcccggtttaaggtccatcttcgccacaaattctttagttgtctctgttaaggcaacaagaacatatagatacactcagacaatacaagtacgtatgtccatatgaagataaaagagtaagaatgga

SEQ ID NO: 15574 - DNA, 394 bp, Arabidopsis thaliana columbia
gatctacaagaagtgaatcaatgtcacttaacagctccgctgagtgatcctcctggaggaaaattctctactttccaaacacttctgcaccacgtgactcccatagttgtcataagagagttgcacgtaattgccatcaagatgtttcgagagagcacttgtcacctcataatctttcaaacgcaacaaatattgcaccacgtagtttctgaccaatagagattttggtgtaagagtacttaatgtgatttatacaattattaacgcaaaatcgtaaaataatcttatcgtacgcgtagcaattcccgcgataatcttacagctgtactgtttatctccttaatcagagggtctcttagctctcgagaggattgtctaatcaattttttaagca

SEQ ID NO: 15575 - DNA, 556 bp, Arabidopsis thaliana columbia
aatcccctttttcattttctctctctctaacgctctctgaatctcaatttcaatttcactctttcgaaacttcttcaacaatggcaccgacaccatcttcttcaagatcaaatcaaactcaatacaccttaatcagaactccacaaacaaaaccaaatctcaaattcccacccaaaaaccccaaacccagacggatctaaagatccatctccaccggagcatccagttgaagtaatcggccggatccgagattaccctgaccggaaagagaaatcaccttcgatcttacaagtcaacacagataatcaaacggtacgagtcagagctgatgttgggtacagagacttcacactcgacggtgttactttctcggagcaagaaggtcctgaagagttctacaagaagtttatagaagagaggattacaggagtgaaagttgggcataaatgcacgattatgatgtatggcctactggtgctggaaagagtcatactatgtgtggttgtgggaaagagcatgggattgtgtatcgttctttgagagataaattgggaga

SEQ ID NO: 15576 - DNA, 419 bp, Arabidopsis thaliana columbia
ggtattgtcttgtctgagaaagtcatagaagatgatgctgactgaatgtttgatgctttaatgagtgggattcatggttgcttcgccatagcagcttcttgagttactctacagccagtggttcacacagcgtgataagtcctgttcttgaagcaaggactggattgaggcgtcgattggatgccgtgtaggcagctgagctgagtcagcgagtatgagctcgagatgatctccagtaatcaggtcctcgtatcgttgagagtgttggatgggccagaacttctgcgtcaggatctcttagatagtgtgggatgagataatactggcagatcagagtgcaagaacggatcaggatagcagaaatcaggactgccggatctttgaatgacctcgtggaaccgtagtcttgggaatgactg

SEQ ID NO: 15577 - DNA, 2038 bp, Arabidopsis thaliana
ctcggtcttgagctgtcttgttctccgaggaatatcctggagtacgtctttagggtcgtccgtgtactggcctggaacgttgaagatagctgcaaaagcaacggttgctatgagaatggctactagggtagtggagtttatcgcgttgttgagtccttccgtgtgcattttgttgacccgtttagcgattccttggatctctcttctcgttctcccggtttgttcaagctgagtatgcacctcatggcctatttcactaactgtttctttcagtttcctagaagagcctgatggttccactttttcagctggcttgatggatcttgcgttctgcataccgatcttttgcagaagcggtacgatctcatgtagtccggttttctcagcgatatcaagagctgtttctcctgatttattaaccgccactctactgacttcacaatactttaaaactgtctgaacaatctgcaaagaatacaagaaagattctaacttctgcaacaagaataacttaaaagattgatcaacgattacctctgctctgtttttacggactgctatatgcaatggagtgtttcctttattatccgcggaattgatcaacgaaccatctgcttccatcaacacatccacaatctcagtgttttgtcctttaaccgccatatgaagagcggtttgacctttcttgtcgactcttgtaaccataccagccttcttttcaatcaacttcttcacaatcaccgtgtgcccgttcctagctgcagagtgcaaagcggttttaccattgcttctcgcaatagcagctaagtccacacctttatccaacaagaaacaaacaatctctccatgaccctgtgaagccgcggtatgaagcgccgtggttttggatgaatcaaatgtaaatgagagttctggatttgcctctattaacacatcaagaacctctgcaacaaaagcaaaatccaaattcacataaacattctcctatctttgtcaatgagcacactcatagcaatcttcacataattagagaatgaaagtggattatacagtagtagatcattagcaatttactcacaattagagataaaaatggagttgatcttcagcatatatatgcaaaattggtaattcttgagcacaaagactttatgagactcaagtcaactcacgtagatttccgtttttggcggcgatgtgaaaggcatcgaagccgttcttgctttggttccggctaagacagagtcggagtgtttcatcagaatcttaaccatgtcggtgtaaccgtactcagccgcaacgtacaaagccgtttcaccggactggttttgctcggccaacaactctttcagctccacgccgtcgtgttctccgatcatctccaaaagaaggtccgttttgccttctctaaccgccgtgtgtaacggcgtgtcgtcacgtcttgccgtcatctgcttcgtcatcgtcttcttgatctctttcatgattgatgatgattctgtttaaagaatctttgggattaaaaaaagtttggcggaaatttagatcgagatagggaggtctacatgagtagatttgaggaagattcagacaagagtaacatgaattctctggacaagaaacaacaaaatatattattacctcttaactatgctcgtggttttggctgcttgtgttatatcacatagacatatcttaaaactatcttaatacaacaaacaacacatgatcaaaccttagtgtccactcgaagcattatttttgtttgtttttctatttgaaaacaaaaaacaatcagatttaggtcaacaaacaaatcatgagtatatttgaataaaatgtttatcaaaaccaacagaatcaactttaaatgttctccgtgccactaattcactaaaatgaaatttgcgatggatttagtcatttagacattttttcaaagaaaaccaaaaaacaattggcgatagaaagtgacatatgaagaaaataataaatgagtctccattattggggttttctgtgtgtacgtggtaaaata

SEQ ID NO: 15578 - DNA, 562 bp, Arabidopsis thaliana columbia
  unsure (1)..(562): unsure at all n locations
nnnnnnnnnnnnnnnnnnnnctaaagcgacaacaggcaatatgagacacacgcgagtgaattttatattccattgccgctaattgccatgaattaaaaattccagttagccatgatgcggtcgattgttgccggaaaagtgatgatctatctgttaggctatgtagtagcgaaaattaatcaggatgtttcagtccagaggagtatggtttggcaactcacgagcgtcgtgtggtgttttttgacttagatggaacattgcatcagcaggatatgttcggcagttttctgcgctatttactacgtcgccaaccgctgaatgcgttacttgtcctgccgttgttaccgattatagccattgcgttattgataaaaggtcgtgcggcacgctggccgatgagtctgcttctgtgggggtgcacttttggtcacagcgaacgacagtttacagacgttgcaggccgatttcgtgcgctggtttcgcgacaatgttaccgcctttccgctggttcaggagcgattaaccacctacctgttaagttccgatgctgatatctggttga

SEQ ID NO: 15579 - DNA, 397 bp, Arabidopsis thaliana columbia
tgcgacgatttattgatgtcgaactggaccttcatgtgcttgccaaggttgagacttattctcccatctctgacatctatcatcgctcccattgaggctaagacaggtcttcctaggattagacgatccttcgggtctgcttccagatcatgcacaacggcatccgtagccacctccactccattaatcataactggcagatctagtcgaaggcctaaggtgtttcttgaagacctatcagcaaggactaaagtcaggtcacaaggtttgtactgagtgaattcgatcttccttgctactgagagtggcaataagcctactgaagctcccaaatcacagaggccattgcctgaaaaccacttgaccgatgcgacatgatagagtgagagttcctgga

SEQ ID NO: 15580 - DNA, 413 bp, Arabidopsis thaliana columbia
  unsure (1)..(413): unsure at all n locations
nnnnnnnnnnnnnnnnnnnnnctaaagacccagcttccggtgtggtatcgcgtggcgctacctggggcgcgcatgaaggctcgctactgctgctgggtgctgctgatgagcggctggacctttgcggtggcgatgtttagtcagcgtattccgctggatattgtggcccgtgtactgtcgataatggtgatggtcactgtcggctttatactgcacattctctttacctctaacccgttctctcgcacgttgccgaacttcccgattgaaggtcgcgatcttaacccgctattgcaggatccgcgggttgatcttccatccgcctctgctttatatggggtacgtgggtttctcggtggcgtttgcttatgccatcgcttctttgctgagcgggcgtctggacagcacttatg

SEQ ID NO: 15581 - DNA, 541 bp, Arabidopsis thaliana columbia
atttcctcttttatgtattatgttttagagcatgtacatagctaaactttttagagtatcagttgcccatttaatattcttaattggaccaaacacataaaattgggatgagccgtatcagtctatgagacttctgatatccagtatccacttacgtggcatgccgtgatttagtattggacatgtatcccaagcagatccggctctgtgcatgtgctgagagtgcccaagcacaaggacaatcaaattttttggattttttccttggtaaaaaaggctcaattttaatttttttttataaaatatatagtaatattaggcccaatttatttctagctctaggtcttctaaaattttgagccgggcctgaattcccaagtatgtctcatcctcaaagagatcacgatgccaaccatgtaaaaatatgcctaatgtgtcgcatgcaaacttaactttcagaatcccctaagataaaaaaatatttctaagttcgtgtgtcgttgttgtacggaaaaacaagtctaacctaaacgcattgagg

SEQ ID NO: 15582 - DNA, 549 bp, Arabidopsis thaliana
ccatagctctggaggtaaaggattgttcccactccactcataagctccaagaacctgtttcatataaaatcaacaattcattatgtgattcgcgggtcgcggcaaaaccagtacaagattgtgttgttgttaacgtacggagagccagaacttgccccaggagggaataaaagtggcaccaccgtggtggtgaatccaacttctagctgattccatggctccatctccaccgtctaattcttcccccattagtctcagtgctacgtatgagagcactgtacaaaacatggtgctattcccttctacgtgtagtccccatcctccatccttgttctacacgttatatcttgttcaagttagggcttttttaccaacaaatagattggttctttcactacaaaaagattcaatatgttttcttgatctgaaacctgatggttatagagataacgacgaatctcgatttgatgttgcgcagttaaagttccatccaaaacttccgtcacatataagccgatcacctgcgacaaaaatcattaccggtgtatg

SEQ ID NO: 15583 - DNA, 603 bp, Arabidopsis thaliana
tatatgtgaatcaaggtcaccaatactcttacagcaaggcatatagtaaccgcgtagtctgaaaacctcaaacatggtggagattgtttccaaatcattttccttggctattatatcgtccaaattcccaaaagcttggccaagaatctcatcaatctcaatctcgaaatgatatgcgattccgaggttcattagcaaatggatgagacggatcctctcattgtcgctgtttttggaagacttgagcatgtctctcacttttggcttcatcgtcacttcaatctctcttgagaaatcatcaaattcctacaattattaaatatacaatgcaatttataaaaaaaatcgttcatgttgtctgaaccaacaattattggggtcatcttgtgcttcttatatctatctacttacagcgacatggaggggaacagaaaggaagtgatctccccaaagagtgggagaaaagtgtgccaagggacgactactttcaagattatcattactctcagtagccctaacgcagaccaagtggtgttgttttgcggtttcaaggaaagagtgtgcttgtgaaccaacgcctgaggaaaaagagaggggtttgtt
